United States Patent Application Publication US 2008/0039413 A1 - sequence listing, part 2

SEQ ID NO: 94 - DNA, 690331 bp, Homo sapiens
  misc_feature (1)...(690331): n = A, C, G or T/U
gaagctcagggatggaactgactaaacatatgtgagatgtttccttgtttgctgctcatggaggtttcatttctgaagtcttttcttgggagggaaaaggatgtgtggatatatgaggtgactctagaaccctcattttatggatgaagaaactgtgattcacagagggagagtgatttgtccagtgtcacgtggggagctggccggggagccagacctcctgtaccttttattgcagggtttattttatatatatttgctggcaaaaagaaggaaagagaaacaatttatatgttttttatttataataaaaatatttattataattatataataattaaattatagtaaaaatatttatttataatataaatataaaatgtatattatattataattatatataattatattgtaattaaattatatataattttatatattatatattatatatattaaattataatacagcatattgtaatacaatatatttctatattaatatagtatagtaaaatatataatatataatataatttcattataataaaatataataaaaatatttaaaaatgtattttatatcttacatatatattcaaatatatacatatatttatataaatatatacttaatatttatatattaatatatatttttataaatatatatataatataaatataaatatatatttatataaatatatataaatatatatatttttaaatatatatatatttttaaatatatataaatatatatatttaaatatatataaatatatatttaaatatatatatatttttaaatatatataaatatatatttaaatatatatatatttaaatatatataaatatatatttaaatatatatatatttaaatatatataaatatatatttaaatatatatacatatcaaatatgtatatatattttttctcttttttgtagagagaagatctcgctatgttgcccaggctggtctcaaactcctaggctcaagcaatccttctgccttggcctcccaaagtgctgggattacaggcatgagcccctggccttatagcagggtttaaattacacccactttgggggaagagagagtggtgtgtgcaggctttggtgccaaaggcttgcacatggttactggctcagccacttactataaaatttgtaaaataggcaccatggacacatctgatattaagcatttaaaaagaggagctgtgtgaaaagttttgttgactacaaagagctacagacatcttcctttttatcttgatgtggatgtttatgcactgggaattggtggggccatctttagagaaggggtgggccagtgaagacactactgaccataccccaatcagaaaacactcccaaggggctcacttccccactgtgcagtaaagaggttttgcactgagatttggaggtacagcacaaggcggggaaagcatgagccaagttttgagtcctgtggaattgagggtgcactcctgcctggggccaggggttcttgtagcaatataaagggagacgtggctaaaaacatagattgggctcatcctggaggccttgagtctggcctgagggtgagtggatgctatcgtttgtgttgtttagagcactggtgaggagtcaactgggaaaatctcaatgaaatgcatctttaggatgtgccgggaatcttggcagtaactcaggagggcaacagggaatcttgcaattggagtagcggggggtgattctcaagttttggacacattctaagtaactttttgcagtgcttcaactttttacttgagtttataataacaatggcaatattttttatagttgtagagctatatgaaatatttttacacctgttggcttcattgttcatacaatatcttagtgagggggaaggtaggattgttttcgttcctgttttacagacaaggaaattgaggctcagagagcagatgggatttctctggccgcttggctggttgatgtggaagtcaggagtgaggatgccaagtttcacacttcttcctgtgccaatgacctggaggagtgtttttctcaaactcacatttctttatcctccacagtcttgggtgtcactcttggaagtgtaagatggtcatgagtttcaaagatttctgagataagctgttaagattttcaaagatgagctatagagaatttgggacataaaatgtgtttcttccagtaactcttgcttgctatcatgttgttggttcaaattgaacatgttgataagtgccagggaggaaagaaaccagtacctgctacttattgggcaccttttttgccctgaactcagtactgcctgcttttccatttgagtatctagaaacatttatggatggagtgattgtaatattgtacaattctgtcaactagtttattagctaattctcataaaagccttaggaggtagataaacaatattattttccattttacagatgagaaaactgaggtttagagagatgaaataacttgcttataacttgcttgagagaacacaggtcctaaatagattataatctttttttttttttttttttttttggcagagtcttgctctgtcatccaggctggagtgcaatggtgcaatcttggctcactgcaacctccgccccaccaggttcaagcgattctcctgcttcagcctcccaagtagctgggattacaggtgcacaccaccacacccagctaatttttgtatttttagtagagacggggtttcaccgtgttggccaggctggtcttgaactcctgacctcaagtgatctgcctgcctcggcctcccaaagtgctgggattacaggcctgagccactgcacccagctgtaagtagagtataatgtaagttttctaatttgagacttctttcttccttgctgcaccccatctacgccatgtgttgcccatcccactggtgaaaatgcagagctgcttgttaaggaggtacatgtcagaccttggaatttactggaatcagacctggaaggtactatgaagagctcagaaggctggtggttttcaagctgttctcttctgagcctgagagactccaggagtcatcttgagggatatagcacggagggaggtgaaaagtggtgggaagtggaggaaggaaggggaccgctagagccaacctgagtcgctctgctttttcctattttgtaagctaagcattgtcaaagcatccatttaaaggaaaagttctgctgctacatataaaagttaaaaaaccactgtgtctacccttccttttgctaacactgagaggcagagtggttcagcacaaggggacacaaagtggcttagcacgagtcacgagatgtgacgggtctgagacctctcagcctagagctcccttacccctgggccactttgttagacacacctcctttaattcaaatccccgtctcagtgggacatggctttttcattttttcaaggaaaggtttaatctgtccagatccctgtgaagatcttggctcttggcgcacctgctggaggttcgaggtcctgcaaccacagagtagctgcaggaccttcaggatgtcccgagccacaaggtctttgacctgcattttgcaacctggttgtgtctcccctttggactctgggaaccttgctgagattggtacaatatctgtgctaaaaaggtttgaaattatagctagtattgtgttaccttcctggtccaaccttcacagacattgtctgactaagtatatataactcttgagtgttcactgtgtacaccggctcacaagaaaggcaaggttcctgatcccaaggatctaatggagagacagaaacaaatataaacttttgtcaactatttcagagacagttatttttgttatacaagattgttatgcatgctagttatgtggagaggatttcatctcttagaaatgagacggggagaatctgggcgatgagaaagaagaccagaactggggagtacagtctagaattgcaaggggttgagtttgctatgtgaagcagttagttttggactgttgcacttactatttctgagatttgagcatctgacttttcctttaagcttttgttttctcatttgtaatatgggagtgagagtgcctagttcacagggtcattgctggggttaaatgagataatgtatgtaacctgcttagtataatacctagcacagagtaaacactcattaaattttcattgttatcgttgttatgatttggcagcgaggagtcaaaagagcctattttcttaaactcatcaatggtataatcagagctttgcatctcgaagtaaaggaacactctgcttttattatttatttatttttcactctgcttttagacatagaattcaattgcctcaggctacaacaaactggcttcaatctacctttctgagttaacttctgtttatttctatccatctgcccacttctctcactagtgacctacacattttcttttttttttttttcttttcttttttttttttttcttgagggggactcttgccctgttgtccaggcttgagtgcagtggcataatcttagctgactgcaacctcttcctgccgggttcgagccattctcctgcctcagccccctgaatagctgggattacaggcacacaccaccacgcctgtttagtttttgtatttttagtagagatggggtttcaccaggttggccatgctggtcttgaactcctgacctcaggtgatccgcctgcctcggcctcccaaagtgctgggattacaggtgtgagccaccgtgctccacccacattttctaagcttgattttaacttgctggtctttgtcatatcttctcagtcattgctggggttcaaatctttcttttctttttcttcttttttttttttttttttaaagatgggaatctcactatgtttcccaggctggtcttgaactcctgggctcaagtaatactgccttggcctcctgagtagctgggaccatagacatatgccactgtgtctggcttaaatatttccttctgtcggaatgccctttgttccttcatctgtgcccccctgctccatcctcttttaattcctagcccaaaagtctaacccacccattgggagggattctgcagaactcatagagtttacaacatcttgtccttcaattgcagtcagtctctgtcttgaactggatttgtgagctccttgaagttgtttgtatctcacagctctttgctgtaacatccctggggattcaagcacgcacacatagtagatgctcacacatctatgcaataaattactttagtgtctttctcaaatgatcagcacaggaagcaaatgataaaatgcaaaccagaaaacagacctcactgggctctgtgcttgtcagccttgggaatggatttctggcgaagatccggcccctctacaaatgacagagatgacttggctcttttcaggaattgaagagaatcctgacaagtggcatgttgggaaaggcctgaaggaagccagaccagcttgctctcagagctccttgggtcccctgcggcccccaggtgatcttcagcaagacctggtatgtaaatgagcctcatctgctggctcagcctgctgcccactgctagggatgctagaattccagggtaagcttctgtgagccgggctgggaggtttagtgggttggagattactagctttttggtatctgcagcttgaaataccttgtgcccttgattaattcatgcttgggagcatcctcagtgctctctggaaaatagctccttactgtatgtttatttccccacgggcttatttcagagagactggagcctgtgtttctaacagcttctccaaggaaaacatcgcaggccacgtttccggaactgagaatctcagggggtctttgaaacgtccatctctattacctccttttggcccagcatttgcttttagctgaaaagggagattttgtcttgagccttcctgtagacatatgtgacttggagtttgaaaatctgacagctgctgctgagctttgaactgcaagagtgagcagcatatagacataaccccgtagaacatcaaatcattttcctttaattcccagagacttaatgtttctttgtcttgcgaatgacctcactgctttttgtatttgtaatggaatgcacagtcatttgtaagtaatcacacaataatcccttacacttttataatgccttacccttttccatagggctttcactctcattatctcatatgatccttataactgctctgagatataagcagagcgcctattttaatctccaattttcaggtgtagaaactgaggttcagaataaagttagccagagttaaaacagttagtatgtagcagaattggaaagggagtctacagaattggaactggagtctcctaaaccagtgtttcttttgctccttattgctggtgtgaccttgggaatatacttaacctctctgaacctcagtcttcctatcactaaattgggtataatactacctcctgggatagttgttggaagggattcaatgagactgggaaatcatttaataaaaggtagaacacactaataatgggaggcatcattgtacttactacatgggccttgaaggcgaacagtgccatcagaactgtgaaagaaaataacattttttctctctttttagaaagacacaggttcagaatggtgttgtcagggatcacaagctcccagccccgtgattagcaaattgaccctgctgccctgtctgctggctgctttcttattctgagaattgtgttgacaagaccctcttttcctacagagctctctcttaatgttgcttggaatagccttgtgtcctggagacagttttaggtctggcaggatctgagaacaggagtggggatcttggaatgggatctgcatccctgagcttcatccacaaagggtgggaatgtggcttgggctgtggggtggaggtagatgaacagctggacttgcaggtctatcttctgttgtttctcaataaagtagacaagtccatctgatgggtgtttagtagggtatgacttgtgagtccacaaggccagcagtatatatgctgaatggactgcttagcagtaacacactggaaaaatccaaaaagaatggatttcaagttggcaaaaaatgcattagaagtcagcagtgtgatgtggtcaggagaacaaccagagtgactgtgggatgaggtcttggatagctttgtttctatatacagtcagccctctgtatccatggtttctgcatccatggattcaaccaaccaaggctcgaaaatattaaaaaaaaaaaaaatccaaccataaaaaaatacaaataaaaaaaccaatataatataacaactgttcacatagcatttgcattctcaggtattataagtaatctagagatgctttaaagtatacaggagatactacctcattttatataaaagacttgagcatctctggatttcggtatctcaggggtcctggaaccaattccccatggatactgagggaacgagtgtacatactcacctacaaaaattccaaaccagtgagacagacataggttgaaatatggtcctgagaggcagaacgtgaagcaagggatggaaggccggggaggaaccagatttcagttccgtgtaaggaagaactttctgatggaaagatggaatttgcagtggcaggagataatgatctttgcttcactggagacctcaggaataccaatggggcaggcactgggcttaatggcctttatggccacttctaattttgagatcacagagctaggaggatgagaggcacacatatattgaaggaactgaagggtctctctctatgtggatgtggaaactgatctccaaatgtttgcaagatggagggtacgtttaaaatatttcattctggttttcatattgatctctgtggctctccccttggtctttggtttttaaagcttaagaccattcccagaagctcttttccatggaataatctcctttctttgctggaatgctcctgttgggatgcaggaagggactctgagctcctgacagaatgaagaccacccctttttgctctccagacctaattttgacgtcccacgcccacccgctgaggagggttgcaatggcgagatctctgtcctgaattctggttctggcatgcagtggaaggccctctgattctgtttccttacctattttaatagtaacttatatttgtgttccttcattaaatgtacaataaataataaatgtttgcttacggcatgcttgttaagtataaaacaaataatcaaaatgaatgtgtaatgaccctttggatagaccaagtagaagctgcttttaggacacatgattggaccatttctagatatctgcctaatttgtaaatgaaaaatatgtaagctacacaaggagcactgactcgtctaaaatcttaacgactgactgatttgggcttggggtttggggcttgggtccttcatgccctgatcagagctgtttatagcttgaagacttcctgggggtgagaacaagcaacctcttggtgcagtccaaagccaggaaatgggtgacgattttgaaaaaggactcatctgacctccagaaagcctttacaaccaacagtagaacgagatcactaagaaacagaaccaccgggaagccaagatgtggtacttggattcccatctcggagcacctcctatatcccgacacaccatttcccctagtgtctgatctctctttctcctcctttaattcagtctggagtcattttagatcagattcattcctgattggcttcactgctccaacttagtcatcacagaaccttagggttggaatccatgttacaagttaaactgagcaattcacccccacttttcctgacaacagtgttctcttgagagtctggttttattctgagtcttccagcccggtgtctgtgcccatgaaggactcatgccaaattacattctcaggaggactcccagaccaagagactctgggcttgggcgtgagagacttggggctgttctttttctttttttttttttgagaagaagtttcactcttattgcccaggctgacatggagtttcactcttattgcccaggctggagtgcaatggcacagtcatggctcactgcaacctccgcctcccgggttcaagtgatactcctgcctcagcctcccaagtagctgggattacaggcacacaccaccatgcctggctaatttttgtatttttagtagagaccagttttcaccatgttggccaggctggtcttgaactcctgacctcaggtgatcctcccgccttggtctcccaaagtgctgggattacaggtgtgagccactgtgcccggccgagaggagttgttttgagactcacctgccatcataggaaccatagcttaaattcttgtgaccttttcaggtgcatctcccaaaatatctcccctccaccaaattaatgatttatttcataaatttagttgcattctggatggtctcattcttaagatgagcttaaagcctttcagaccagtcacttccttgtttggggtggaggaggttttttcctggaataggacagtgtatggaagggttgagaatccacttctttagcggttaataatttactccgagtaaggaattctttgttaaagtggggcatgttcttcaagtgccagagaagagagaagggtgatttttctgacatcctccagcctgcttctccatatttggaaatgtttacccaccaggctgatctattggaagagagggaggtgactcagggtttaggagaagcaggatttgaattcttgtttccagaaacaaagtcgtccccccaccctgcccccacccttcccccttcattcctctgtcccttgttctggaagctgaggcgagaatgtctcagttctgttcccttcaggcttcgagaccaccgccttgctgtgtcccgtagtggactgagggcctgcaagagggagtgagggctagtggagggccagctgcctgtgggggctggacatcgtgtgagtacatcattactgccatttctgctcacagacctggggcttacagcctgtgggctggctcacttgcatggtgatgggacacgttgctgggagtgctggtcacttttatttgggggtgtggacagctgctttcccaggggagtacttcttacagtgggatttcaagacaagatcggcctgaagaaaaattatatttgtatattttttaaaaagtaggtatttcctctcatctgaggcctaacttgagttgggtagaaagacaatttgggagtgctgttgtctgatgattaaggctaaagcaacaagctggaagggatgtcgggatgtctgtggacatgtagggaggggtagttttagcttgaaaacagttatggtgggatttaagagtatgcaaaatgttgatgtgtagcatttgcacagcatccacggtctggaataccttgtgtgcaggtcactgtgtagatttgatgagttgtcagagttggaagagtcctgcagagttttcagcacatctgtctaatttcacagtgtgagataatgggcagcagagacccaggccctgaagacagatggctcattatgtgggattagaacccagatcttctctctcagttcgttctccttcccctagacttaagctgccccctctattgcgagatgaggaaattgggagatgttagaactgtccacacttactaatctagttggtgggaaattgaggactagaacctacttctagttcagacctcttcccgttaggatatatgggctcagatgcctagatttgttgtttttgtatgaggctcttttcttttctttttgttctttgatttttacttacctttcccttcttttgttcatgtgaatgtcgtatgaatgcaaccttctgctctcctttgctccctatatctttctctttcacgaaaggggatgatcacttgtccaaaaggcagaatgaatagtgtggaacttcctttctatccatggaagtgaaaattatgcaattttccctgagagaaattcagcaaggcttcccatctgagcctctaccactattcttgaagctgtaagaattctggaatattatgcccattcaaaggtgagtcctgattctgattagattttaaacacacacacacacacacacacacacacacacacacactttttaagcctaccaaagcaggatagagacccagaagacaccgacctattacgtcacctcagatgtttcacagccatcaggagtaactctttgtagtcagctcagtttcagatcaacttttttttttttctttctttcttttttagacagagtcttgctctatcgcccaggctggctggagtgcaatggcgcgatctcggctcactgcaacctccgcctcctgggttcaagcgattctcctgcctcagcctcctgagtaactgggattacaggcatgcaccactaggcctggctaatttttgtatttttagtagagacagggtttcaccacgttggccaggctggtctcaaactcctgacctcaggtgatctgcctgccttggcctcccaaagtgctgggattacaggcatgagctgctgcacctggcctcggatcaacttgagggccttattttccagtgcagggaagatggtagaaatatgttttggggaagcattttattaccagtggcattaggtggcagatgtaatagagcagaggaagtgctctgagacctatgtttgttctggccagttttaaagagaggggaagcgactctctaatctgctttgaagcaagtgggaggagggaagttgcacaggactcccaggaacctgtacacaatctgtctccttctgtgaccagctgaggctgggtggtgactgtaagccctgttcatgagacaggaggagagagccttgaagaaggaaagcctggggtgtttttctgtggtgctgagggacagggacagtaagaggttggagtaaataataccagtatgaatactaatactctgaataaggacagctgacaagcattggttgcttaatgggtgccaagcacagggctaaacactttacctaaattattgtggcactatagctgcctttgagtaggaactattttttaaaatattatttttaattttggtgtaatacatataaaatttgccatcttgatggtttttaagagtacagttcaagcctgggcatggtggctcacgcctgtaatcccagcactttgagaggccgaggtgggcagatcacttgagcccaggaattcaagtccagcttggccaacgtgatgaatccccacctctactaaaaatacaaacattagctgggcctggttgcatgcacctgtggtcccagctactcagaaggtggggatgggaggattgcttgaatccagggagtggaggttgcagtgagccaagattgccccactgcactttaacctggatgacagatcgagaccctgtctcagaaaaagaaaaaaaaaaaagagtacagttcagcagtgttaaatacattcatattgctgtgtaatcagtctccaggcctctttcatcttgcaatctgaaactttgtacctataagcaacagctacccattttcctctcctccagcccctggcatcctccattctactttctttctctatgaatgtgactactctaggttctgtatctaagtggaatcataccgtatttgtctttttgtgactggcttatttcactaagcgtagtgtccttaaggttcatccatgttgtagcatgggtcagaatttctcctttttaagggtgaattatattctgtggtaatgaatataccacattttgtctatccatttaggtactattttttaacctccatgttatagaagaacagcaaccagagacttcaaagggttaattaagtaagtggcccaaagtcacatagtcagtagtggagactaattttacctaagaatggcatgtgatcaggagtaagcagatattggattctaattggcaagagtgtgacaaatcagggtgcttctcaactggatggtgacacctccttacaccttgctatggcatttcaataaagcaagtgttccaaagggctgtacgcagctatgcttcctttcttttgtattgggctctaggaagcccatagctaaatttaaagctcacctctagcaaatggtatgagacatccagctcttattttttgtatccctttctcctttctttgctttattttctcctctccttacccactttctcacttaaatcatgaactattagcatcttttgtcaggtacctcagatcatttctggaacaaggcagaatatatagatatgtggcatgatatctaatattttagtaattattaagtctgtggaatagtaggccaaaactggccatgatttttctgacttgactctgctcgtcttcttcttcttccttttttttttttttttttgatggagtctcactctcttgcctagactggagtgcagggcgtgatcttggctcactgcaacctctgcttcatgggttcaagccattctcctgcctcagcctcccgagtagctaggactacaggcacttgccactacaccccactaatttttgtatttttagtagagacggggtttcaccatgttgaccaggctggttttcaactcctgacctcaggtgatctgcctgcttcagcctcccaaagtgatgggattacaggcatgagccaccacaccccacctaactctgctcataatgcaatgtttcatctgggcaatgccctgcccctttctgagtctcacttttctcacctgaaagaggaggttactgttgatgacagtgaacatttaggctgtgctgagttttacactaagcatcctgtctctaactctcccaacactcccacaaggcaggtgctattatccccattttacttttgagaaaattaaggcctaaagaagtgagaaagcttgtccaaaccgctatagctcttgggcaaaggcattagtgaccaatgtgtatttgactccaaagcccaggatgttagccacagtgcagggctactatccttttatacaatctgtcaggcttcttccatccgtggcatgtattcatctaattttattaaatctttattgagtttccacttaggtgccttgcactgttctgggcattatcccagtactcgatttagagcaaagagtaagacacacacaacaacgatctcttggtgcttacacgctgctgcaggtgtgtgaaggaggcagataaaggaacacttaaacaagagggactgataagtaacccaagggaggagtcacaaagggcattctgactgtgagtgagtggggaaggactctgggaggttatgtttaagctgagatctgagtgacaaggaggccaccttgtagaagttgggggaagagcactgcaggcagtggagacggtcaatgcaaaggtcaaggctgtgaagtgggaaggagtttgtgtttgaggaacagaaggagactgatgtgctggcaggatgtgggctgcaggggaagaagcaggagaaaagaatagggtctagcaggtggtggtaagtgagagacctgagcttcttagacctgagtccagatgtgatgggttatgtgttacaggcatctttccagctgctgtggagggaacctgatagtaaaagggagtcaagggtagaagcaagaaggttaggctagacttttaccgtaattcaggtgtgatgtggtggtaactttgactagggcatagaagttgggcaggagaggtaagtttggggcatgtttgggagtgatcgtctataggatctcaagtgtgatttccttcagagaaatgctgagctaaatgggcaggaatctgggatactcagagggaaatgaaaataggtgccctagggggttgcccagataagcagctggcgttccaagaccaaagagtatctgtttctcacccctctcccatttagtttctaaccttgagctttgggccagtgcacagaggatggtggcttcctgcctttggcttcccagctgagagctgttggaacgccccaaaataagccctgcagaacgtgcagcttcctttgctctccctgggtatttttgtaaaacattctttcccaccaagaatgaggaacgttcagagtgatgctgactttatgggctgtatttaacatgttgttttttcatggtgttgtctgttcatgcagagatttctgtctcctgtaaactccctggtaaggaatcttcaatctccatgtgagatgggtctggaaggctcagtgggagcccagaagagctggggtttgaaagcctctccttgtcttgaggactggactgcggtccaagggcacctaccagccctcttttttcatttacatttgaattcacagttgctgccctttggcagttccctgtaattccttttaacaggctgggctttcctgcagatacttcatttttcaggtcttggagaagttaggtagtggctgaatcaggtagagaatccaaaattctgaccaagccccatcctctagccaccaggccaaagcaacttagcttgtgacctcatcctcctgtgtatcccctggcaatcttatactataatcagcctaagcccagagatgctcagaaatcatacactaagtcatctaaaactcatttctgaggctttctcatgcgcccctcttgcagtctgtagttaccaggttttcaaataattagcataatctcttaaaaacagtgttttgttattgctcattcaagtttcttctaaaatttcttttatattacctattcattgagttgacaaacatttattgagttcttactgtatgccaggcattgtgctaggtgctggggattgattcaaagataatttggaggcgtatggaaggggagtggataattacagcacagtgagataagtgctataatagggggatatataaagagccagaaatagcactatgaataacatctttgaacaaattgccttcttttttccttttggattattcccttatgtatattgcccaaagtgggattactgggtcatttaaaagatgaaaacaatttggcacaaaaagatgtaatgacttgcctggggaatacagctcaattttcaacagagaaagaaaaaattgttgacaaatccagatttagatcactttaccaggaagatggggcagtttttatactaccctttcaacatggtggcttttaggggcggggtgggggggatttattctaaacatgttagcctgcgtgtaggaatcacacgtcctcatatttaatctcacaacttgattgttctcacaagaacctagctgtatacatattaccgtttccattttacaaatgaagaaactgcacccttgataaaaggaagtaagttgctcaaaattccatagttaataagtgtagaatccaagggtcaagcacagttccttttattctttgactctatcctgttccccatgctgtgtttaccaattgagggtacctgtgctctagccggggcccggaatttaatatttaatgagtcacggaggctcttaagatgatggtcaggctctatgaaataggtgtagattttcttacctctgaagtcatagccagggaacaatgtctttctgtatattgacctgaaaggacccaagggcgcattattcctgaccctggctcaggtgctgaaaggctatttgcatagccctactgttagagcacagaatcccaagtaaagctgaaaccatgccacagttttgctgtgaaacatttattacttttctagtacttaacagtattaagtaaaaactcctgcccctggtatccaggacctgtcataaatggacaccaacatcggtccactgtgggtccatgtgggtccttgatgctcctgcttacatatctttaaatcaaacacatttcctaccaacccccagatatatcttgcactttctcaccttcatgccttagcacatgcctttcctttagcctgagataacctctccaatcttcattcatagaactcccaatcctcctgtaaacttctgcacagacgccatcttgggaagggaataatccttgatcaccacctgctctcccatccattagaagtgatctctgtgttctctgttctgctaactcaaccacagttagctgtgaggcaatagagtacaaatgtatgctgcatatgagcatgggatatggatttgaatcccggctgtgatacttcctcactgtcagttaacttgcttgagcctgagttttcccatctgccagatgggtgtgatacaataggtgctccccctgaaacccaccatgttgacaggagtagtataaaaatggtctgattctcccggtgaggtcacgtaaatctggaatcgtcaacaattttcctttcctttgttgtcatgacttttttttatgacatcacctcatgtcaccgtgtggtatgaaaatttgcattgttacctgtgcttcttctgtggcacttgtcctcccttacttgatgtcttatctctccttctagactgggagctcttcaagggcagggagggcattgcatctttgaaggccttgacatatggatactgctacaaagtttcctttaagggaaaggaggattccatacaacctaagtggtgacatcagcacaggctcattactaatctcatgtcacgaggtttcaggcctggctgagaactctgtgagctctgtgatgttgagcttcaggcacatagagtacaagctgggtaggcctctggctcctgcttaagagacagcagaaaggctggatggagcctgtctccagaccagcttcttctgattcaaggagttgggtgggactggcagttcactgaaggcagagtggtagtcctgcttggaacgtgaaactttgtttctttcctgggccttccagtgggtctgttatgttggtgagagtttcagacctagaggaaagggtcactgaaggtatgggttaagagcaactctgaaagccacctgccccccgacttctctgtgagtggggccacagggagaagatcccttcataggtagctcccctacccttgctatgcttggaaactgaccatggaaagggattcatttcttaaagggatagggctaccatttaactttctattgtgtcacttcccgaaacgcaacacctatggcttaagatccaagtgctttagaacatgagatacaaggtcttccaggctctggctgccacatccctttccaggcgtgtgtcccaccacattcctctgcatcctctgtcactggcctcaccagattagtcactttctctgagaacaccctgaactcatccttctcaaggcctttgcacattgtgttccctgagcctatttttctcctcctcatccgtggaaatcctcttgggtgttcaggcatcgtttagaagtcacatcatctgcagagaacttttagaccctcaaaaggacgttgcatgtactcgtgcttttctacacttttcattctgtcttttgtgttccagtgtgtcccccattgaggctcttcgacacccctaggcatgtccaactcagcacctacacctgctaggtccacacactgtgttatccaagacagaaggtgttagcaaacctctctttggtgcgcccctgaatgcagaacatgtgacattctgttaactaacagttgtgccagagtggtttccatagcccatactggggttcccatgatttgtttgatcatgagcccggccattcgaattgtttttgaattggtctgatatcagctagttaattgttaacccttttcaggtttgtttcccacataccagtagatgtctgcttagtgccagggttctgagctttttatttcacttaagaatataatagcaaggtagaattcaggaaagatttacttgctgttaatgtgaacttttaaaaaaatagtttgaaatgtaggctttgtttttatcccaaagctccatgaaatatgaaaatagcaggagttttaaaggtatatttccacctctagaggaagaactgtccatattatagttgtaattataaattaataaagcctgtgtcatgaaacttgattttgaacgcctgtgttcaaatcctggctttaccacttactagcctagagatattggatgagtgtctaacttctccgttcctcagtttcttcagtgttcaattgggaaatttttcttatggttgatggaaagtttaaataaggtcttggatatgaaactgggattttattagtgtgtgtgtttcaaaatgtggatttggaggccatttaaaaatagcatttccaaaaagtttgcttttaaagcaaagtacttagatatataaatttttatgaattttttttcaaatgataaaataaatgagtttacagtcaggagacatacagtatctaacaaacttagggaatatgcttggcttacaagacgtggttttagtccacataaattagaatcacagaactataggctttgagaaattataaaagccttggaaggggtgaacgtgaattagtgcatattgtgtgcaggctttgtgccatacgtgctagatatgggatcccaggaaatggttgcatacaccttgttgggtagatgatattaaccctgttttgcagacagagaaacctgagctttgagaaaatcctttacacaagtccaatatcaaagtctggaacttcaaactgcactcctgatggcttctagaaatcctttccatttacagatatgacaagacttgctttcacattgttgattttttttttatcctctctttctctgtctctgggggcagcactaattcagggccagatagaactgtgaaaatctgcagtgttgatgtcacataacttgtttaatgaatctagattagtgtcttgacttttcctgccaagaatctgctcataaagtgtcttgttttgagctcctttaactgtactcattcatcagcctttacttattttcttctcttttggagagatacttgccattgcccataatgtttgaggtcaggagtatatttgaagagggctttatattttcttaaaaaaaatacaggtggaaaatcaagtttatcagctatttcataccatcttcttctgccatttatgggcaacatgtggaagaggtggcagggagctgggagtttggaataatgtgtctcatcttgaatttgtcgctgaccagggaaaatactcaaggccaactccatcattcccttttgggaattcagtgcttcagctgtaaagagtgagggcactactaggtgattcctaagatttaaaattctgcatgttttgtggtgtcaaaaccatcaatttctggtgagctgcgtgatcctgcagctgtttctctgatacttttcaatctttagatttaatctattcaacaatgtataattttttaaagggaagcttttatagatacttctgaactataaccgggtgggggggataaatggatgttaaaaaatagaaaacaaccaattaaatagtatatagcatgtaattctccttggaaacttaccacgaaattgagaagcactttaacaactggtaatttaaattgcgtttgaactctgctaatggtttgtttgcatgggaacttcaatcatttcacagtggttctttagcaaagctgcttgttctctttatggaaaataagaaaaaattattaaaagagaagttggctatggaaaatggagaccactttcatttgtgcctggagggaagctggagagtgtgagtgagactccctcagggccaagggtggagagctcttcctttcagtgaagtttaaaaatctgggaagtcagatgccctttgctgctgttgtagaaactgttgtgatttgtatctctctctgcaaggagaagctttggttttatgcagcttgcgggtgagggtagggacaacctttttcgtttgttttatgaaattgcattgttcacaggtctaatgttggcttcctaacaacccatttctcagtaagtttgaaattatgcctctctctcctttcagtggaaatggctttcagaattccaatgtccttgaagaccactaggtctcaggaaactccttgcttttctgggctgatagtgattatactccattttgcctacttaatttctgtctgctgttgaggttactgggagagcgttgaaataggtgttcgaggcctggatttgtaagtcctggtttggctctaggtgtgactcatgtgaccaagcacaagtccctctgcccagtgtgttttgttgtcctttgtcaaagcaagcagtcacttgatccagtggatcaagtggctcctgaagaggtcacctccttacccaggccaccgggttctcttgtcagttggaaaagttgaggtgggtcatttaaaaaatccctcccaactttgaacttggaattgttttgtacacaaaacaattgtatgattggctaggtaatgtttacagtgacaacaatgaaatgggcatggtagtttctcgtatgtggatttctcctgcatacatgaaagacaagttttataacagcccttgccttgggatacttgtctgttggcatacatactgtgtaatcattagcaaaacaataatagttgctaatgaaataaaacctgtaataagggctgtattaggctattctagcattgccataaagaaatagctgaggctcggtaatctataagaaagaaggtgtaattgggtcatggttctgcagtctgtataagcatggcactggcatctgcttggcttctgggaagacctcagggagcttttactcatggctgaaggcaaaggaggagcaggtgtctcagatggcaaaagcaggagcaagagagggagtaggcagaggagttgccacacacttttaaatgaccagatatcatgagaacacactcgtgatcgtgaggacagcaccaagaggatggtgctaaaccattcatgagaaatccgcccccatcatccaatcacctctgcaggccccacctccaacagcaggtattacaactcaacatgaaattcagaggggacacatatccaaatgatatcaaggacggcttactgggaaatgtcaagattgtttatccctctgctgctcactgattctcacttttcaggcaaggaaactaaagttcaaagaacattaggtcctatagttagaaatttgtctccaaactcatattccttttctttttttatttggtatagtttaggtttatctgttaatttttttcttccctacaatttgagtatctaactgacttgcctctttcacctccattattaagatgaagctgttttcccaggagaactaggagagctgagatatgaacactgaggcatcagcattctctttccccatcattctgagtcaaattagtgaaataagagtgccaggatctgactaggagtttaggaggtatagaagtaaaccacggcccagtcagagactttataagcctgggaatttctgaagctggttaagaccctagagatacataagcaacacccttctgtttttcataggtgggaactttgaggctcagagacagagcagaagacagaacctggtcttctgattccctgtgttctgcttttttcattgttccactggacgctcatcagagggaagatctttttcctcaattggtgagtcccgcacacaaaaagaacacatttgccttttaaaatcaatgtatatgttttaatgagttttaaacatcagtgttttccacttaaagtatgggcatcagtaactaggatgcattaagaataagagaagaactgaaatgcccttccttctttcttgagttgcttttatggcaatagacaatatataaccatgctaataaaatgtgtggcaaagcaaaggcagagctcagctcttggaaggtggtagcattgaacttggaggaaaatttggagtaacgatgatttcaggttgccagcaattgtattgcctccttctttctcatttggcatggaagaaagtgttcatgaaatggaaagaccaaaatgaaaatgtcactgaacagtgtttgggcatttacaaggaaagaaagcagtattattgagtgtctcttgtttgcccttgtgcaaagtgctgcttcttttgtgatctcatttcattttatgtatttatttttttgagatggagtcttgctctgttgcccattctggggtgcagtggtgccatcttggctcactgcaacctccacctcccaggttcaagcgattctcctgcctcagcctcccgagcagctgggactacaggcacataccaccatgcctggctaatttttgtattttcagtagagatggggtttcaccatgatggccaggctggtcttgaactcctgacctcaggtaatccacccgcctcagcctcccaaattgctgggattataggtgtgagccactgcgcccagcctcattttatttctataacaaccctttggggcagagcaggctaaatttgcttaggcaaagggtgtgagcctttgttttaaagggcctgccagagctccaccaggatgtgaggtgcaaatcctgttatgtgctcagaaaggagaattgtgaccaggtaaggtaaactttcccttgtgttttggtgtacctctgtacttaatgggtagagtagaacattatgttctaaaaaatcggggtggtaaaaagaatcaacagtgtggaataccctgggctctaaggaaagctgaggaaattagtaagggaattctgggtgcgacttccacttaggatcctgattcgatggtccccattggctgaggccaattcatatatgcccccagcattggctttgtactgagtaattaatacaccttgacatatttgtggtgtagttttccaaaacagagatgatgccattgtgattgaaaaaaaactaacttcatttaaaagtgtgactgagtttatagatgtgttttgtctctctgtcttttcttaatcagtgtatcttaaaagtacaactgactgtgtgcctattgatctatattacataaaaggctggaaaccactggtttgatgcttaaaccttagtgtctgttaaaatttcaaacatgatctggaatatattccccctagcatacgtttaagtatcaaatgaaaaatctttgtcacctcctctatgtcttgagttttttcagtgtttataattaaactgtgataagtatgaagctttgcacttggacttaaaaaaatcaagtgtgtaatgatagaaagggagagatttccttaacaagagcagactggaagagacttttatttatttattttatttttattttttatttatttattattatttatactttaagttttagggtacctgtgcacaatgtgcaggttagttacatatgtatacatgtgccatgctggtgtgctgcacccactaactcgtcatctagcattaggtatatctcctaatgctatccctcccccctccccccaccccacaacagtccccaaagtgtgatgttccccttcctgtgtccatgtgttctcattgttcagttcccacctatgagcagactggaagagtcttagaagtttttgttgttcataagctaaatatgagccaacagtggcttttgttgggagtggcttcggaaatgctgatgcagccttcacctgcgtttaatagagtatggcatctagaacaaagtgagtgggtgattctgcaaacctagaacacctggaaactggcaagtgcagaggtcatgtgagcctcaggcacagtttgaacaggactctagctctgtttttctgcagcacttcttgctctgcccttttttgtgcctgggcttcatccttggaatgttttacctcatgggccatgagacggctgcctgctgaaacccaaactatagatatccctgttcccatttaggggaaagagcctggtttgctatattctcataggcttggctgactgtatatttctgaaccagtcattgaagccaagagaatgggattatggtaatatgaaccactattctcctgaaactgaatttggacatagtcccatccaaacctcatggtacttacacagtggagaagaggtggccccgcaaaggaatatctgggtgctgttaggagagggagagaggactggaagctccgtgggcaaccacaggccttctgcagacctctttagcccccctgtcagagaccctctagagagccgggctttagttcctgcctcaccttctgaaaaggcatcagccagctgcactgtctacacgaggatgctgagaggaccaggaatgatggccaaccaagaagtgttacgggaatgagaccatggattctgctgcaagattctgggacacacgtgctcatggccatcaagaacatagaacctgggcaggacagggacagcattgcttgttcatgtgtgtgtctccagagtctgctggggtctctggcatgggataggtgctgcatgaattttcatggatagaataaatctgaaggaagtgagggtccctttcccaaagggtgttctatcgggcattggctgactctctgttagggagtataggaattgtagcacagatgaagccagactacgtgatttaatgagaatgaaacaaatgactggacaagctgggcatcgtggctcacatctgtaatccctgtgctttgggaggccatggcaggaagatcgattgaggccaggattttgagaccagcctgggcaatgtggcaagaccctgtctctacaactaaacaaacaaaatcccaaatgactggacagaaagaggcttttgacttaagaagtttgtgagggcataaaaaggcagtgagtatggtgggatgccctaacagaagtcctgacaagtatgagatgtgcaaccctagaaaaacaacatcccttcacccttatttttttgatctgagaattaggaacaataatcattgccctgcctacctctcatgtttgcttagagcaagtgcattgttaaatgccaacctgttttgtaaactataaagtgtggttcctgtatgatacattattacagttgtcttcttccttaaagactcatcttgaatataaagaaaaagacaatgtaagttcagtgcacagcatcgggaacattagacatgctcagcgtatgcccttcctgccaacattgtacctcttcctcctccgggttggatgggcactaactcgtcctcagtcctgcagctagatctgcaactttgcttaatgatgcaggttaaaattgaaatagaattatgtattattatttttcacattcatttttgcctgagacaggaggtggagggtggtaaattaagaaacccgggaagctcagtgcttgagagaacccatagaagctacagtctagcccatttggcttcttactttgttagattagataatcatacctgctgctccaggcgtgactagcccagtgggagtcaggaaggaaattatttccctctgttgataccggtttacaattgccgactgtcgccaagggctttcagttttaatatttcctctttggtcctcagaagtatcaggtattagtctctgccggaagcaaagcattggtcacttccgtcagaggtgaatgtcttggctgtctataattcctcagtcaggtgctttctgggcatgtgtgagcatttgctcagctagcttttattgcttgtatgttatttgcttcaaaaattacaagaggatttgtcgggtctgagcagtgacctatccagtcccctgaaactctatggttcttcgtgtaacccagggatgtcttgtaggaggtatgtttgctgtccacgaaagtaaaaagtagtgatatctctttctctcttttgcttccttcctcctaattccacattctcctatttcttggcttctggcacagtggagatacctctactctacattaggcatggccttaggggatccgaattctcaggtcttcctcaatgagttgctgtgtggtagacagcatctgaagtttgaatgggtagagagacctttgtagattgtggccaaatatttacacctggttcatagagtatgtgtttgctgccctgatctcagtgttggtctgggtgttagtgaacctcatgatctttaggaaactatgtgaattaggcttagtccctgaccctgagaagcttatagttagggaaaaagacaaacatataaaggagaaatacacattagaaacatattcttttttttttttgagatggagtctcattccgttgccaggccagagtgcggtggtgcgatcttggctcactgcaacctccgcctccaggattcaagagattctcttgcctcagctgcccgagtagctgggactacaggtgcgtgccgccacgcccagctaatttttgtatttttagtagagacggggtttcaccacattggccagaatggtcttgatctcctgacctcatgatccatccaccttggccctccaaagtgctgggattacaagaaacatattatttatggtacacatttattaatcaccagatatgtttcaggccttacgctgagtgcttgggaaattgagataaattatagtctcagatctcatggggcgtggatgaagagttgggagaaagaaaaaaataggccaggcgtagtggcttatacctgtaatcccagcactttgggaggctgaggcaggcagatcacctgaggtcgggagttcaagaccagactgaccaaaatggagaagcctcatctctactagaaatacaaaattagccgggcatgcctctaatcccagctactcgggaggctgaggcaggagaattgcttgaacccaggaggcggaggttgcggtgagccgagatcgcaccattgcactccagcctgggcaacaacagcaaaactctgtctcaaaaaaaaaaaaaaagaaaaaaagcattgattaatattatctcacagtttctgaaatttgggagcagcttggatgggtgccacaagatctctcaccacatcgcagtccaggtgttgctggacctgcagtctcaccggaaggctgaactccggggaagatctacttgctaccaagcacatcgcatgatggttggcaggatttgtttccccacagattattggactgaggacttcagtttcttgccgtgtagggctctctatagggcagctcacatggcagctgccttccctcaaaatgagtgagcaagagagagtccctgagaggcaaatcacagtctttttataagttaatcctggaggtgacacactgttccctctgcctcattctctttacgagaagcgagtcactagatccaggccacactgaaggggaggggtgaatatgagcacaaggttattaataccaggaggtggagttacacggaaccatcttaggggctgcttaccacagattccccaggtttacatggatgtgctaaggtggaagtggacgttgcctgaagcagttgaataaacccagcacacctctgtggatcaattttacttgaagacatttttgggggaaaactccatttaaaactcttaagagaagcactggtacataatagcacaggatgtaaagttggcatggcttttaagaagaaaaacacaagttttcaattcatgccgtgttcccttacctctgtatttttgccctcctcagcggtagagcttttttggtagaaatgtcgaaaggttcttgcttgagccccttgctgtatgcgtgagacaccgagacttggaaagggcacatactcttccagggccacagagccagcggtagtcaagggaggaaccatctgcagctcctctctgtgccccgccttccaccgctccacacagtctctgctgcataatgagtctgtgcaacttttaggatgttttctcttcttttctcaaactctctcctgtcccagaaacagattaggaaaaataggtcaaaaattggaatcttgagctttgattttgtccctttagttaaatttcaggggtctgcgtctcctggtgggccatgttgtgtcctgaaaagttgcataaatcaatattacacggctcagacagtgtatctctgcagttatgaataacatttgttttaggaacagagagctgatatacaacgttactttgagactgacaagaccagacataaaacctcagccaataccctctgtctggcagggagtttcttttccagagcatccttctcttcccctgaccaaagcagtccttttcaaaatcaagctccgcagtttattttatagaagatgacaggttcccttagagtccacattcacataactagaaaaattaatggaaattggagccttaaaattatggtcaagcttattagtgactttacagccaaaatgaggaacgcacagctttggtcactgagaatgtggctggccagaacgtgaattctactacctgctccatagtccctttcaactctcagcaattttttttaatactcatcttattcttttttttttgagatggagtctcactgttgcccaggatggagtgcaatggtacagctcactgcagcctctgcctccaaggttcaagcgattctcctgccttagcctcccaagtggctgggattacagatgcatgccatcacacccggctatttttttttttttttttttttttgtatttttagtagaggaggtttcaccatgttggttaggctggtcttgaactcttgacctcaagtgatccaccctccttggcctccaaaagtgctgggattacaggtgtgagctgccatgcctggctaactctgcttgttattaaagtgtttcttaccaattatttcatttttattaaaagtacatagtaggaaatagagttttagttggacaaggacaacatggtaaagaggaatttggagtaggaagactgtcacattagtcactgaatcctacctagttcacttagttttttttagcctgttttcacttctgcaagccatggagtgaagagtgcctacttcagagtctttggtgctctcaaagcagcgtaatgtctataaagtacctattgagtgtggtacttcttatgtagttggcacacattaaatgttaagtttctgatcaccttaagagtccataactctttgctggagatcacccttagttcttttctttgttaggccattatctcatgtcctgtttacactgtccccttggattggcctagacctgcagcgtttgtgtattggtcaccccagatttcatgtttcctgaataattaatagcctcaacatttctaattttgcataatgactcccaaggcctaactacaaacatcataatgtgctcatgttttctgatacctggaaatatagtggctctaggaacaaaacctttatccactgtgtttcatggggaaggcttattgggcatcactactggaaagtaagtgttgattttaatggcaagactagtccaggggtgaattctactcaggtgccattagcaacctcttcatctgtaaatggaagtgtctctgggacctgctcagctctgacctgctttgggtcctttttggacttcttcaggatgagatcacctcaccgtggttcaatgccaactggtttgagttatatcagttattaaaaatgatctaatgttttccttttaaatctgaggccctggctcattctatgattaagccagtgatttatttataatatagtgtgagatggctgcagccactctatgatgtaatctaagaatgacatgaaaacaaaataggtttttacataatgaaagtattcctgtaatacagtttatagcaaggctttttccccccattgagaatggagatatattctttacttttccttctactcctgtttaaatcttcttttaccatttattacacttaaggcctttaagtcaatttttaaaaatcagcatttacaactccacaaagtctctggttactcttttaatcttgtcattttcttcgctcccaatccccactgccaccctccatggcctctgtgtgtagccgctgctcaccccctgctcagcactccagagtcctcaccattcctctgcttatgctgtttcttctgctggaatgctcaccccaatcctaacttttcttctgctaaaggcatacttcactggttcccacaaatagcatccttctgtagcctgctcaaatgcacatcttcctttaagcctcctgtgttgctccttccccttgttagaaacccgttatctgtactcttatggaacttagtgtaatagcaaacccccacccctgctccaagggctattcacagactgtcagagttagggaggagaaatgacttagaggaatggggtaaggggttttgatagttcccggtctgctcctaatagtgagacccgggcagtcagtcatggctcatctttgtggttcagtttttctcagctgaggaatgagtggtttggattttatttcacatggccaaatgatgtgttggtagtggttccttgaggtgctgtgctgagaaggactctgaggctgcatcctgactcagctaatgatcacttaggaatatcgccatgggagtggagagtgaaagcatacgagaggtatctgagctgcttttggactaggtgatttaaatgtctctttttgttctaccttctggatgctttgatttactgacttgtgaagtgtcttgcccaagatcacgtagcccattaagttttcgaagctgattctctgacacagagatggttaaaagctacacatttgactctcacattcatacacgtaggctggctgtgggagatgaaaagctagaataagaagttctagaagatccatgacttattgaaaacacaagactactcaaactctgtatgtctttgaggttgagtgaggtcacttttcacctctttgtcttctttgcttcctaggagttatgatgtccccactattcaaatttatgtcaaagatggcagttcaaggtcaaggtcagaaaggcaggtgatcctgccagggtcttaattggatcagccttaccccatgaatccattagatctcctgttccccttcttccaactccagacaaaatgcttagctctctgcaaaaagcccaattgcatgagcagtaggtcagctcagcaaccaggtgattgaacactgggacaagaataaaggaaggaaaggaagagggcattttaggatggctgaaggtgctggaaacttgaaccctagaggaatgaagaaggaactggaagtgcttagtgtaaagaagaaataaaggggcaggaggaggagagagcagagcaggtggtgctgtcctgggtctctgctgtggaacgggtgcaaactcactttttgggacctctggaagagttctggcagcagtgggttggaagcaagagatagatagtgtgagaatgttgatgttttctcaatgtttatggaaaatgcttaatgttttaatattaagagcaaaccacagatggaatgtgtgtttcaggaggtcgaagttcacaatcactgcagatgtctaggtggggttgatgcagttaggtattttctattttaggtattttgtggtggggataaaatgttatacatgatgacttttaaggtcctccctgtcttaagagtctagagtttttttagacatgtttttgtgtacatttaaataatttccattttaaaatgaaggctctttggagtaaagtgattgttcctttctccataatcttggcacatgtaagtgctgacttaccttgggcaatctcttctccacttagcattattgaaggaaaggagactaactgaggatgtcttagaattttttgtactgaatgtatttttgaagatgatttgtacgtttcttttcagggtagttccagggaagtctcttctttaggcctcctccaaccaccatcccctattgtcaatgattggctgtttttgtactaccagaatgctttgtgtatacatccaataaagcattcatgccacttcagtctgctgtataagcctgttttcacaatctttcttctcctctagattgtagaagctccttgagggcatgaattatgtctttttccataggaagtcccatgtcatctagtataatagtttgcaaatagtaataatgatgactcattaactcgagcgtttactgaacacctactatttgctagacactattccaggtgatgggactagaacaaatgttaaaaaaaagacagaaaaattaatgagtaaatatgtaatatttacattgtgatctattaggttggtgcaaaagtaattgtgatttctgccattacttttaatggcaaaagccgcaattacatttacaccaacctaaatatattaagaagaaaaataattgaggttaaaggcatgaagagtagggaggacacaaatgtaaattcactggcctgagaaggtcttgatggtaagagtatatgtgaatggagacctgaatgaaacgaggtagcaagccagagatgtgtgggtgggatggactggaggaagagtgtgtagaactgactgaaagcaaatgcaaataacctgacctgaagcatgctggggacatgccggaaaagtgaagaggacagtgtggctagagtgaagtgtgtaaaagtggtcatgcatgccaaataaaaatagttgcaacaaccagtaagacatacatgagagatattgtgggttcagttgcagaccaccaccgcaataaaacaaatattgcagtgaagcgagtcacacaaaattcttggttcccagtgcatatgaaatttatgtttacactatactgtagtctcttaagtgtgaaatagcattatgtctaaaaatacagtatacataccttaattaaaacttttattgctaaaatatgctagcaattatctgaactttcagtgagtcctgcttttgctgatggagggtcttgccatgatgctaatgactactgactgatcagagtggtggttggtgaaagttggggtggctgtggcaatttctgaaagtgagacaacaataaagtttgccacattgattgactctgcagagaaagagtgatatcaagctgtatcacttctctgtagcatgtgataatgcataatatcattttaccttcaagaaaacttctttcaaaattggagtcaggcctctcaaactttggatctgctttatccattaagtttatgaaatatttgatatacttttttttttgttgtcattcaacgatgctcacagcatcttcaccaggggtaatttccatctcaggaaaccattttctctgttcatccataagaagcccctccttatccattcaagtttaaacaaaggattacagcaacacagttgcatcttcattccacttctaattctagttctcttgctattttcaccacatcctcagttatttcctccactggtcttgaaccactcaaagtcacccatgaggattggaataaatttcttccaatctcctgttaatgctgatattttgaccttctcttatgaatcacaaatgttcttaatggcatctagaatggtgaatcctttttagaaagttttcaatttactttgtccgcattcatctgaggaatcattatctatggcagctagagccatatgaaatgtatttttttaaataatcagacttgaaagttgaaattactccttgatccatgggctgcagaatggatgttgtgttagcagacaagaaaacaacattaatctctttgtatatctccatcagagatcttgtgtgaccaggtatgagaagaaatattttgaaaggaatcttttttttttccctcttttctgagcagtaggtaacagtgggcttaaaatattctgtaaaccatgctggaaacagagtgctttcatccaggctttgtcattccatttatagagcacaggcagagtagattcagcataattcttaaggaccctaagattttcagaatggtaaatgagcatttgcttcaacttaaagtcaccagccacattagcctctaacaagagagttaccctgtcctttgaagctttgaagccaggtattgatttcttttctctacttctgaaagtcctggatggcatcttctttcaatataagcctgtttcatctacaatgaaaatctgttgtttagtatttaccttcgtcagtgatcttagcttgatcttctggataacttgctgcagcttctccatcagcacttactgcttttccttgcacttttatgttatggagacctagtttttccttaaacctcaggaaccaatctctgctagcttcagatttttcttctgtagtttcctcacttctttttgccttcatagaattgaacagagttagggccttgctctggattaggctttgacttaaagggaattttgtggctggtttgatcttctatccagatcactccaactttcttcatctcagcaataaggttgtttcactttcttatcattcatgtgttcactggaatagcacttttaatttcctttatgaacttttttttttttggtatgcacatcttggctgtttggcacaagaggcctagcttttggcctctcttggcttttgacatgccttcctcactaaacttaaccatttctagcttttgattaaagtgagagatgtgctactcttcctttcacttgaacacttcgaaaccattgtagggttattaattggcctaatttcagtattagtgtgggagatgggagggtccaaggagagacgtgggaatggctggtcagtggagcagtcagaacacacctatttattgatcaagtttgccatctcatatggccatgatttgtgataccccaaaataattatgatagtcacatcgaatatcactgatcacagatcaccataatacatataataataatgaaaaagtttgaaacattgtgatagttaccaaaaggtgacacagagccatgaaatgagcacatgctgttggaaaaattgtacctaaagacttgcttgatacacagctgcctccacaaatcttctatttgtaaaaaacacagtatttgccaactacaataaagtgaagtgcaataaaacaagatatgcctttattagttaagtacacattgaagatgctcaggaaaaaataaattgcttttgtgattcaaagaatccacataaatctaacaaaagaatgacaaaacatatttctgtttttcagctctaagagatgggggcactggatcaggagcaggatggtagtggtgtgcagctttgaacaagtccagttgccgtggggtttccctccatggcagagggctctccactccgtttctctgcccctgcggcaggcacacctgcagggatgcctgggccctgggtgcagatgggcaatcgtaagcctaatcacccattcaggcacacacttacttgttttccacatgcaaatatggcctttttgcggatgaatttaatacagttgttgcttcctcattttatttaaaacaaaacaaatggccaaccatgtcagttgagggtagcaaatagaaacatgagtattatggtctttgctgtttgtgtcgattacacggctgaaaggaatcccaggcaaatcagtcttttctgtgctcaattttatttttactttatatcaccttttcttactatcgctattggttttaacaaaatttttaaagagggctatcacattcctttctcttaatcattttatcaatatttcaggctccttagttctattttgtggtttctacctttgacatttttagtttctgaacttggggcccattgttcaaagaaaggcattatggagtctccaaaagccattggcaggtggtgtctgtgacttccttagcctggaaataaacaaataaacaagcacaaattagaagtctttgccctattactgcactattagtattgattgcgcaacatcatgcaaaaagtcactttaatttatctggcaggtcctatgtaaacaccaatacagtcaagagggcttggatgggtatttgctttcatttctaatgaaatttcaggcctctagggtaggatatcaaaattggtagatcatttgcaatttattttatcccaaacacctcactttacagtcagagaaactgaggcccagagaagtaaaatgagttgctcaaggtctcagagagcaagaaatagagatgggacttgagcacctagatctctggtattgctgtcctgtagttcatggagctggcagatggatacatctgtgacctgggatgatggagagactgctggacccttcagaggatctcatctcaaggtggggtttatgtgtaaatgatatctgtgtgtttcattttcctttcataaactaatttaaaaatccttttggtatcaaattttaagccaaaaagtagtgagggggaacatgggtaggaatagcttacagcttgcctaacaaggttgttgactgcataagagtcaggagttttgggtaagagtgtgtgtgtgtgtgtgtgtgtgtgtgtgtgtgtgagagagagacagagagagaaagaggtaaagaggaacaaatgaagagggagaggtcagattgtttgacagtagcaacttcataggcacagaatttctgagttggaaggaagtcttatacgtactgaatttgactgctttattttgtagggaaggaaactgatgtgcctagagtagttgagagctttattcaaactcattccactgttattgagtagttaggatattagaccagcaacatatttgggtagaaactttcatataaaaaagcgtaatcataactatccaatcatgtcaactagtaaggctgctcaggtgggataacacatcaaccttctttgggattcttccctcagacatggttttggtgggaggagcatggcaagggaggggcgagctccaaatgcagggctgctctgtcctcggcgacctgagcagacacacgagcagagatcagagacactcttagtgaatgaacctccctattggctatattaaagtaatgctctgaaaaagttccgtgtggagagcaaggccagttagggaacattttgtggatcttttatatgtccttaactatatgattcttttatttttaaatgaaaaatgttaagatgttacggggtatgtatgcatagtctaaagtgatgattttagaggtagcaagacagtgagaatgtccctacatgtgaaatgggcacagttttatcagggaagtgtcaatagagggttaatgttccacgtagtggctgcaagaatgataagtggtcatggggatagcctgacactctaggagcagaaggtggtgggtatggatagaactactgatatagcatgaatccaacctgctgttatctgcgcaggcctctctgcagctgtttgccctgaagtacatgctgtacgtttctccagctgatcctgcatgactgggtataaacgcctgtccgctgtgtgctggacagccccagacaccctcggcagcctgctgtgtttgtgtgagacatgctgtgttagggatttaagcatctccctactcgttcctcatctttttctcttctcttccttctaatctcctttcatctttccctttgggggagaaaaagtcatcagagttgtttgaaggttcatttatgttgatttgtttttattttgaagctaatttgtttcctgcttgtatctgtaactgatgtacttcatgtgagaccgtgttataatatacttgagttctccttggccctctgatttcttttctttttttcttttactgaaaaataaaagatttccttctctcttcagacctacagctttctcatctacatggacaacctatttttaaagaatcttcagagagtcgttgactttgttataactactactatatacgtaatttcagatgatagaattgaaaatttaacttgtttttctagaaagagtttattttccctataacttcaaagagtaatggtggggagtaggacattctgaaaataagaagaaacatgtcaaatgaatttctgacttccagctaggcatatggaataaaggtctttattccagtgacctctgctcattggaaaactttgggctggtagatttcatgattctgacgctgtatgtcctcttgagttacagtgagtgatgaggccaaatcgcagggtggatgatgtgctttttttgggctaataggtgttaaggaggcatgctgtcctttggcgttaagacagatcatttcctcagttgggtaatgtttaaggaatccactaaatccttaaatatatggcacacataaggaatgcagagcttttagacactcagccttaacatgggttattttttagcatggctaatggctaaacttgatttctactgggtttgttcaacctatttctaacttataggtaaaagcctgctttttatcctctccatcctcatcacctttttagttgtgtctctgcttgattcttcttgcattcaggtctatattgtattataaaaagaaagagagagacagagagagagagagagaaggaaaagaagaaggaaaaaaaaaccacacacattgaatgggaaggcaggagagtagagctctgaccccagctctgtcatagccacctgtgtgactatttgcaagcattttcatccattcaacaaatacacaccaggtaccggagatacaaaactgtgaaagacacggttcttaccctcaccacttacagtcaggagtagagagttaggtacacaaatagaatgtgaaatcacttctcctttctgggtcttcattttacaaatgcaagagccagaactgggccaggtgatcatcaaggtcccttctgaggctaacatgccatcattcatgcaaaattcattaaacatctgataatcacttacctaagtgaaaattagcaaacatttcccctttctccttagtttgtaggggatgatattgaagacgaatgaggcgatgtctacaaaatgctttaataagcaagttggagaaagagattatgtaagtttgaggcattatgattaatgaaaaatgaaaacaagggctgatgttttcagagagagaacagatggttcctttgttcagaatttgagtataaaaaagagaggaagaaaagatacttgctatattgtttaggccctgaatgtgagtaactttaaaatgccaaaacaatctggttaggaaagtcccatagattcaaaatagctcttacagtgatcaaactataattaatataacaaaaaaaagacagaaaaatactaataagaaatgccacagtgacagctgacacaacctgacaaaaactcctatttttacaacaactctagaaacttgattttttctgttctcaggagttataccacactgtaaaacaaactagtgagaaccgatttaaaactgtttctaccgttccccctacccctcaggttattttagtttcccatgactcataaaggaaatcttcaggattcacaagaaattggcaattcttttccatctttgctgttgagtattgataggaaaacagcatagtttggggcaatttaagtagagaacaaacctccgggggcttggggtggtgtctcagaaggccggatctgggaagggcctttgaaaagcttgcacggaaagctgcgaaataaatcgtttctttttctctttctttacgttctaaaatctcgtgatctgtttctacaatacacaggctaattgatgttatccttttggcatgattcttgctgtcctggggtctatcacttgcaggctatgagaatgaggccatagaccaccacactggcagcactgagcaaaaggtgctagacccttctgagttcaggtgctgtgtaactggtgctgtgattggacagggtgactaacctcagtctctctgggtgtaatttcttcactgtggaaagaggaggctaactagaaagttcactctgacactaatctgagttcaggtccacatctttttttttaattaattattttatttttaaaatttttatttttttgagacagagtctcgctctgtcgcgcaggctggagagtagaggcacaatctctgctcaccacaacctccacttcccgggttcaagcgattctcctgcctcagcctcctgagtagcttacaggtgcccgtcaccacgcccggctaatttttgtatttttagtagaggtggggtttcaccgtgttgtgcaggctggtctcgaactcctggccttaagatatctgcctgcctcggcctgccaaagttctgggattatagaagtgagccactgcgcccagcgcacatacaattgtaggaaggctgagaatggcttttaatttgggagcgtttaaaagcaaacatgcttcctcaagacaacagtaacaaaaaattgacatcgttgaggtgggaacttctttaatgctacctgagcctcttgctgaaatggttctatgcagttttgcatagctaggagtggtaagctcattcacagacatggaagaggcagagtgggcttagggagaggcaccagtctagtggtccaacttgggttctgggttccagtcctgcttctgctactaaccccatgagaccttggaatgcccatctctaaggtttctttcagagctgaatcactgtttggtctgtgattcatcaaagcaattagaagactatgcctctccttcaagaccaagactttggtcagaatactccctagggactttctcactgtgtgtggcactcttctctattagacgctttattcattctccattgtattagagtcaaaagtatgattgtttgttgtagaggtgccttttccgtgtcatctctgataatctacccctctctctctgagtaacctaggcttttaaaacacatctcctttggcttaatcacactgcctggtgtctactcagcattatgtgtttgttgtctgccctgaactgtgaactcagccatgtcctgctcatttctgaagcctcagcatgtacatcggtatctggttcatggtagattttcaatgaatctgagtgaatgaatgatggatgaatgattttgtatctccttactaggcatatgttccttgagggcatggaccgtgtctaatgggtggctacctagtgtctcattcttggtccgttgttagtggtgatttttgtcctcttctttgcactcatcattctaggcttgtattagggtaaattgttagcataattctgccttgtttcccaccctgcccccgccttttttttcttttgaaacagagtcttgctctgtcacccaggctggagtgcagtggcacaatcttggctcactgcaacctctgcctcccgggttcaagcaattctcctgcctcagcctcccaagtagctgggattacaggcacccgccactacgcctgactaatttttgtatttttcatagagacagggtttcatcatgttggtcatgctggtctcgaacttctgacctcgtgatctgcctgcctcggcctcccaaagtgctgggattacaggcttgtttgcttttaaacagtttgtgggcagggatggtattttcttatgattctattcctcacagatcctggcccagagccattagcagagaaaattctcagtagatgtttgctgacctaaacttcattccaccacctttgccttccttttgccttttcacctcctcttagaaggtaccttatatgataatgtcacctatgcaataaagaccacaaagtaaatttaataaaatagaaggcatgcttccctcttttctaaccccacacttttttttttttaagatcaaaataacgttgcatttgtgtgtgccctgcttttatttatttatttcttttgtagacacgaggtctcactatgttgcccaggctctctccaactactgagctcggtgatcctcccacctcggccttccaaagtgctaagattataggtgtgagacaccacacccagcccagccctgctttcacaaaaaacaaaataatgatgaatatattgtactaccctcactgttttcatttgtctgtgaatgcttcttattttatcaggaaaaggaaaaatttctgtttcttgactgtaattgttgaaatgtattttcaaagttttttactttatttttggactgataccataaaatcgtgtgaaatgatgtgaggattttctaatggagaaatgacttagaatatcccttggatgtcctatctgctttttaattgttttatcatcccagacatgtttctctattcctgtctattcttttatctgtaaaatgaggttattgaactagatgctgtctacaactttttttttttctttcattaacattaaatctctggtacctgagaacattgggatcaggctgatatgtctaggtgtctatttctttggtctacccttcaagtaggaatgaaaacccatagaatttctgtaattatcagcctcaataactttctaaagcctttaggaagcagataccctgcaatttatctcactaatttgtttgtgattaacactctctgccccttctcatatcccaagctcagtgttttgatatttaattacagggaattctttcctcttcatagatgatatagcaattgtatttcatttctcttatctgaaatctctgctgactttccatgtcttatgaatttaaatagtctaaatagggcatgagatcttaaatattccttccagtttctacattttctattcagcaacaacattttccctggaaaagggtgaaagcctgtgagtcccccacagggcaggagcactgaatacacccacattttcctaccatctgacatagatgagacacaaagtagggactcagatgattatttaactgaatcaactggattccttaattctcacaatattatccttcctactttgtaaatagggaaatggaggcttagtcacacaaaatatcttgttcgaagttactaatcaattaagtaacttaataatttattgacatctgaggcatttctctctttctacagcctcagaccagaaatgatgggatttcagccttcttttcttagagattggtgagccaagacctggagagagaactctggttgtcttaagtcacccagatgaactattaatagaaaaagaattctactcagtcagtacttaaaagcttgacatgtttgtgtggagacctgtgtgtgactgagttcagatcactctaatttcctgggcctcacttgacccatctgtgaaatggggcaatgagctcttttcggcatgaaggcaaggaactgtccagaagacctctggagaattcttcttaccctgagatcaagggttctgtgagtagtacaactcacacccaaagtcttagttgcagggcactttagtgggaaaaaaaaaaaaacgctgaggctatttttagagccttcatctggttatagactagttggtaggagagcaatacctttgaaaagttaagaaatagttttatacactgtgttaaggatgttgtcaaaactaatactcgtgtatgcaaagactttaacatttattaataattttttctatagattggtgaaattggtttgtaatttttgtcatttcacttttgtggaaattgagcaaaggtgagagataaaatgatgtgatcaggctgggtgcgttggctcatgcctgtaatcccagcattttgggaggccaaggtgggcgcctgaggtctggagttcaagaccagcctggtcaacatggtgaaaccctgtttctactaaaaatacaaaaattagctgggcatggtggcacatgcctgtaatcctagctacttgggaggctgaagcaggagaatcgcttgaacttgggaggtggaggttgcagtgagacgagattgcgccattgcactccaggctgggcgacagagtgagactccatctcagaaaaaaaaaaaaaaaaagatgtgatcaatatcaatctaaggacactgtaaagcagcagaggattgacgattttcctaagacttagtggatgtagaagagtttaaaatattctagcctagtggtttgcaaacttggccacatattaaaatcttcagaggaactttatgctacaatgctcatctcagtcacagtgtctgtgggtgagacccaagctcagttacattttaaagctcccgagagtttagaactattgatctagtcttgatttcgtatcaatttctctgatggtatcttgcttgacatcttacttactgggctgcatttttgtgctgtgtctccctgacacccaagtgaaaactgctggatgaaccgaaaattcacccaaacaacgtgaatgtaatggaaactcttgaaaaggcttacaagccttgaagtaaatgttgggcaaagggagcgaaagggttagcgtttttttgcattgggacctgccttctttttatgcttctaggaacgtttaaaaatgagagcaaggaatatatttcattgctttaattgttcaaggtcttttaaaagcgtgtgcaataaaatgccttttaagataactgacctttgtattttaatgctttttggaagggaacaatacctagtgttcagctgcagtataactttatatatatatatatatatatatatatatacagtcagcagagcttgttttggaatcagagggctgagggttttgctgccttcccagatattttacctgtttctgtttcaacatcaagttccattcagttgatgtttcttgacctcataatgtctaacctttatatctttgttttttccctttccaaacttatccaagaaggagacttcaaggcctgattcattaatttttccttctgctgggaactcaggtgtgtggtggaaggcagcacatgtgacctaatctatattttgacaaagaagaaagctccctgccctcccttgcaccagttcgtttggtaatttttaatcccaaaagccactgctaatacgtttttaaaaattgatgctagctattacgttgttagataaagctcatcttccaactctaaacttgctctttctaaaagtgaaatagcactcaggttgcaaacatagtgaactggaatttcagaggcttgaactgacctacaaaacttgtaactgtagctctagttatacatccactgtggtcttggacatgtgaggtgtttgtctaccctcaggagttttagaagaagaaattttatggaattgctttccatattaagaaattaaaatagccaggtgctattttaattttacagattcacaactgtaatcccagcacttgggaggccgagcagggaggatagcttgagtccaggagtttgagtggagtggtcaacacagccgagaccccacatctacaaaaaatttaaacattagctggcatggtgactcatgcctatagtctcagctactcaggaggctgaggtgggaggatcgattgggcctgggacatcaaggctgccgtgagctgagattctgccactgggtgactgggcctgggacgtcaaggctgccgtgagctgagattgtgccactgggcgacagagcaagagtgtctcgaaggaaggaaggaaggaaaggaaggagggagagaaagaaagaaaaaaggaaagaaaatatacaaaaatctttgtgtagctctgaaataaatatatatatatgtatgcagtgtatatattatatgaaataaaattgcttgtgcttaatttattttaaaatcatgtttgaaaatagagctaattctcagttactacattttcccctctcctctttctgatggtttttttcttaactttttattgtaaatgattttaaacttatttaaaaagttgcaaaataagcatagtccaatatagccatatacttttactcagattcgtctattgttaacattttatcccattggatttatcatcctcccccttcctccctcccttcctctctttctctgtctacacacacacacacacacacacacacacacacacacacacacagtctcccccaccccatatatatatatatattttttttttttccagaagtatttcagagtaggtcacttatatcattgcctctacccctaagtacagtgtgtatttcttaataataaaaaaaataaagatagtctcatcatattcacagtatggtaatcagcttctgtacatttgacactgattcaatacttcagtctactgtctgtacttctcctttgtcaggtggctcagttctgtccttgaagaaaactgctttttcccattcagtgtacagtccagcctaaggtcaggtagtgcatttagttgtcaagtctctttagtctcctttgatttggaacatttccacagcctttctttatcttttatggcattgacacttttgttctccccctttacaattatagtattcctcattttgtattagtcactggtttcttcatgttttgattcaattatgcattccctgaaggaatattacaaagataatgtgtccctctcagggatcacatctggagtcttatgtgtccatctatccgtcattggggatgttaattttgagcaactgatcaaggcattgtccagtttctccacagtataggtattctttcctttgcaattattaagctatccatggggagacactttattcttgctccttatcaaaatattaccctacattttttcctaaaccagcatttactatgattggtgcaaaattaggattccatgttactactctcttcacattcatcattcagcatcctgcgttctactgtatgcgggagccccttccttctcctccctccctcccgctctctctctctcttttcctctttcttttctttctttctctctttctttctttctttctttctttctttctttctttctttctttctttctttctttctttctgtctgtctttctctttctttctttctctttctttctttctttttctttctttcttttctttttctctttctctctttcttttctttttctttcactctctctctctttctttcttctgtttcccctcccttccttcctcccttcccttcccttcccttcccttcccttcccttcccttcccttccctccccgtgcctgcggtccgggccccccctttttgtgcgggccgcgggtcgggggcccgggcgggggggggggggggggggggggggggggggcgggggcgcggcgtgggcgtgcggggggggcggggggcgggggcgcgggtcgggggtgctggccggggggtgcgggcggggggcgggggtgggtggggcgtcgcgggggccggggggggcggcgcgggcgcgcggcggcggcgggggcgcgggcggtcttcgggggccgggggccccgcgggggggggcggtgccgcggtgggccgggggcggggcggcggggtggtggggggcgcgtgccgcggcgcgccggcggggggccgcggcgcgcgcgcgcccggcgggcggcgcgccgcggccggtggtgggtggcgctggcggggcggcggcgtggggtccgcgcgcggcggctcggccgggccgtcggcggggcaaaaaaaagaaaaaaaaaaaaannnnnnnnnnnnnnnnnnnncgccccgagtagagaagatgcaaattatagtgcgagaacgtaggagtgagtagtgagaaaggaagcggactaaagaaattgtttcgtttcagctaattctcttatatttctttctttgtatcctcactcgttttctcgagttatttcgttggtgtataaatagaattgtcttgcgtttgagctatttttcatatgacgtagccatgtaagctaacatattctcatatcttacttgagacatcgctccatagtttcattatatatctcatcagtcttcttaaattgttatgtaaaataaggaagtaaaggaaaaaaagaggagccttcccgtgccctccccccctgccctcccccccgccctccccccttccctccccttttctttctctctctttctctctctctgtctttttctttctttctctctctctttctctctctctctttctctctattttcctctttctttctttcttttggttatggtcttcaagatttctgtttcaatctttcataattcattcttgctatataattattttggccctcaaattatcccagatttggtcagtgggagctgcatcaagttggctcctgtgtccttgagacatgtccccatcatctttgttgttagcaattgattaattgctggaataaaaagatgttctagtttggtcttgtatattctctgtcccagccatgaagtcaagcatgtcttcattatgtcctcactctttttatgtggagaaagatgttagagaccaatatctgagtgctaggtgtgctcattgctactctggtgccttaacttatagcctctttcaatgactggagctaggaaattttatatataaaaatatatatgtaaacaaaacctacgtgtatatgtttatctgtaaatatatgggtgcatatacaaatatgtatacacaaatactactactattaatttgctaataccacttactacacaaaacaaatctgtgaaaaagagttgaggatttgcttatggtgctcctccttcaacttaaccctgcccaagactgagggtatattgtcaaacgctcttcagggattacctggattagttctttcttcatgtgtctttcccctatatcccaatggtcattatgttcatttaaaatacagttgggttcaaatgcttcagtttgctttgagttttagtttccctccttcccatcctagtttgtttaattttattttttgaatatgtaaaacattaacatgcttccagaagccaaaactaaaccaaaagaagtgccagtctctcagatatttgctccaccttgttattccccacacctcttggaggttttcttggttatctttctggtatttctttttaatcctgatatatatatatatatatatatatatatatatatatatatatacacacacacacacacatatatcagattatagcgtcagattatctgtgctttccctcctctcagtaaaacctgtaatgccccttcttccccaaacatatatatatatatatatatatatatatatatatatatgtttttatatttcctcttctttcttacacaaaagatagcatgttgtatatcttcttttgcactctgatttcgtaaattttttttctttttttttgcactccctctcttcttttcttcttctctccctccctccctttcccccttcttccgtttttttttcctctctctctctcctgctcaaccaatttcctatgcttggacagttggatagttttctgcaatgaataacattatgcatatgtatttccatatcattggatatatttttgggatatattcttagaaatgggtatgctgggttaagagtaaatattttatgaggtactttagttaccaaatttttctctgatggaatgtcccactagcattcccaactacagatgtctgtgaagcttatgaattgttgccaatttgatggatgagaagtggtatctcagtatagttttgatttgcacgtgtcctattaggagtaaagttaagcatcttaatgtatttaatgtccatatgtattcattttgtgagttttttgtgagttacctgttcatgtcttttgcccattttaaaattttattttattttttttgggacagagtctctctctgttgcccaggctggagtgcagtggcacgatctcaactcactgcgatctccgcctcccaggttcaagtgattcccctgcctcaacctcccaagtagctgggattgcaggtgcatgtcaccataccaagctaattttttgtatttttcacggagatggggttttgccatgttggccaggctggtctcaaactcctaacctcaagtgatctgcccaccttggcctcccaaagtgctgtgattacaggcgtgagccactgtgctcagtcctttttttttttttttttaaattgggtttttggtctttttttctcaattagaaaggtcttcggaaattagatatattggcctttcatctatgaagtatattacacatatctctcccaatttgtttatcttttgactttgattacagtgttttattttcttttcagtcatataaaatttttatacttacagagacaaatttaagaatcatttcttttattgcttctggactttgttcgtagttagagagcatttcttaacacccgtgttatctgcatgttatcttccagtacctgtatagtttcatttttcacatttagatctttaattcatctgcagtttgtgtgtaacataatgaatggatctaattttacttttttccaaatggttatctggtgtctcaacaccatttagtatgaaaatatcttctcatacttcccgtgtgatttgagattggtggttactttttaacctacaccatgactaggtgtgaaggagaatgatggtaaacagtggaacagggtagttagaggaaaatgaggtcccaggtagataatgactgaaacccaataagaacatacatatttttgacttcaacacagagctctttaccttttacaagtcatcctctctggtccatttttgtcaaaaattaacgtatttaatagagaaggtgtttaaaacaaaaggagggtttagagattatctgtgctttccctcccctcagtaaaacctgtaatgccccttcttccccaaataaattatgagaatggggctgcataaattttctgtgagcatgtgtgactatgtttcctctggttcctcgccgcatggtaattactctgtgctctctcctgcaaactgcccatgtttcactgcttgtaggtcaaagctgtattgagtaagaagtgaatttgggaagttttgcaagtaaagtgctacctgagtcagtgactgtgtcttaattcacctttttgcttccaggttcttgctcagggccatctgtgcacatggttttcactcaataagtgcctcatgaattttaatgactacacattaaactaaaacaaggtctgcccacctattcttaagaaattaaactctacaaatgatgtattccaaaactgcaaaagagagtgaaagccaaaacagatgaagctgtccttatatgggcaggaaaaactcagtaagattttatcagttcagtaggtgttgcatatggtgatttggaactgtctgccagttccaagatggccttactttattgtatggtcagtacagtttgtatctagtcctcatcaggttaggcctggaactccccaacccctgttaaaaacagcaaatcagggtttctgtggtggaatggggaggaaactggcttgcattaattgatgtataaggtagcccatgataaactcaatgccacttttatacacatctgggagcaagagcttttggttaattggcttgcctatgtttttgctctgccttggatgctacagaaatggaattgtttgttagagtcgttgcatggtgaaggaaaaatcagagccaaggttttgaaggacctaagggagaacattctgtgttctgcaggcatcttcctccttgggacacaaacagctccctgcctaccacacacagtggataggattccttcaatgcctctcctcgggtgaaagatgtggcatgtggaactgaacgatcaaaatcactggggcaactgtatgggcgccctcctgcagtgtaacatcctaacaggacttttgacaggaatggatacctaaatatttacactcctggaggcctcgtctgtctcaaccatacttaccagtcaccacagtgtctcctttctctgtgtagtactggataaatacagataaattctacaccctgacttactcctacctcatgcaaggaagttataaaatgtttgagtagcttacttaagtattactcctgccatggcttcttgacatgccttgatggagctgtggaaagcatcttggttgcttcaacacaaggctgtgagttgtttcatagggcagggtactaactatagtttgctgaccttatccactgtgtggattcatcttgggaaaggagcagagaaggtactgagaataccacatctgctgaagactctgctggatgctttctccagacatctcatacagtcttttcaacacccactcaagatataggagctgttccatttcacagacgaggaaacggaggctcagagactttgcattagtctaccaggtcataaagctagtgttcacagaactgagactcaaaaccaggtctgtatacccatgaaattggtgcttttcctctatgcctgacacatgacacatcatatcaaggcatcaccttttcttgaatcttattcatagattctgggcaagcagcctcagcttggtcctatgaaacctttcctgacctcctccacacaccccctacacacactctgtgaacattgtaatggttagttgtatacacagttgtttccagtgctggactgtgagttcttctggatgtcttcctatagtgtttaattcatagctggcttttgatacgtatgtaatgaaaattctggttttctgcaccatactgtgtttccatgctgacactaaaaatctagacatgctttcttagaattaggcaacccatttacctttaaggatgcactgactttggtttttgccttaatatttggccaaaacctgctctttgagttcgacctctgctttgcctttaggagggtaaagtagccaaatacctacctcattaacattgtaggcaactctgaaattttgcaggataatcattgcattgatgcgaacatcacactggttaccgtcataccgtatcagcataaaaatgttggcaatgaatacgtatatttttcaaatttgttgttaataaccagatatgtacttttaaatatagtgagcattttacttataacttggaatggaaaaccttcttaaactactttgtacgctgagactccaccaactaattgaaatataaaggaatatattatattaagagtaagatgctacaatatttaatgatgactgtgaaagctaataatgtatgggttaaataattaagaactttcaaatagttaaacaagtagggaaattagttggtaattaatataaaaattagattaattaaaccttagttaatgaatattagctaattgaggttattaaatcttagttattacagtttgttagctagataactttgggttgaccaacacatcttttttcagctaacaagcatttataaaaatataaattgtaatctaagtattgttatagaactagattatacaataattataattgttactgggttgtttgtggaatgcatttatgacaccaaacagaatgaccattaagaaccatttttaacttttagttatttaattacacttaaggtcatcagtctttcaagaaaaagcctatttaagattttttttcacattttctgaagataaattaaaagtagagtgtctacactgtctctcaacatttcctgatcaggaaaacctcccaaattacgtatagcaacatcaatgataaatgatttttaacacagagaaatttcatgtgtattcttatatcacaaaaattcagacgatgataatgagagatttcagtctcagctttggcttactattgattttaacattcagtcatttggcacttggcccaagtgggtaatgggtgcatatctatcagtggctcttcatacatttgtgcagggaggtacacatgcatacgtgtgggtgtttcaaagtctaactggaataggcctctcacatttatctcctattaatttgcagattgtttccatggtcaccatccagaaatttcccagtaatccttgaggaagttagggagtgtgataccattagggagagggaatatgtggcatagagacgtgatgggcattagttgtctgaggttatgaggtcgtggtgaagcctgatcatgtgaccccatctccatactctatgtccagtgctccagatcccatagacctgaatcttagttctggtgctagaactgtccctgatgcacatatagtaagactttaatttccattttccctgtcttatgaaaagaagtgttgataagctcattaattagctttctgctcatagcttttttctgactgctaatgacttcttgaggatgggcaggctttgatgagctgtgtggtcctgggaaagccttggtgtcctcttttacctgcacagtgagggtgacggtcgtgttacctcctgaggccacctttcagctttgccattctgtcatttgacaaagactgaatagagaaaagacaagatttaacgacagttaaagtccaagccagtttgtatttgctgaaagacacaactgagggaaaggaactgacatgtagtttaaacagactggttttttgttgacatgggaagtgtgaataatacttcttcctggtttatgagatatgaaattggttgtctaccttatctgtttctcacttttgttctcagttcatagtttggtcatggaatgcaattttgaagacaacttcaagttgtttttttgctcagtaatcatagtagtatttactgttgttcactgggcacccagtctgtgtacacacatcattcctaatcttagaagaaaaacaacgtgcaagacatgtgttttctttcccactttgcaaataaggaactggggctcaaagagattaaaagacttacttaagttcaattagaaagtggcagagccaggattcaaatgttggtttgcctaactgcaaagcctatatccaccttccacccagtgctgctacagcattaaagcctgtaaattgaattccacacactcctactttcacctgtactattacagtgataagtaaaaccagcgctgagccctactaacaaggtgtccttgatttgtgtgctgatgctcatgacacttctgtgtggcatctgctgacaggcccacggggcccagatgttcccactacaaagagctcatcctggactccccaaccagggaaagagacctgaaaaggaactggtttgtgattagggattattgtgatacttgaagtgaatggtcagtcagttcttcccatttatttgagttcttacttcccttccctttgaacatttcagtcaaacttctaacagtgactttcaacactggctgcgcattaaaatcacttggggaggttttgttttgttttgttttgagacagcgtctccctctgtcatccaggctggaatgcagtggcatgattatggttcactgtagctgcaaccttctaggctcaatcaaccctcctacttcagccttgtgagtagctgggaatacagggacacgccactacgcctggctaattcgtatattttgtagagacagggtttcactatgttgcctaggctggtctcgaactcctgggcacaagtgattctcccaccttggcctcccaaagtgctggaatcatggagctttttgtttgtaagcatgtcagccctcaccttccagagatcttgatttgaatgggctaggttggggttctcgctattagcgcaaaaaaaagtaagtactgcagggattctaagattcgtctagagaagacgatcaccgcattagggggcagaaagtccacttttcattattttgttggtacagtatactttttttctgactctatgaaccctcaatcttatgatgttaccattccattgaagggtgggatttattcactgagaacatttatatttttttgagatgtcttaggctgtggagagggtgttacagggatggacacagatgctgaatttagtggccccagagaagaggaattaaccactttggattggattattgggagcaaccaaaagtcagtgctgtggcttttgctgtcttcccttgtaatctcttcccctcaccagattttcaacacagaaggggtgtattttctagttatggggtattcacaatcacatctaataattttactccagaacatactatggcttgtttatactagcttgaatatttgtagtctctttgatttttgtttgctaatttaatttactattgcatataaaagaatggcttccatggagataatcaccgtggctcccagagtgcatccagagacatttgccttgcttctgtggaaatacacccaaattccccagcatgacattgagtgttcaccccacacctgacaccagtctctcttgctctaattaaggccactctttaccattcttgggcaccagccagatgaactataccctggtgtgggatctgcccgatcctgctgagacattaactctgtcctgaagctgtttgtccttccagcagctagaaataatctttcctttcctagaacttccacactgcattgagcaggaacacttgtagaacttctcacattgtacctcaaggtattcttatttatgcatgtatataatttctccccttctactactgtaagcttctgcagggtggggcagcctcttcttaattttgatatctactgctgtgccaagaatattgtaggcatttcctaaattatttttcccccagtgtatgtgttactttgttcaattcagcagttgtccaaagctaatctcttgagctattggtagctttggtgaacatttggagaggactactgtgatggcgtaaaatccggtgacctagttacagaatatcccctgcaggctcactggtaaggaaggctcatgtttaaactcagtgaaaggagagcctggcttatttatggtggtggttgtttacatgtctttaaatgaccttcttttttttttaatataaaggcaatatattctcatagaaaattcagaaactgtaaacagggttaaagaagaaaataaaaatcaacactatcactttcacctatttattattcttattttatttatttatttatttatttttaaggcagagtctctttctgtcacccaggcagtggcacgatctcggctgactgcaacccctgcctcccaggttcaagcgattctcctgccttagcctcccaagtagctaggattacaggcatgcaccaccaccaagtccggctaatttttgtatttttggtagagacagggtttcaccatgttggccagactggtcttgaactcttgacctcaagtgatccgcctgccttggcctcacaaagtgctgggattagaggcgtgagccactgtgcctggccacttccacctattattaatgaaacctgtcctatttaacaaaaacgataatgtggggtgtcttgtgcttggagcttggagaaaggaatttgcctctgtttttttaatgacttatggcaaggccagtatgaccagtaagtgggctgtttattattattattattattaatcaccattgtcactgatagaaattgtcactattgtcactgatagaaaccaagatagaaattgtcactattgctatagccccaagaaggacctcatggctgcataacgattgagcaccttatatttacacaatgcttggttgttgttttttaaggcaactgtgactcaacaacagctgtttgagaacagctccatcccagatgaaatcagaggaaccgaagtttaaaaagaaagtgtttctgggctgggcgcggtggttcacgcctgtaatcccagcactttgggaggctgaggcgggcagatggtttgaggtcaggagtttgagagcagcctgaccaacttggtgaaaccctgtctctactaaaaatacaaaaaaattagcagggcgtggtggtgcatgcctgtagtcccagctactcaggaggctgagtcaggagaatcccgtagtcccagctactcaggaggctgtcaggagaatcccttgaacccgggaggcggaggttgcagtgagctgagatagtgtcactgcactccagcctgggccacagagcgagactccatgttaaaaaaagaaatgtttctgagcactaaagacaatttgaacaaggcagaaaagtacaaataggaaaacaataatcttactagattgtttgtttttgagacagcatctccctttgtcatccaggctggaatgcagcagcacgattatggctcactgtagctgcgaacttctgggctcaatcaaccctcccacctcagccttctaagtagctgggactattctgtagtgataatccttgttaaagttttggaaaataccttttttagagtctctctttctctctacacagacacacacacacacatacacacatgcaacttttatgtgaatgacggcatttacaatttacgtaaattactgcaggtgctatcatttatttttttcactcagcaatatgccttgaaaaaattttaagtcaatcaacatacagatatttgtcatcttttaaatagctatagattttctctcagacttaaagtctaatttttaaagaagtgactgttatatttaaatcatatatagcttcatgatgaaaaaaggaaaaacaattcttgggaccggacatggtggctcatgcctgtaattccagcagtttgggagaccaaggtaggagaattgcttgaggtcaaaggtttgagaccagcctgggcaacacagtgagaccctgtctctccaaaaaaaaaaaaatatatattagctagatgtggtggcacatatctgtagtcctacccactcaggaggctgaggaggtgggaggatcgcttgaacccaggagtttaaggctgcagtgagctagaacggtgccattgcacttcagcttgggtcacagagtgcaactctgtctataaaacaaagacaaaagcaccacagttcgttagatataactgaatattatcttcatttcctactgtagtggttcttagaaaggttgtttcttaagttagaaactgttgcctaagtatttaggatgtggcaggcactgtgctacatgctggggttgacgaatgcatgggattcggctctctcccaggctggtgggaagaggacacatctagaagccagggtatataccccgaaggggtttgaggcagtgcagagttgatgatgatggtctccagcctgcctttcctttacaaaaatgaggagactgcatctcacattgccaacgagctgcttgactctaccgatattccctaccaagcacgattatgggtagtcttaaaattcttaataataaaatagatattgaaaatagtgtttttttttttaacagtgaaagtaatatgtactcatgtataggttttcaatatacaggaaactataaaatgaaaaggattgtacctgtaatcccaccccttacagctaactactgtgacattttatttgtagaagtccattttgctatcagacctcaagttttaaaatcttaactcaccctctgtaacctagttctcagctctattttatgtaacgtttttaaaggattcaagatttaaaataaacttatctcaccccaaatgcacttgtatatttttgacaccccctcatctctctctctctcttgtctctctctcttctctgtctctcactctatctcagttctctttctcctcttctttctctctctcctctctcctctctctctctttctctctctgtctcacacacacacacggggaaaaaaaatcactcgagttaagaatcagtctctcattttacagataggaaaactgaaatctagaacttgtctgaaatcatgttaaaaaaaaaaaagtggtaatctgtgctcgaacccaggtctcctgaattttcgttcagtgctttttccattctacagtgatgcctccttactaggtcatagaaacagtggcagagggagaaaaggaaaaatacgtcagctccaaagagtgcagtttttttttttctgtgtcctttagctgagctatttttgtgactattcagtacatgtacaatgctgcctcttggagtgttccggctagactaagaggccattcactgctgactgcagccatgccatccctccatggaatcctcggcccggaaatcagatgggaacaaactattccaatatacaaatcaaatttcagagtctgagtgtacacagaaaaattactggatatcctgttggactatgtacataacaatgacacagtgatttatgagggtatgatggggcagagggtagcgggtgatgttggagttgattcatcacttaagcgctaatccattcaccagctccagtcagacttcaacacaaatgccaaattattcatcttccctaaatccaaccctattattttctctctcaaaaccttcagttgcttccttttgcatatggaagagagcgtggactcctccatctggcatttaaggctttctatgatctgtcctcccagacattgataggctgtggagatacagtaaggtagttgttatgagccacaccttgcagccaggctgctccagcaccaagcaacactttccccgggaggttgctgcacctccctgctcctcactttcctcatttgtggaataggaatagggtcattgtgagaattaaataagttaatatttgtaaagggtttaacagtgactagctcataatccgtcacgtagaaagttttttcttagctcatttaataagtacctttctaacccatcactgatagcatttttcttttgcaccagacttctttctagtcattgctgggagcgtcctctcattttcctgcctccctgtagctgtcactctcactcctaaactgttggcgttctcattttggcttgcccaaatcttacgcattcttttaagtccatgttcaagtgaatcctcactgattttgttcttcattcatccccttaacagacttttatggagggtctactgtgtgcaaggtgtattatgtaggaagccttccacagttcccagagctaggtgagctctgtcatgtaggcctgtcttgtacatatcaccttcgacattgctgagcagtttgtgttggacatgtttgatctcctcccctagaatataaacagctggagagtaggatgcttattagtaggtgcttattaagctttctttaaaatgagtaagtgcacatgctaccttttatagatctgttaccttctaatgaaggcaagaacaataggaacaaacattagttttgtgtgtgtgtgtgagagagagagagacagagagggagagagaaagagagagagagattttgaatgggaataattatgaggccacatctgagggcaaataaccacttccaagttgaagaaaggcaaggagaagacaggaatgagaggagagctgtagcagtcaaaggaaacgggatgagaatatgttattctctgaatcataaagcatttgctctgagaaatgtttttccttaagtggtataaaatgtaaaatgaattgggtcttagtttttcttttcctctttaggaggttggagctgatttttaaaatgaggtaggggagggaggtggggtttggagaaagaaagtgaaaattgttttctgaaactctgtttgtcaaataactctctggagagaaagttcagagggtgagggcctgccaaagctgaccagcagcacacaggccaaatcgttctttcgtcattgtcctggtcacttccccacccctgttcgccacccccaaacaccttttttcttctctctctctctctctgtgtgtgtgtctctctctctttcttttctttccttttttttctttttataacatatgaatattataagtaagtagctggagaaaataaaaaagcaaaacaaaacacaaagtaagcagatgatttcaacctgcaattatttgtcaggtcataaaaatgatgtgtcttagatttatttacctgatctcctcatctgttttccactggaagccttctgctcgcgtcacccttcttcatttagttccccaaacttccacccactttctgactcaaagcaggagagaagcattgaacaaaaccactggatttggagaagagagaaaagcagcttttaagaactgactttagaggtttagcacgaattaaattcctggtcttttctttctgcagatttttcagctattgttgttgtttgttttgttttgttttgttttatgtttcttgagtttatcgctaaagatgcttttccgtggatggcacaaaagttcagctatggccatgtgcttactgaaggcctgtatatggaggcatcacagtggctggccttgaagaaattaagatagtgaaagaggacccctgtctgcgaagaaagagctcatgtttgtgtgtgtgctcatgctttgggtgctacaaggagactggtgtctggggaagggaggaagggtgatggttacaggtataggtaaataagttttccaacagttaacaatacttggagacaagctacagagtgatcaatgctagagttaggaacgctgtgagaaggcaaggtgttctgtttgtgccattggggagggctttgctgtggggattgggggaaggatattgttttaggctttgctagatggctaggactttaacaaataagaaagaaagagctgagtctttaagacagagggaatagcagagacatgaaaatatctagagagattgggagtgggaggctgagtctggaggtgagatatctgtatccaatcagagaagtttcctatgccttcctgtaatgttggaggcttcttttttttttggtaatcagtaaggagctgtcatgggctttgtaaaagggctgtgataggattactctggtgtgtgtgtgtgtgtgtgtgtgtgtgtgtgtgtgtgtatgtgttctgcttttactttatacatttcagagtctttttaggaactcttaggcaaccttaactctggggagtgtgnnnnnnnnnnnnnnnnnnnnnnnnnnnnnnnnnnnnnnnnnnnnnnnnnnnnnnnnnnnnnnnnnnnnnnnnnnnnnnnnnnnnnnnnnnnnnnnnnnnnnnnnnnnnnnnnnnnnnnnnnnnnnnnnnnnnnnnnnnnnnnnnnnnnnnnnnnnnnnnnnnnnnnnnnnnnnnnnnnnnnnnnnnnnnnnnnnnnnnnnnnnnnnnnnnnnnnnnnnnnnnnnnnnnnnnnnnnnnnnnnnnnnnnnnnnnnnnnnnnnnnnnnnnnnnnnnnnnnnnnnnnnnnnnnnnnnnnnnnnnnnnnnnnnnnnnnnnnnnnnnnnnnnnnnnnnnnnnnnnnnnnnnnnnnnnnnnnnnnnnnnnnnnnnnnnnnnnnnnnnnnnnnnnnnnnnnnnnnnnnnnnnnnnnnnnnnnnnnnnnnnnnnnnnnnnnnnnnnnnnnnnnnnnnnnnnnnnnnnnnnnnnnnnnnnnnnnnnnnnnnnnnnnnnnnnnnnnnnnnnnnnnnnnnnnnnnnnnnnnnnnnnnnnnnnnnnnnnnnnnnnnnnnnnnnnnnnnnnnnnnnnnnnnnnnnnnnnnnnnnnnnnnnnnnnnnnnnnnnnnnnnnnnnnnnnnnnnnnnnnnnnnnnnnnnnnnnnnnnnnnnnnnnnnnnnnnnnnnnnnnnnnnnnnnnnnnnnnnnnnnnnnnnnnnnnnnnnnnnnnnnnnnnnnnnnnnnnnnnnnnnnnnnnnnnnnnnnnnnnnnnnnnnnnnnnnnnnnnnnnnnnnnnnnnnnnnnnnnnnnnnnnnnnnnnnnnnnnnnnnnnnnnnnnnnnnnnnnnnnnnnnnnnnnnnnnnnnnnnnnnnnnnnnnnnnnnnnnnnnnnnnnnnnnnnnnnnnnnnnnnnnnnnnnnnnnnnnnnnnnnnnnnnnnnnnnnnnnnnnnnnnnnnnnnnnnnnnnnnnnnnnnnnnnnnnnnnnnnnnnnnnnnnnnnnnnnnnnnnnnnnnnnnnnnnnnnnnnnnnnnnnnnnnnnnnnnnnnnnnnnnnnnnnnnnnnnnnnnnnnnnnnnnnnnnnnnnnnnnnnnnnnnnnnnnnnnnnnnnnnnnnnnnnnnnnnnnnnnnnnnnnnnnnnnnnnnnnnnnnnnnnnnnnnnnnnnnnnnnnnnnnnnnnnnnnnnnnnnnnnnnnnnnnnnnnnnnnnnnnnnnnnnnnnnnnnnnnnnnnnnnnnnnnnnnnnnnnnnnnnnnnnnnnnnnnnnnnnnnnnnnnnnnnnnnnnnnnnnnnnnnnnnnnnnnnnnnnnnnnnnnnnnnnnnnnnnnnnnnnnnnnnnnnnnnnnnnnnnnnnnnnnnnnnnnnnnnnnnnnnnnnnnnnnnnnnnnnnnnnnnnnnnnnnnnnnnnnnnnnnnnnnnnnnnnnnnnnnnnnnnnnnnnnnnnnnnnnnnnnnnnnnnnnnnnnnnnnnnnnnnnnnnnnnnnnnnnnnnnnnnnnnnnnnnnnnnnnnnnnnnnnnnnnnnnnnnnnnnnnnnnnnnnnnnnnnnnnnnnnnnnnnnnnnnnnnnnnnnnnnnnnnnnnnnnnnnnnnnnnnnnnnnnnnnnnnnnnnnnnnnnnnnnnnnnnnnnnnnnnnnnnnnnnnnnnnnnnnnnnnnnnnnnnnnnnnnnnnnnnnnnnnnnnnnnnnnnnnnnnnnnnnnnnnnnnnnnnnnnnnnnnnnnnnnnnnnnnnnnnnnnnnnnnnnnnnnnnnnnnnnnnnnnnnnnnnnnnnnnnnnnnnnnnnnnnnnnnnnnnnnnnnnnnnnnnnnnnnnnnnnnnnnnnnnnnnnnnnnnnnnnnnnnnnnnnnnnnnnnnnnnnnnnnnnnnnnnnnnnnnnnnnnnnnnnnnnnnnnnnnnnnnnnnnnnnnnnnnnnnnnnnnnnnnnnnnnnnnnnnnnnnnnnnnnnnnnnnnnnnnnnnnnnnnnnnnnnnnnnnnnnnnnnnnnnnnnnnnnnnnnnnnnnnnnnnnnnnnnnnnnnnnnnnnnnnnnnnnnnnnnnnnnnnnnnnnnnnnnnnnnnnnnnnnnnnnnnnnnnnnnnnnnnnnnnnnnnnnnnnnnnnnnnnnnnnnnnnnnnnnnnnnnnnnnnnnnnnnnnnnnnnnnnnnnnnnnnnnnnnnnnnnnnnnnnnnnnnnnnnnnnnnnnnnnnnnnnnnnnnnnnnnnnnnnnnnnnnnnnnnnnnnnnnnnnnnnnnnnnnnnnnnnnnnnnnnnnnnnnnnnnnnnnnnnnnnnnnnnnnnnnnnnnnnnnnnnnnnnnnnnnnnnnnnnnnnnnnnnnnnnnnnnnnnnnnnnnnnnnnnnnnnnnnnnnnnnnnnnnnnnnnnnnnnnnnnnnnnnnnnnnnnnnnnnnnnnnnnnnnnnnnnnnnnnnnnnnnnnnnnnnnnnnnnnnnnnnnnnnnnnnnnnnnnnnnnnnnnnnnnnnnnnnnnnnnnnnnnnnnnnnnnnnnnnnnnnnnnnnnnnnnnnnnnnnnnnnnnnnnnnnnnnnnnnnnnnnnnnnnnnnnnnnnnnnnnnnnnnnnnnnnnnnnnnnnnnnnnnnnnnnnnnnnnnnnnnnnnnnnnnnnnnnnnnnnnnnnnnnnnnnnnnnnnnnnnnnnnnnnnnnnnnnnnnnnnnnnnnnnnnnnnnnnnnnnnnnnnnnnnnnnnnnnnnnnnnnnnnnnnnnnnnnnnnnnnnnnnnnnnnnnnnnnnnnnnnnnnnnnnnnnnnnnnnnnnnnnnnnnnnnnnnnnnnnnnnnnnnnnnnnnnnnnnnnnnnnnnnnnnnnnnnnnnnnnnnnnnnnnnnnnnnnnnnnnnnnnnnnnnnnnnnnnnnnnnnnnnnnnnnnnnnnnnnnnnnnnnnnnnnnnnnnnnnnnnnnnnnnnnnnnnnnnnnnnnnnnnnnnnnnnnnnnnnnnnnnnnnnnnnnnnnnnnnnnnnnnnnnnnnnnnnnnnnnnnnnnnnnnnnnnnnnnnnnnnnnnnnnnnnnnnnnnnnnnnnnnnnnnnnnnnnnnnnnnnnnnnnnnnnnnnnnnnnnnnnnnnnnnnnnnnnnnnnnnnnnnnnnnnnnnnnnnnnnnnnnnnnnnnnnnnnnnnnnnnnnnnnnnnnnnnnnnnnnnnnnnnnnnnnnnnnnnnnnnnnnnnnnnnnnnnnnnnnnnnnnnnnnnnnnnnnnnnnnnnnnnnnnnnnnnnnnnnnnnnnnnnnnnnnnnnnnnnnnnnnnnnnnnnnnnnnnnnnnnnnnnnnnnnnnnnnnnnnnnnnnnnnnnnnnnnnnnnnnnnnnnnnnnnnnnnnnnnnnnnnnnnnnnnnnnnnnnnnnnnnnnnnnnnnnnnnnnnnnnnnnnnnnnnnnnnnnnnnnnnnnnnnnnnnnnnnnnnnnnnnnnnnnnnnnnnnnnnnnnnnnnnnnnnnnnnnnnnnnnnnnnnnnnnnnnnnnnnnnnnnnnnnnnnnnnnnnnnnnnnnnnnnnnnnnnnnnnnnnnnnnnnnnnnnnnnnnnnnnnnnnnnnnnnnnnnnnnnnnnnnnnnnnnnnnnnnnnnnnnnnnnnnnnnnnnnnnnnnnnnnnnnnnnnnnnnnnnnnnnnnnnnnnnnnnnnnnnnnnnnnnnnnnnnnnnnnnnnnnnnnnnnnnnnnnnnnnnnnnnnnnnntggagtgcagtggtgcgatctcggctcactgcaacctccgcctcctgggttcaagcgattttcctgcctcaggcttcccagtagctggtactacaggcgcgtgccaccacgccctaatttttgtatttttagtagagatgaggtttcaccatgttggccaggctggtcttgaattcctgacctcaagtgatccacccaccttggcctcccaaagtgctgggattacaggtgggagccactacacctggccgtgccttgttttttagtatcagttttttcttttcttttcttttcttatcgtttcttttcttttcttttctttagggtatgattctatttatttgaagttccagaaaaagcaaaactaatctgtggtaatagaaaatcagagtatagtggttgttcgcaggaaagaggtggtatgagattgcctgagaataggcaaaagagaacttttcagagtgacaaaagtattctgcatctttgataggagcacggattacttagatgctttcctttttctcaactggcctaagtttctttttctttctaatgcttgtataagaacaaccttcgttcccaaacacacagacgtgtgtgtgtggacacacacacacacacaaacaattcttcagaaagaaagcctcttacgtgtgttaaacttgccacttttttctcaaaatgtgctttgtatttctttgggtgagcaaaagaagaatcttcctcttctcaagttcagagtttgaatcaattcttcctgtcttttgcatttcagtaaatgtttcctagatggattcatcggttttccagtaaagacaaacagctcagaagccagattacattcatacccaaggcctgagttctgtgacccaggcatcagagctcagtgccatatatggcgaaaagaggaacaggagcaggagtggagggagaatgccagacatgcaatgcattcctcagaaatgtgcattcataactggcaaaacaggacccttgctggtttccatcttatgcagaacatgaactgtgaagttttgagaaagaagctaatgttccaagcatctgccacagggaacagtttattttcccttttctttttggtcacatgtcggtttaatttggagtcagtgtttaagtcaatgctggcatggggtgaagactaagaaattgttcttgcagtcagcagacatgggttctcagcccaactccactgccacccagctgcaaaactctccttggcttgtttttaatcaatggcaaagtagcagggttgaatttgatgatcttcgagatttctactatttctgttttctttggttctaattttgcccgagattttccagttcctgtggaattccccagtgaaagcattttctaattcttccaaatactttttgtggcttgaacttaaaaagacaaaaacaaaaatcccagtcttgaatttttctttgtgatttcctgaagtatgttttggatgcattatgaatcttcaattgacagattatttcttgctcggggtagagaagaatgcatttcctgcatcttcatggtcttctttcacttgcccctcttattgttggagaagaaatgtaggtatgttcaacacatagttgcagggacagctgtgcactaagcaaatgcagacttttaatgaccttgatagttgtctgcttctctcatgcattgaagccttttctgtggaagaagtgggagcagcagaaggcagattccacagcttcctcacacctcaagagacggaattagggatgtgagactgaggtgttggtttcccagtcagtaatcggatgagacactttgctgtcacagatgttaagaaggttaacaagaaatagaattgtaaaactctggccctaaggtggactacggtcactttcactttgagataaggcatgattttaaatgctcctattggtctttatgggttctgtagtctattttcaacagactaaaattgtcttgttgcaaaagtttgcaattttctgcttctttgggagagggttcaaaccaaagttgacctcttccctttctcttctgaaaggatgacgttagtttctcagctgaaataaaggaaggaggaagtttccattgggtcttaggaaaatattccagcattgggctttaatggcagctgatgtcccaaacttgtgcacaatggctccgagaaggccatagtggtttaggaggcacccataatagtcccttttattcatgctgagaatgaagaaccaggggcaacactaaagaaacctgcacttggcttttccttgctgcttgtggtccctttcctggaagctgctataacacagccaccaagtcctgggaggaagagaaggaggggattaattcttatgatgcagggggatggctccagagagagtggaagcaaagacatctgtgttctgatgacagctgtgccacgagtttgctctgtgacttggtcaagatgctttgcaatttgaggccttcatttctccgtctggcaagtggacatgctagtggaccttgaaggcctcttctagctcttaaaagcatgaatttaatatatttccagattgtctgtttatgtttcctattgcatgtacttggtatgcccggtgacactgagctcatcaacttgtaaaaagaccgtgccattatcttctttaacggcaaacagaacaaaaacagaatcctctttgtgggtgcctgctcaccgtaatattaggaccaaattcttttgtgtaacattcacctcctttcccagtctagttccacctaacggttctagtttttgggaagcgtttgcttccatgtgtgacattcatctttactttgagctctctgtgagccttttgctactgcagaggtatgtgtctgttgaaagagaggaagctgtacacgatgacacggcagagtcattgggtcaggagtggtgttgagaagaatgaatcaggatgctggggttctgtgatagactctacaaatagtttacaagaagatttagggacagtaagcacaatacatcttttgcttcagtcaaaagcataaattttaatggttacaaatgcctggtgctattatgagaaaaccacaggaaagaccattatataaacagtaataatttgttgactatgactaatcctttggggagtatgatatgtgacataggcgtataagggctttatgtagactaacccctttaacacctattaacttgttagaccctgctaatgggtccacgagggtggcaggctaaggaatgctaccctctatttactaacgagcaaagcgatgctgaaatacagtgaagaagctgtccagtgtcacatggtgaagagatggcataacagagactcgttcagtgcttttatgcctgcgtcgtgttttctgcctttccaggcttcagcctacccagtaaagcaggataaaaacacacaataactgcccccaccacccacagccagaagatggtagaggatgggattgaattagtcatgaatcatgtgaaccatagtatttggtgaatcagtcttggtaattggtggggtgatatgtcagtcagtttactttcacaactgaattatcaactagggcaccacgatggaaaacagaattgaggatttctactttcttattattcatttgtacgtgtgtactttcacttatttaaggcaatgaagaactaataatacctaatatggtgccaggctttgtagtaggtgctgacctgtagaagtgaaccataaaccctaagccaagggctataaaatactttaaaattcatgtagaatcctctctcaatcttacccccctttcatttttcagtgtgttctctgatacttttgtacttttgccaggtgataagtccaccttgacttggctattttatatcttttttttttttttttttttttttgagacggagtttcactcttgttgcccaggctggagttcaatggcacgatctcggcttactgcaacctccacctcctgggttcaagcgattctcgtgcctcagcctccctagtagctggggttacaggtgcacgccaccacacccagttattttttgtatttttagtagagatggggtttcaccatgttggccagactggtctcaaactcttgacctcaggtgatccacctgcctcggcctcccaaagtgctggattacaagtgtgagccaccatgtctggccgtctattttatatcttatagtaaaggatggttgcctcaaaggctgtaaacgtcaatgtttagagatatatatgaaattatttgtaacttccttcaatagtaactttcaaatgccacccttacatggctttatgaaaagtaaacccttctcttaaatgtctgcttttttcttagagtaagtttcttgtgttggctttcttttctctcttctctttatcagtgaattcatttattctaaatttttttctgatgtagtttgggacttcctaacttaacaatggaaattgaaaattggagaagctcattctgtattctttcctttttattccatttttgatactggattatgtctgtataattgctcaaattgtgagtcatgtaggaacatgctctgtgtttctgcacatgatatttaaaacctatttatgctttcttaaccacaaaggggaccataaaagtcctgtcaaatagtcccagactgtaaattccttgaggtcaagagctgtgtcaaatttatttttgtacctctttctgctacagctcccagcccctagcccagtgccaggtagctctggcaaatgagagtgggattgaattggatttctcgttctgaccactctcttggtgcctttatcaacttgtccaccccattgggaggaggggcatggacctgtcaagtgtgatgaattggtagatcatggagttttccatcctccactagaactttagctgtgtttagacttcagaatgctgagtaactaataaaaaacgattccaaagcactctgcagatagaaagtgcttcatgtgtaataaataataatagcctcttaagattaggcacagccacacaaagaagtgccagtcttgcaggccgcaagaattcctgatagaccttatggttagagtggattggttgagactgacccttgtcactgttttgtaataagcagtttcacctccaagttaccacgtattttccattatgggaaaagggtagtttctgaactatctaggaattaatccttccaattatcgttaggagtctgactgaaggaacaccatgaaaattgacagtcaagctttctaggtaagcctaattcagtgcttaaatttagttctaaatcctgtccccttctccaactgttatttctttaaaggaatcagcagtcacctctattttagttctacagcatgtggtggtcttaagaggtggaaactggcaccttttcccaaaggagagactggaatggccagagcccatcctgactttgggtcatcactttcagattaaaacataactgtacagagtacatttcccttgattctctgtttccacagagaggcttttctgctttagggtttcattgatgggatgacttcttttcctttgtcctagagtgcgggtcaatctaattcaagtttggtgaataaatggagccataaactgtgttacccactttatttatttatttatttacaaatgaggtctcccctccctctgttgcccagcctggagtacagtggtgtgatcatagctcatctcagcctggaactcctgggctcaagcaattctgccgtatcagtcccctgagtagctgggacggtgggtgtgcaccactgtgcctggctctccaccttattaaagtgagttaagagaagcataaacagtgttttgctattcttcttggtaactttaaatgatgctttcttctcagcaatgatggtccagtctaactgggcatcattcatttagctattatttattgagcacctgctgtattccaggaacttttttttttctttgaaacctagtctctgttgcccagactggagtgcaatggcaccatctcggctcactgcaacctccacttcccaggttcaagcgattctcctgcctcagcctcctgagtagctgggattacaggcacgtgccaccacacctggctaatttttttgtttttagtagacatggggtttcaccatattgtccaggctgatctcgaactcctgaccccgtgatcctcctgcctcagcctcccaaagtgctgggattacaggcatgaggtaccgcgcccagcctccaggaacttttctaggtgctgctggtcagtgaagaaaacaaagcctgctgtagttaccatttgaaagactgaacagaagtgtgactttaaaaaatgatttggcaaaagtatgctttaaataaataaacacagcaaacaaaaaacacaacagctctttcattctgtcctttcctctattctttctcttgtctcccatttttgtcctgtgtgtaacctgactccacaccttttattctctcactctgcttatcaacacagccatacttgcttctcaggctcttctgtgtctctttgttgtgtctgctgtgcttcatcatgtggcgatgaagtagatgaaggttgttggtggccggaccccaacttcgtattccttcttagctagttccttgattgatctccagacatggagtggcaggtaggtgctcttgttgtaagtcacagaacctggaggaaagagtggttcgtggccctggggcctctgggggctgatgcttggatatttgtttagatatttgtttggatatttgtccccgtccaaatctcatgttgaattctaatcctcagtgctggaggtggagtctggtgggaggtgttggggcggatccctcatgacttggtgatgtctttgtgatagtgaattcttgtgaaatcttgtcatttaaaagtgtgtggcacctcccaccctccaactctgtctctctctctctctctctctctctctctctgtctgtcctcctctcctgctgttgccatgtgaagtgcctcctcccttttgtcttctgccacgttgggaagcttcctgagcctccacagaaggagatgctgctatgtttcctctatagcctgtagaactgtgagccaataattcaacaactcaaccacttcttttcttttttttttttttttttttttttttttggagagacaggtcttactctgatgcccaggctggagtatagtggcatgatcttagctgactgcaacctctgcttcctgggttcaagtgattctcctgcctcaggctcctgagtggctggacttataggcacgtaccaccatgctcagctaatttttgcatttttagtagagatggggttttgcccctttggccaggctggtctcgaactcctgacctcaagtgatccacccgcctccacctcacaacgtgctgggattacaggcatgagccacctcacctggccaacctcttttcttttaaattacccaatctcgggtatttctttatagcagggcaagaatggtttaatacaggggcccatccagcagcactgcattaccaggattctgctgaagaaatggacgtggccccaaaagccatagcctggctgccaggtgccccagagtattgtcaactcagaggaacatctctcaggaaatattccttgattctctcttctctattagttttttaaatgcttctatcccagaggaggtgctcagtaaattttagtttctttccttttccggaaagtctcatgactctttatctgagtttgacttaagagaacttacttaataataattaataataaagaataaaacctgctaataataagatttaatagaactttctgtttaattccatggttattatacctatttcttaatctctctaagagacatggactgtgttaaagtgtgtttatgaactggtggtcgagggtgcatttccctcctaagaaaactcattccttgttttgggataaggttcttggagctacatttaacactcagtcctagacttcagtggctcaaatgccgagacatgacctccatattgaccacacggttgatcatgctgaccacagatttctgctaaagcttgaggtgcctgaccatccctggctattgtcattcgccctaaactagctgtttgggaatggggccagtgatgaccctttagtagagataaggcagagcttgtggaggaaaaatcatttcttctccattcccatgatttagccctctgacttcatgcatttctttttgccctttttcttgtgctggattttaacccccagcctctctttcgatcatgataatttgcatttattacacacgtactatgttccaggcactgggtaaattgctttctattgttcatttcatttaatcctcaaagccagcctatgcagtagatactagtgatccatattggatggatgaggtatggatggattagaaaggtttatgtagcttacccaatgtggcacaacttgtaatggcagggtcagacttagaaactaaatctctccaatactagcttttgattttatttttaccctactcacccctgatattcgtcccctggccttttctgcttacctggcttggagcaagtcctcatctgccaaagactatgtaggtggttggaaggagtgctctgtcctcacctcttcctcccatggcacctgcagccagagacctgctgtgtgtgctatatactcttctgacctctctgattctgaatcgactctcaaggctgaattggctgacatgcatcttctagtggattcattgtttttcatggtttacttggtttatgacaagctagggacagcttgacatttgctttcccgtcagtggtctggggacgtgcacagagctgcttgtttcagatctcctctcggtgtttctctacacttagtgaagactatataaccatggctctattataatacaatacgttataataagatctaggggcattctcgagaacttgggagcaatctaagaaaggagagtgaggttggagagaggcgtgtcctttgcatcttctggtagatgatggtggaggctgtgtaataacatgccaaagcctagcccacttgaaagcatcacgctctccagggaactgcctcagcctggggcacttatattatccatgcttagcatttttgtattactttacatttgtgaactgctttcccatgatttattagctgttcttgtttttaatagcccctggaggtacattgatattcaggcttctgagaatgtaaatgcacagggaacgttcatctcatcagatatttttggatctgggttcaggactctgacctcctgggatgaggccatttggggtcactgcctcccatggattagtaggagatcaagtggacttaacttcagctcctaaagtctccaaggcacagccatggaatgactgcagctatttaaggaaatggcgtagaagccattatccaaagagctggattccagtcctgactctgctgctgaccagcttcactggccttgagtagttgctttgcctacctatgcctcagactcaccctctataaaacaaaggtaacctctcaagtccctttagaccccccattgtattaaatataattctgtgactttggactccttctctggaaccccttgggtagccaatgaattatatgacagggaacatgggtatagatataacccattaggggacttgaattgagaaggtgctcaccttcctttctctaggattcaaggaccaactgacaatgatatgctttcagattcattttaagaagcacacaatcctcattcactataaaagtaagatagcgagtggagctgttagaggaaagtcagactggagccaagaccatcatttctgtatcttctgggtgttgtagaaagtaattagcaggcttgattatctcactggttcaacacacattttagggatgtgatgtaatgtgaggaaacatttagttgtcagattttagggctgtatcaaatttattcttgcaggaaaagtctagttgtcctggcaacctaaaattgatttctttttgctcttgtcagctgaaactggtcccctttgaatcattcctctaatttaatatagagagctgtgtgtctccacctggtgaccgaatcatttttaatgacaggtaactccagcaaatggctcctctttcctacctgagccagaagctatagtttattactaccttcaccctgtgttgttctctttgtgtttatttatttgtctgtggagtgaggtgtgtaagtaaagtggcattcaattaattaagagtttaatcaggcctgtagagcagtgatgtaattggcagccaatcactgcctttcgttttcagtgacctcctagacatgagtgggattcgaatgggctctggaagagggagtccttttgtgtggatgtctagcatttttgtaacctgaagagggtgatgtaatggcccagatgaaaggagaaagcggagctgcatggctgctttctgcctctgtcagtcatctctatcaagggggtgggtcatctatgaagggtggaatcgacatcattaggaagaaattgatgcctatgacaattgaagaggttgtgagagagcaattcgctttccttaaatggttgcaaatttcatggaccacgaatgccgcatctcaggatacagaagagaacttctgatggggaacggctaccagtaattttgaggaaacccagaaatcagcagaaatgccagaaagtgaggagacgaggaaataggtattatcaaaaaagtccagcgcccatcccccaccccgcccccaaacgaaacaggtatccagagtctagaatctgctgatttcattgtgattccagttgtcgacggtcctatgtagacaggtgatttgtgagtctttgaaaggaagtagtgttcaccaagagccagaacagggtcttaaccagttcccgttttgtctgggttaaccaactggtggattaacacgatgacacagacatagtggggagaatgtgggctttggagttggattgtctggatttaaatccagagtccaggtcattgtatacaaatgaccttaggccagttgtttaatttttgtgactcagcttcttcttcatgtcagttctatcctggggctaatgataggacgacaaaggaattttttttttttttttttaagagggaatcttgctgtgttgcccaggctggagtgcaatggtgcaatatctgctcactgcaacctctgcctcctgggctcaagcgattctcctgcctcagcctcccaagtagctgagattacaggcgacaaaggaatttttgaagacaaaatgaaataatgcatgtgaagagcttaaaacaatttgcacatatgaattatttaataaatgtggttcttactactgtttgtaggaagacatttgaatttagtaaagcacataaaagccttttacatatgtatggataagtccgtaaacaaatacacacttattagtgatgcgggtttagaaagagtatatttcttggtggcagaagttccaaagtcaggccaggcatagtggctcacacctgtaatcccagcattttgggaggctgaggcagatggatcacttgaggtcaggagtttgagaacagcctggccaacatagcgaaaccccgtctctactaaaaatacaaaaatattagccaagcatgatggttcgtgcctgtaatcccagctacttgggaggctgaggcaggagaatcgcttgaacccaggaggcggaggtttcagtgaactgagatcaccccactgcactccagtctgggcaacagaggaagactctaccaaaaaaaaaaaaaaaaaaaaaagctccaaagtcatattgcaaggatgaggacataggtagggaaggggaaaatttgtgaccatttttgcaactttccaaactcctttctcctcccccatctttctttcttccaagaagttaccgtcattagcaatttgccatgtgtctagtttttgtctcacatttatatacctgtaaatatatgtttattttttgctttaaaaacctcaacagttatttgtataaaatttaaattctttgttctttcatgaaatatcatgactacaaacattgaaatagttactccgaattgcagtcacatgttttacttgtatataatcattcttataggcagagggataactgtaaccttttcccttctccttctcaccttgccctttgggagacgtttcttccctttttttgtgtctttctaccttgtccttctcctcccctcctctcttttcccttcccttatattctgttttcttaccgttcgtctccttttctctctccttccctccctccctcccttgcaatactttcctacctttcatactttctttattatatttttagtctcttgtctttagcttaatatggggctcagtggccaggcgtttacataatattgtgggtccttgaaacatcaggtcttggacacctagtctcagctctgaattgtcaggttcctgctgatatactttctgggtccactgttgctttgtatttaatactggaggttgtgataacattgtccagcttcaggaggccatggtagcgcaggagggatgcatgtgttgtgtagttccttgtctggaatgcagggtgacaggaggttggcttgtgtacacatgttcatctccttgggctactggagagggagtctttattttggtggggtgctcctaagagcagtgagctcagagcctctgtcttgagacttgctgtgtgttttcttggcctcccaatgctcctggcataagtgacatccctgcttaggaccctacactcatgatttcaggcaacctttctgccttccttttggcccctgcctctccaccccatgttcatattcttcatcccaggtgcagtgccaccctgctggctacctctgccaggcagcatccttcatgcttagctcaaattccaccttctcagaaacatctgacttcacatttggtgtcagtctctctcctcctccatttcccatcacacagtttgtactttcagagatactttcatacaccaccttgtattcaatgggtggtatctgtttctgagttctgatcagagggcagacatctctgatcctttggaggctagctcagtagctggcatttataggcactctgtaactgttaaattgaattactgaggaggcctgaggggttggaaggtcaaatgcagttaacccagggaactagaagggcccctgggaacttggttttggagcatggcttttatgagcagctatcagcttttccccaggctccttcttaatcctgtctctctagaggcacaaggagaggtggtgtttgcttaagatgctggtggcattcctagtgaagttaggtcagaatgtgccatctcttctttagctctcaacttcttagagtgtcaaccctcctcatattggaaaagcttagcttttaaaaaggagaaagtggtttacatgatgacctctgaatttttgactttgattattaatcttcttgaagaagactttgcagttgcccctgttacaaggaaagcagacatgccaagttgctgcatttgtgaaattgaatgaaattctggctgcgttttatggctctgacctttgggaacagtccagggtcagactgctcacatgatgtgcttgataaatccgcctcccaacagcactgttgagatcttaactagaattgctacttgcgaaacacctttttctgacttgcagttcagattctgcatgtactgctgactactgcttctagtggctcattcagataagtatgctatatattaggtagaaagaggatgcgtgatactaaggaaagagaaaaagagccagcccaggacacttgggttccagtgctaagtctgcaagagacatgtttgacatggggccttagttttcagatctataaaatggagacactaatcattattaggaagggttgtcaggagttcgagactagcctgaccaacacggtgaaagcccatctctactaaaatacaaaaattagccaggcgtggtggtacatgcctgtaatcccagctactcaggaggctgaggcaggagaatcgcttgaacccaggaggtggaggttgcagtgagccgagattgcgccacggcactccagcctgggtgacagagcgagactccatctcaaaaaaaataataaaaataaattaataaaacaaaaagagctcctcctatgaaagctctggaaacatcctccaccaaactggttgcacttctctaggcacaatatggtttacatccttctaaaatcagcatctcggccggacgcagtggctcacgcctgtaatcccagcactttgagaggccaaggtgggcaaatcacctgacctcaggtgatccgcctgcctcggcctcccaaagttgttgagattataggtgtgagccactgtgtctggccaggaggagctcttacagagctggaagtatttactcagagaaagatggagttagaagggaaggttgagaatgagagacaagttagtgtttattcaaggtggaggtgcacaggcctaatgtaggacaacggcaagtgggttggagaagaggggcttacgggaaggatgggcaggagaaatgggatgggacccaggaggcccaagggggaggtggaggattcaagtcagagcttcagatgctgggtctggagacactttctgaatgcctaggaggtagctgtggtgttttgcaggataagaaagacagaggctttctgtagctaccatcctgctaggtgaaatgaaggggtggtctgggatgtgtgtgtatgtgtgtatgtgtacccacatacgtgcatgtgtgcatgagtgtgtattggtaacagaaccaagggagatcagggacttacccaaggccatacagctgggaaacagctttcatttgattacggtgctaagtttagtaatgactgcgagagacaaaaacgggcagggggagcatgtagggaaagggcctcggccccatttcctgccctctcaggcaggtagtgagtaggagttttaggtttcactgtttgatagcatcacctcctctgctttcccagaaattattcctcgaagtatgactcgaatcattcctctgttgggagatgtatcggttcagagctgactttctgctctggttgtttactgaaaaatggtagcactggcaattcagagggggcataagcaagtgaagaaaaaaaaaatgaacaaacagggcatgtgaggtcaggggccctggttgtgagtcccggccctgcttttagagacccatgtgaattgggcagatcaatcaacttcttagtgcctcagctttttcctctgtaaattagaagatagtgatttctgcttgataaatttattgtgatagtgctttgcaagttgtattgttggtcgtaggataataaagataaaggggtatacagacttggattctgtttctatatatgtgaagcgttagagagaggtggtaaattgtttctctcccgtgggttgtgcacatctctgatattatggtaatccccatatcttctccttttgcagggtggggtgtcttggatagtatggttactgaatgtagaatctactaactcctcttttttatttcctgagactgggtctcactgtgctgtccagggtggagtgcagtggtgtgatcatggctcactgcagtcttgaactcctgggctcaatcctgagtagctgggattacaggtatgtgccatcatgccagctaattagaaaagtttttctttgttgagatggggtctcactatgttgcctaggctggctttgaattcctaagctcaagtggtcagcctgactcgacctcccaaagtgctgggattacaggcatgagccactgtttctggcctcctttttaatattctgccctgtgcaaagcaccagcaccaacagcctccctcccacaacccccaacagctgtgcattaagtatcactttggtttgaggatttcctagcttgctgtttatcctgggagaatttctgagtttcttggtctttgtttctttacccaaaagttggggatagttcagctttgtctgcattgtggacactacctccagaaagcaatgggaagaccctttgtaagctgtaccgaactctttgtatttttggagcacattttgtcttttttctcccttcttctggtggctgaggtacctctttggtcttgaaaagacccacttatatggaggcggaaatgggcttatagagggaagtgactttccaagggccctggaatgaattggattctgagatctgtgcccgtccttgtcacaacgtgtcagattccattatttagtgtgggcctgatttgtccatgcctgggactttcccagaggaagtcatactttctggaaactctctgaggtcttgaaggggtgggagaagtctctgacacaagtgctgctgtggtcatggaggcttccattcctctctccttgtgttgagcagggaattgctccttggatattttaggtttgagtgactcaacatgcttatgacccagaggatgctgtggtgtgtttggcagcatgctggaattagtcagaaggcaaaactgcttgtcctgaccccagaacccacttactctaggtggatgagaaagtcctctcagatcctctatttcctaattcatggcaacttctggagaacagtattttctctgttactgctttatggggtttagtgtggaaattaaagaagagaacttcttattttttgtaaataataatgcaatattcagatactgttagtttctgaaatttaaaatgggcatctcacttctgtgttccctccccaaataaatgtattgatactaaaaaagaaagccagctaactttatgaggatggctggtaaatgagccattctgtttttgcttgctgtccaaggcctctaatattaagcctggaccatttcaagcatatatggaggatatatatttcaaatatacattaggggtatatatttcaaaatcgaggacacattaatagtaagaggagaccatgtaagacaaagcacaggtttatttttatttttgtttacctgtttattttttatatttttgagatgggatttctctcttgttgcccaggctggagtgcgatggtgctgtcttggctcactgcaacctcctcctcccagcttcaagcaattctcctgtctcagcctcccaagtagctgggattacaggcacccatcaccacacctggctaatttttgtatttttcttagagatggggtttcaccatgttggccagcctggtctcaaactcctgacctcaagtgatccccccacctcggcttcccgaagtgctgggattacaggcgtgagccactgcgcctggccaaagcacaagtttaaaaattacaagtttccaccagcctcatatctcccttggcttataatattcaagtgttcatggatactggggcttgccatcccccgccccgtgtgttaatgcagcccatggaggcttctcatagagacataaacagtgggctccagaaggtctctatttaagaaactgaggtctggcaaggtcacacatcgaggaaatggcaaaatcaagactaaaagccagctctttggattctcaattccctgctctttctgacacttcactcttccctcctgtcaggtgaagagagaagccagatggtttgacaaatggttctcgttgctgtcaaatctgccttctttctttgctcagacagacagttcttaccttccctttttcgggggactggcggaggtggggtgaggagagaggtaggaaggtggatgaaggaaaaaaagaagcattttattgcttcattctttatgtagtagtgatggccaataagttctttttttctctggcaagaagctaagtaaaggcaaggagtaatcgtcaccttgaatttagagcacatagaggcctagaaatggcaggctgtattaggagacaacattgatttcatatatattcatctctgaaaaaacatgtttaagatgccatattcataaatactaataaggctgtctgattccaattttcaggtgagattagcattttattgagtattttatctgtcagattcaatgctggatgtaccatcctcccaggcttattagcataattgctgtgcttaagcaacaataaaaaaatcagcagtaaaatagcatttagtgcaggcaatttgttatcaaaagcttttacttaaggacagctccagcctgcatttattagcaagttagggttataatttatttttattttgaaaaacaaaagtgggagaaagatttggcttttttgttttggaaataatagagaaattagaaagcattgcctctttggaaaattgtccacatcccttcttcctttgccgaaagcaggctgtgatgggaatagattccacttgtgagcgacattggctcagacaaaaagttgctctccttggcattggaacaaacgggtagtaacgtccctttatgcttgtacacacatttccaaaacactttcagatctcgtttgttgctcaaacctcacaccagtcccgtgaggtctccattcttagaaatagaaaaccaagttgaaatgacttgttccagatgaggcagttgagtggcaaagcggaggtgtaaaaactagtcttccagcctccagtcctgtctcagcattgctcccccttcacgtcgttgtccagagctcctggtggagccttggccttttccatatgtacacgtgcacacacacacacacacacacacacagatctgtgtatctacacctgtctatacacatacgtgcacacctatgcacacacatctatgcatacatacatactttttcttttcctaaaagttaattatgtactcttgcatttgtttttcatttgatgtccgggttgaaatacttctgccacatgaacttctcttgatgccaaatagcctcttaaaatcaatctctctctnnnnnnnnnnnnnnnnnnnnnnnnnnnnnnnnnnnnnnnnnnnacccccaccccccccgcccctctagctagcaactgtatcaggaaagcacttgtgattaccatctgttaaggacctggaacaaaataaatgatgttataagtttttgtagggaagatagagataagattttaaaatatggagattgggaaatcatttttcttccttatttcttaggaaatgtatcagaaataaataacattaaattgatgccttttagtgggttttaggcttcaattatgggtaataattttcaaattgagaataaagttttgagtgaaaatggacaactgaagcttctaagctttgagaggagttattttagcattttagattttcttttctcagtaaattcaaacaaagatcatacaatcattgaatcatagcacgtctaaaatccaaggctctgtgctggccactgtgtgttttacagactagctcagacgtggctatgagccccaagacatgtttaaactattagagaggatactaacgatacattaataatgttcttggttttgacagaatattctagaacaggaactctagtaggatttttgcttatgttacatcattgaaatttaaattcactcaattatttattgactaaatattgagcacttatgtgatgttcactcttgtattttacatacatcatctcatgtaattttttaacaatcatatgaaatatgatctgagataatagtcagtactgttattattgttctcatcattagatgaggaaattgagactaagtaacttgtccaagtcattcagctggtaagtggtagaactgctgtggtctccctgtaaacacatgtttttttcatggtaccacttggcaaaaaacgaataagcaggtacatacgtagacagatagtgctaatgatgattagagaacctcagaactcatgcagaacctggatgtttagagagaaaatggaacttgaaatcagacaggtgttcaaaccctactatgcttcttagtgtttgtaaaatcctcaatttaaggacctcttaggatttcggtgtcttcctgtgaataaaggattataaaatctttctctcaatatcataatgagaataaattacaaaatgtatgtgagtgtctgcaaaggtacctagttcatggtgggagttcaccctatcttggaagtgctcataaacatgcagggttttttttttgagacggagtcttaccctatcgcccaggatggagtgcagtggcgcaaccttggcctcccgggttcaagtgattctccttcctcagcctcccgagtagctgggactataggcgcatgccaccatgcccgactaatttattttgtatttttaatagagacgaggtttcaccatgttggccaagctggtctcgatctcctgacttcaagtggtctgactgccttagcctcccaaagtgctgggattacagacgtgagccaccatgcccggttcaacatgcagttttgtgtactgtttagggacagatgccgaagccacattgcttgggtttggatccatcctaccacataatatcatgtgaccttggacaaacaacttcacttctagtgctgtactttcttcatctataaaatgggcttacatcatagggtccttgtgaggattaacaaagttagaatgcgtagagcatgtagaacaatgcttggcacacagcatgccgtgcttcagtggtagcacttactattccattatactacagccaccgagaaggacaggtacacagtgaatagtttaggactgttcatgttcccggcctcttcactccaagagcatcagcaagtttagtttagaacataggagttgtatttacacagctactaatgaccttggaaaagttcttggcttctctgtccttgacctttgtttatctgaacgagtaaacttcagatgacagagtgtgtggggaatggaatgcatccgcatccttgataagctgccctagtggaatgttgccatgtggctactgagggtcaattcactggtcaaaggtggcctgctggttggtattttttctgtgtcttccgggcaagttctgtctttcctcagtctgcacatgcctgggtctgtcctcagagctctctcccatttccctcttctctagaaagcattgatataatggggccacctcttccttggactgtttctgtagcatcagaaggaggtgggtgggaatttggcataccactttttgaaaggtaatacattctaacatatgtatttcacccaccttcaaagagtaagaatacactgaatgatacttaattttaaagatgtgttgctgaggtgaactctaagacgaacaattcttcagaatcttttactttcttgggcttcttgtcccaaacaacaattatctttataaagcctgtgtgtgtatgtgtgcgtgtgtgtttgtgaaacttcctggaattggtagtgttgattttgagatgtttctttggcttattcaaaatataaacagaaaggctaaagtgtttttcatgtcattaagaatgtctttataagaaaggacattggccgggcgtggtggctctcgcctgtaatcccagcactttggcaggcccaggcgggtggatcacgaggtcagggagatcgagaccatcctggctaacacggggaaaccccatctctactaaaaatagaaagaaaaaaaaattagccgggcatggtggtgggcgcctgtagtcccagctactcgggaggctgaggcaggataatggtgtgaacccaggaggcggagcttgcagtgagctgagatcatgccactgcactccagcctgggcgacagagcgagactctgtctcaaaaaaaaaaaaaaaaaaaagagaaaggacattaagatgataccttaccttgtgtggggggcttgtagctttcaaaacacttaagtacccattttcttatgtgtgctttatgacatctctatgatgtaggcaaggcagggtttatcattatttcccttttagaaatggtggatctgtggttcagagaagtgaaataagttttcttaaagcagttctggatgcaaacccagaacatttgactctagggtgctttctgctccaccaccctgatttgattgtaaggaggtaattcttaccaagtactgtcagattatatagagttgtaatatatcttaaaaatgcccattttaattttctttaaacagatcagttaaaaagttaactgtgatttgataccatcttgtttctccccaagtttaaacagcaatgagtctctaggaccttcggttaaaccagcatgtgtttttcaaaaatcaaatgtcaaagcatttcgtgaaccttgctttaatgaacaagagaagtgaaggtacaattccttttttgcatgaggtaattaggaaacaggatgtgcaaacttgctatatgaatttaaagaggagcacttctactgatgtacaaactggatgggcatattacagagggtttcatgctggtagaaattttaagtgaaataagttctcattaagcatatcaattatttttggactgtgtgaaaacttaatctgtttcatgagttggatctaaggtggtcaatacctctacactccaaaaaacagaagcatgactcaaacatctagttctgattgcagagtgcctttatctggaagactggacatgtcgtcagaatatagagcaagagggatggaatatgctcttaagtttcctgatgacttaagggtctgcactatacttgcttgggaggtgggaaggattgaattctctttggaaaatgcctttgaatctcttacacacatggtacccaataagcctagtgctgtattattagcatcatgtactagagtatggtttacctgacataggttttggaaatctatttcttttatttacactacatggtttcttaggtggcaattctcagtgaattaccagcttcctgatagtgtcttgaaaagcatgctttataaggaggcagaaagtgtttctcttttgacagatgacctccttgaccccttgactttccatttttgatggtttcttttgaggtctacgtcatctggtaattttattggtgtgatttatgcccccagtaaggatcaacttgtatagattctacattctcatggaagtctatgtactgtctctactgtgtaataattagctccaactctacaaacaaggttagaaatgaaatcaccagcattacaagtgagacataacaaatggaagattcccttctctgagtttctctcataccgttaattttatttgagctggcattgactcattctatatgtctcttctgctagattttgaactctggaggactggtctcatatcttattaattataatggtggcgcacagcacattataggtatttattactaagtggttgggtttaatatcttaagaagcagaaaatgtggtttttcttgagagagagatggttttggatgttgttcctctagtatattctaagcctgcccgcctggggctctgtaactatggctcctaacgtggggagcccacaatctagctatatcatgttagcgagagctctttgtatactgaaacaataaacttaccatcttgatgagttttacatgtagaatggcttaggttataaggtactgccacctcattccactgttgagaattgtctaatgcaaagctcactttttaaacatggataattggacagtcatgagtggatcatcgaagggataagcaaaatatatgtcaaactgagaattaatatctatcaaaacacttgctattatttggtagatgggagattattttatttttaagaagtagattggctgaatggaaaagcaaaatgtggcataaaataaaatgggatattgttcagcagtgaaaggaataaagtactgatatggactacaacatggatgaaccttgaaaacattatggcaaagtgaaagaagccagttacaaggccgggcaccatggctcatgcttgtaatctcagcactttgggagaccgaggtgggtgaatcacttgaggtcaggagttcgagaccagtctggacaacatggtgaaacccccgtctctactaaaaatacaaaaatcagttgggcgtagtagtgtgtgcctgtaatcccagctactcaggatggtgaggcaggagaatggcttgaacccgggaggtggaggttgcagtgagccgagatctgccctccagcctgggtgacagagccaaactctgtcaaaaaaaaaaaaaaaaaaaaaaaaaagccagttatgaaagaccacatattatatgattccatttatgtgaaaagcccacaataggcaaatctatagagtctgtagcgatagaaagtagtggttgccggcagggttggggtagaggataggtagtgattgctaataactgtgagtttctttttgggatgctgaaaatgctctttatatggtggtgatgattgcacaacactgtgaaatactaaaaacagaaccgtaaactttaaatgggtgaattgtatgtaaattatatctcaataaacctgttttaaaaagtggatttccctttaatctattctctgaggattgcttcagggattcaaaatagtgcatagtgccaagttttaaactcatattgatttgtttttggtaaataagtcatgcatgcttaacaatggtgaacacacttaaggaaaaagtggtaacacaactagagccaccaaaccgaagcaagtatatttccacctaacttcatgcacgtttttttctcagaagctttaaaaatttatactttctcaaatgttgattaatgagatatctgataagaaataacagggtactgacagtcctgattgtataaataggcattagggattgtgttcatggtttgcttgtcagcacaagagaaatgtgtgattatgttgaatgatagttaattttcttatccacccattttaaaaataaagatgtacagctagaaaacaggtgcccagggaatagaggagacctgcagctttgataatgagccccagaaagaaactagaaggaacaagctcccgcttaggaggtgccgttcgagtcctggccagtgtctgactgtagctgatgggtttagagaactgtggctggcttctcacaaaggattttttcatttactcttgttttgtgtttgagtatagacagcttttcccatcctccatcagggtcattgtcccaccttctctgactcacttattgtgtcaacagaattaaaagagcagccggtggacgtgtgtagaggctgaaggagagctgtgttgctagctttgtatttgaacggttcgtacacaaacagttttctttgattaagtatccggtgaaaccaattcacatgaactccaattaaactttaatgaacaagtgggtgtattaatatcagctgagtaatgcaggcagcacagattccagtaagtgactcacttctctgagcagctcattccccatgcacggttagagttactagaaagcttccagctatatttgagtggatctggtctgggccttgtaattctaacaatcctcagggctcgctattcatctagtgacaaaaccacagtcatccagacctctgttttcagagcaaagattggggatgaagagttttgttcacattgagcaattaggcccttcgttgagcagtgaccatttggacttttattttcctcatcttcccatttttgtttttttgttattttattttttagagacagggtctcactctgtagcccaggctggagtgcagtggtgtgatcacagctcactgcagcctcagcctcttgggctcaagcaatcctcccgcctcagcctcccgagtaacctggaacaacaggcatgcaccactgtgcccacctacaaaatttctgtagagatggggtcttgctatgtcgcccagcttggtgttgaactcctgagctgaagtgagcctcagcctcccaaagcgcttggattatagatatgagccccgtgcccagcctttattttgtttttaagtgagaattatttttttcttaaacccaggggcagtgtaggtgaaggttaaggcagtgaagatagaacagtcagttttgaaatgcacatagccttcctgagcctcactttcaccacatctgccagtctgcctcaagtctttaagtttccctacaccagaggcagcaaggtgtgcctggaatgatgaattcctttgagcacagaccctgttccatctagagactgatgactgtacctatttcctaggaaaggttaagcaagatcgtgaatataatgctcttcgtttcatgccggcacataataagttcccactaaatgtttaacttggtccactgggggaaggatgagaaggaggatttggagataaatgagacttggcccttgacaattcaggagcttggagtcttatagagatttgacttaaaaatgtctgtgtaactccagagtgataaagacaaaaatgcttgaaaaagataagtgaggattcgggggatggaggaatcccagaggttggccccgtctgagaaggctggaggttagggtaggaagaggtaagggtttgggaaggtagttctaggctgactgaagagtgtgagcaaaagcagaggcagggatgtatccaggtatcagatagtgcacatttagtgtggttacagtaggtgataatttaggaggctgattgaaactgaatttagcctctgccttagtcaccaagtcctttcccagctccacttgctgttctctctctcattctctcctacctatattgaaaccagttgaaaataatggagtcacacagaggcagatggcaataatgtccaggttgtggaacattagctcattgggcttgctaatgcagcacccatgaatgaaatttaccctcttcctctcagatagctcctgcactcaataactcccatttagggcacactgtgcataaagctcccaaccatgaagagcagggaggatctgcctctaacagtcaggtaactcacaaagactggaaggaagtgactgggttacacatggccagtttcttctccaaactcaataattgggtaactctctgcctcctcatctgagaacaagggagtgggagggaggcaaacaagaaaagagaagaagcagtggagaaaggagacgttctgcagtgccaggcttcttgccccacactcttcccaaatgtcaacatagttcctttaggggaaaaaagtgggaggctagaatggtaggacagggccacaatatggaagtgaaaaaccaggggcagtttcctgagcagggaatgatgtcattcgatctataattcagtctggttaatctacttatgcaacaccaattgaaggacacacttagataactcagccttgagtcaacaaatcttgtgtaacactgccaaggtccatagtgcaagaatcagcccccacttcggaaataacaaccacccctcagtgccaaattttggacattgcttgtaaatttcagactccttccctccaagatactgttttagagaatgtcgtagggtaaaaaattccaaggggtaaagacataaattccgtaatactacaatagatgggaggctctaatcaagtagataaattctatttttggaattgtgaataaagcagaaaagattcttggaaatcaggaattgaatagattgatggtacaaatgagagactatatgttgcttaaagaaaacaaaagattgcctatcaggttttaaaatgtgagtcagtagtttatatagtgattcaagctgaacagctatcttggttattaactaaaatcttttctttccccttccattttatatatgaagaaactattaatacaaaagtcattatcaaaggacactggggctaggtttcattacccagcttaatccttaatttcatattgagcatttcatattgaagtgaaacaataaggatatgtttctagagactgatgagacaactgaattggacttggttttgacattcaaagggatcaggtagaggtacttagttgagctcactacttcattttggcaaaagacatatgtcatagaaatgtagtagccatgatggattatgtatctttgaattgggagcctatgacaaattttctccaatgggaagtttcttcagagcctatcattgtttcaacaataattaaagtaatttacagagaatgtgctcatctacttttacctactgttatcttttttccaagttaataaactgaatatattgtatagattggttgatagccttcctgaaatgaacatcctttgcaaacctatctctccaaacccaaatcctgcccaaatttcccaattgtggtagcaagcccaatgagctcctgatacgatcctaataggatcctcttctctggaaatcctcgacagatcacacttctcttttcttgggaacagctttctgtttccttgtccagaatggatgccgttctgttatcctggtcactctctgggccccctccctttgtccaccatgagcacaggctactggccactgatcctcctgggggcactagcctggctaccccattgcttattttacctttgcttctcttaaataccattgttggtgattgctccacacagcaattgttctcacctaagtctgtggataagactcacttagggaggttttaccagaattcagctcatctccctaaatgtttgggtctggactagggcacacacttctcgtgaggcgcttctcatgagtaccccttctcaaactttacgggtatcaatttacttatggcctgcagtgcataaagtgaaagctttctgaaaagacatttaatccatcggtatgaggatgaaaaagacacactcagggcatgaaaagagtgagaaggtcacaaaaagggtgtggtctcagctggagaggaagctgaacaatcctataaaggaacaaaagctcagnnnnnnnnnnnnnnnnnnnnnnnnnnncagcgtcctgaccatctgtttctttctaccccaggcccattcccatcatgagtatttattctgcccagtgtgggatgggttctgttctagaagtttgcatgagcagagggaagcttagccccatgaggccagtcatgaggctccatcttattctataggcttcagcctttttatgaagacctagcttctactcttgccccaggccctaagcaggcccagacttttcccatatacacacactctctctctaacttatctgtcttacatcttaataaggcagcagattgtatcagaatcagttaactctttatcaaaaaacccagagcagacagacgggtgaacttgctcatgggctgagctagaagggaggccacttttccttcacacagcctcggactctccctgggcttttttgtgtgtgctgcgtggagactgtgttctaacatttcagtcatatcttccttattttaaaactacagaattgatcttaccaacttactggggagcacgtcgtcagtaaattctaatggaaaaacctgtctgatcaatgggacaggaaagcgtcacagcaataccggtgagtcattccaagaccaggcacatttgagctgtgttgcttcttcgatgctgactataattctccctcagcattacgtcgtcttaagcagcttttgaatcttcgtctctgattccctttctaggtcagactgtgtctttttttaaaattgtgcctggatatccccttaataggttggacaagtcccattaggataattggctgtatgaatatgcgaaaatagcaacagtgaattttaaagttcttgaatagtctccccgtcccactgtgaggtgaggcatctggggtgggctatctgttttttgattcttggttcttgtttttaaaaaaataggatgttggaccttgggatgagagggaagtaaaacagttttggaacccttttagaaagcaaactaagacaaaactcctttcttgagaaaaatggatggacattgtaaagaagacagtagggcaccaggaagccttgagccaggtctgcctgtgtcacatttcgagttatgagcttcaccgctctgctgtctgtctctggagatcatcatcaaacccctttctctgagttgttgaatggctcagatgagttaatgcctatgaaagtactctgtaaacagaaaaataccttcctatttgtaatctcaacaaagggacttttatcatccctaaaacagaacagacatttctttttcaattatgaaagttacatagactctttttaaaaagttaaatgcacaaaagtatgatgaaaattaaaataaccctaatgagtccatcatccagggacatcattgttctaatttaaacatttgggtaatctgttctctttttttaagaagggttgtgtgtgtttattttttttctttttttgtgtgtgtttgtgtatatctatgtgtatttttattctgttttctttacataacactgtattgtaaacattcccaaaatgtaaattttaatcattgcataatattgcattatctgatatatgcacatgcattttgagattttgtgacgaacgattgtgactattgtttccataattaagggttagctgcttaccaagaaaggaacttactttaaaacatggcaggcacacttggccattttttttttttttttttttttggcagtaaaggaatttgaagtatccagttttttaaataaattaatatgtattgaattggagtttagcagtacttttagttaagatctcagttaaggtaaaaaggtcagacctgtagagttattaatttgtagaaaattctgactacagcaaaacatattagcccaagttctctttattaataaaacattagttacagaaatactaaaaaatagattggttggtctcctgaatgtcctgcgttaggtaagttgccttatgccatctggaagactttttattttctcttcatagaaggatacaatagatttgttttgctcaaagagttcattttctgttgctgggcacatatataatactgtaaacacatttctggatatgacgacataatgatgaagagagacctttgaatattttcttaaatgaagattgaaggagtagtaagctgtgagaggagatttttctactatttcagtcctaagattgatcttttttgtcatggatttatccctttgtctctatgcatttctatgtgtctgctcagcatcttatcttctacatttgccctagttccatccttccttttttccatgcttgtttttccatacacctgcccatccaccctcctgcctctctatccagtcgtccgtctaaccatttctggcaattcttacctccctgtttcatgtatatctctccatttttacctgtcatttatatttatctatttgcctatccatatctacacctgcttgtctgctcactgtctatctataaagttaatggagatgattttgatgaaaacttatgaatttctttattgcattttacactgtgggttacaggggccaaaggccatggggaccagaaagtggaaataaccagagctcggccatttttgtttcatttcaaaatcaggagggaaggtcagaactaacctgattatcctttctgtgatgctaatcaggatgttcttagtataatgccttttggagactgttattttaaggaatgttttgctaagaatcagttgccaggacatagaatgaagagctattgtatagcttcagagtagttctcttttaagaaggatataataaattaaaaataattttcttgaggtcagactaaggaaaagtcaaagatatacaattgccatctctccaaatttattgattttatttatttattatttattattattattatttgagacagagtctcactttgttacccaggctggagtgcagtggcacgatcataattcactgcagcctcaatgtcctggagtcactgaagcctctcaagtaccttggactacagttgtgtgccacaatgcccagctaattttttttgtactttttttaaagacagtattttgccatgttgcccaggctggtgttgaactcccgggctcaaactatctgcttgccttggcctcccaaagtgctgggattataagtgttagccactgtacccagcccaatttactgacttaaaaaaaaagaaaaaaaaaacaacaacccagaacatattgtaacattctcagggagtttagagacaacataatgaaggtattttcaaggtttggggagnnnnnnnnnnnnnnnnnnnnnnnnnnnnnnnnnnnnnnnnnnnnnnnnnnnnnnnnnnnnnnnnnnnnnnnnnnnnnnnnnnnnnnnnnnnnnnnnnnnnnnnnnnnnnnnnnnnnnnnnnnnnnnnnnnnnnnnnnnnnnnnnttttcaaggtttggggagctgcttggaacttgattttggacaaaatggaaggaaaacaaccatcctttactgaaaaccatttttcttctgattctgagaaagctgctttgcatttactctctcgtttaattctcccatccttccttcaatgtaatttctattatcccaatttataactaagaaacagagactcaaagaggctaaatgatttgcctaagtttacatgattaatgagtgccacagtttttgtggaacagagacttgtttgaatctaaaactgttactctttgcagtaaaccacaatgaaaccttagctatatatcagttctccactttaaattttatggtaactcaacctctgaaaaggatcctgcaaatagcacagttttcagttcttttcttgagagaaggcagggctttcatatggacatgataaagaagacagctcttaggatgtggatataagattgcatttatgaactttactttagtatttgacagaatggggttttcctcacatgctgctgtgtgtttttgtttaacctaatctgagtctcattaggcagcttgatccagaagacagaaaggtctcctccacaagatgcaccttatgaagcaaacaaaccaatgaaatgcagtaactcccttcaaacttttgtaagctctggaaagccagaaaagacagctattgtaatatattttgccaggccagctgttatcatcacaaacaagcctgaaatagcaatgacttttgaaatcacagcacatttatttacttcttaacttttccataggtttgaaagcttgctccctccctttttatcatgctaaactgtagttgctaacaacattctattctgggtgggaattagctttggcataattaagaatggagatgggggtggataaaagaggttctgccaaaggacttgtcttatatgattttattcttacttttaatctgttttattctttaagcatgtattaactgcctactacgtactcaacactgtgctatgtgggaaaaatatactagaacaagggatggtcaactttttctgtaaagggacagatggtacacagcttagatttgtggtccataaggtgtctgttgtagctactcactctgctcttagataatacacgaaacactcaagactccaccataaacaatacataaataattgcgtgtgaatatgttccaataaacttttattcacaaaaacatgcagtaggctggatttggtctgcgtgccacaggttgccagcacctgtactaaaatgtccctgaaaatagagaactttgttttgttcattggctgtgtcaccagtgcctagagtagtacctggcatgggataggtgaccagtaaatatttgttgaatgaatgaacttataaatgaatgaatgactcagactccttctctgatctcttctatacttaaagagagtacaaagaactgtgggaggtaaaaggtactttcctggaagagagagtgtggagggtcatggaatcagttggtatttgagctggaccctgaagaataggtaagtatatgtcaccagcggtggtaggagaagcacactgcaggtaggagaaacatgcaaataggataagaagcagggcacttatggtgaataatgaggagatcagatgttttataacaggagtttcctgacttgcttgatcttcaaaatcacctgttattaaaaataggttcccagtaccctccctggagattctgattttgtaagacagggttggccaatgataatttacaaaataaatatttgaaaaggtgtatggctttggaaagttatactggaaccatttctaatgggaaataaagttctcacttttcttagtaaaaggactagtatcaactagtaattgctggacctataattaccctataccttctgtgccatagaatggaggaagtgccctggcggaaatctaccctacttaactgcctgtcttcatacgtcccctgttgatgttgtaggagtaccccagcctttatgatggaacagtgtgtaatttagtcagtaaattgtagtcatataaattataataaatgtatcaaatttgtagctactagctttgttgcttttgaatttctgggttggcaaacctctcagagggcaaatagatttaaatggcgtaatagaaaatttgcattctcttgctgtacctccaattcagagtgtagtgtaatgcccagatttgtttgtagactaagatcactggaagggctgtatagtttaagcctcttttttaataatggggggaaatctgaagcctaaaaggtgggcagggacttgctcaagttctgtcaccaaattattttggcagaaccaggagtataatgcgaatgttaagttactaaatttagttttcttttcatggtgccatgccacatgtatcaataaagttcctaatttacatactttctctcccctttaaatctcatagctttttgctcatatacctcttgtgtactgcttaccataaagttatatcttaatatcttatcctgaacgagtagcccactgttatcccaaataaaggctgagctctgtttccctggagagcttaacatatttcctggcacttagcatgtgttcagcaaataattgtagacttgaaatatcttgagcatcttttcttttcccatgtgttttgactcaagttcctttgcagttatattgtcagaaaagtcaagctcttccagaattgctgaaatacaaagataatttctcttaagcttccttaaaaaagttgaattccctattatggctgagacctttcttaacagctcttctgatagttaaatgtcagttgcttcaaaaaagaaatgtcattaaattatcagggaaataaattacatatttatttgggctgaaatattttaattgaccacttaaaataaagataatagcaaaagactgatacatttcctagcttgcacatttctctcaattgccaggacttttttgtttatatctcttaggagatttcatttttatttcttctgcattatggttatatatgtgcttttgactctcccagtgggtgataagttctttgaagtcaatgtacttaaaaaaattaatctctatatacccacaaagcctagctctgtaggagctaaatactaaatatatttactttaaaaaaattgttaggaaaaggtcagtgttaccttgatttcagtgttattttgcagccctcaagtcaacaaccattttactgaacatccagctttgtgcctttctgtgagcttaacattggtagcaggtgtggattgggacataaaaaagtaaataaaacatagttaagttgacataacccataagtataatgtgatgtggaaatctgagataggtacaaataacctgtactagaatctggaggcaggttaattctgacaaggtgagtccagagaggctcacaaagtgtcaatatttgagatgagttttactgggtcttggtcttctatttcagttgctggttttgatttttctcaacgcaacacacacacaaacacacagatacacacacacacgcaaagtgatttgttttctttttataatctctttgactatagacttaagagaactgcctttatgtaagattaaaggaaaagaggagcaggttttattgtgttatttgaaggtttttcagagtctgaaacacacagcgaccgaaagtatttgggatggatgatgccagtagtgtcatgaaacaaagtacgttggccagagagagacatatactattgtaaattaacggtgttcttttccaaggattttctcgtttacctgttgttgtcttcaatagtttaattacactaaatattctcgttggtgcggggagcatagtatggtggaggaagtttcaactttgaagtcagacagttctgtttctgtacctaacttttcacttattgtatatgtgactgaaggctgttgcttatcctctctagggttgtttcttcatccttgaaaaatgttgtgttttctttttcttttcttttattttttttgagacgtagtctcactctttcacctaggttggagtgcagtggcgtgatctcggtttactgcaacctgtgcctcctgagttcaagcgattctcctgcctcagcctcccaagtagctgggattgcaggcgtgcaccaccatgtccagctaatttttttttttttttgtatttttagtagagacggggtttcaccatgttggtcaggctgggcttgaactcctgacctcaaatgatccacccaccatgccctcccaaagtgttgggattacaggtgtgagccaccgtgcctggcctgaaaattgtgatcatggaaagtacctcacagaattgtgggatgaatggagctaatgtttgcaaagctcctatttcagtgtccaggatatgttaggccatatgcctacagagtcaggcacattttcttgaaacacaaagccctttatctagcttaacctcttcccactttagagtcgtgggtgcaggaaatattttgttttcctctttaccgtaaggaaagtaacagtgctagtgtgttgttgaaatgccatgctctgggcatgtgtttggggagagagatgcagtgcgtggtggggaatgggaggtgctcaagagggcatcctctctgaaaggggtgacagccgcttggcgctagctaattattgccacgtggagatgcatcattgccagatttttatgtaaactctttggtttttaaaatgttggcagctcattcaagtatttttaaagcactatgagagatacttcctcatggaagaagaaaaatgcaacttacaatcttactcagtagcatcaactttggctcaaaacaacaacaaagcacgttgtaagtccacactgcaaatggcaaacagaacccgtctaaggaccagatttggcctgcagccctcaatttgcatcttctgtgcatatttttaactggtagagataacagtaaatgatggcaaaacttactgagtcctttgcatgtgctagaaactttgctatactttgcatatatcattcaattctcacaataacccaaagaggtgtctattactattattatcccattttacagacgtgagcattgaggctcaaggaaatgaagtatctttcctgaggtcacacagatgaaatgtgacaggtagctttgaaaccaaagcctgttctcttttaaaatcatacataccagtggatctcagtcctggtggtatgttagaatgattggcgtgcccttaaaaacagtgttgtccaaagtccacccccaagctcattaaatcagaatatctgtgggtgggactcagacgtggctgttttttcgaaagcctcaaatcaatgattagaaatagctgtaagatagataaaatttgtgcctccacatctggcactacctatctcctgtactctattttatttttgagtatttattgttctctgaaaattatgtgcatctttacctgtttatgaattttctacttttaccacactgggatgtaagctccgtgagcgccaggatttagtctttttaagttgtttgttgtatccccacctaggtcagtgcctggcacataatagatgctcagtaagtatttacttgaatgaataactggttcttcatcacagggagcttacactctagtgagggagatagataatacattcttagtcctatgagataagctcataactgggatgttcaatatgactttattaacacagggaatacagctgattatctcttagacattgttaggataaattgtttctatacgtattgaatggactgtggggcatttttggtcacctgcactactacactggatccattctgtgctctgggctgtaagtgtgtgtgtgtgtctgtgcgtgtgtgtaatttcgggaacgggtaacacattcgtattacctctgtttggacacgatttttagtgacagagctaggaataacaggtggaaccttctaagttttgttgcttaaatatcaggccccctcagaattcaggactgatggtagaggatttaccagtttacagggaattcagatattctcttctctttctaggaaagccaaattgttggtcattctgcccccaacatttacagaagcagtttctcggttttatttatccaagattcttatgatgaatagtgttaatatcgcagcacactatgggctgtgatatgcctatatcacagagaaggcaagctgtggtgaagtggaataaatgaaaaactgtctataactctgcttctagatgccccacttaagcaagtaaatgggaatgtgagtgacaatatcatagggataaccttgaaagagtgctagtttttaaacaaaaacaaatcatttggaacgttaggatttaaacagttactgataataaattgcttgtgacacatctgaaaattgatggatcatagtgatagtgaaaatatttaacaactgctatggcccaggcaccgaacaatcgaaaccaactccagtgtaaacagtggtgccatcaagtatgcgctggttgtcagccttgctggtggagtcattgtgtcacgatgaagcaactaagagccagtgctgcacaaagtgttgagagaaacaaacaaaatccagggtgctccccttatgcggagtagagagtagatagagccttgtttcagaacgataaaacttcggtcaaggacttgatcttcccacttattgctgggggctccagggcaaatcatttgttctttctgagcctgagttgttgtttcttcttgttcttcttgttcttgttcttgttctcgttctcgttctccttctcctactccttctccttcttcttcgtcttcttcttcttctctcctcctcctcctccttctcccttctcccttctcctttctccttctcctcctccctctcccttctcccttctcctttctccttctcctcctccctcctctccttctccttcttctttttcttcttcttcttttttttttttttttttgatatggagtctcactctgttgcccaggctggagtgtagtggtgcaatccctgctcctgcatcctctgcctcccaggttcaagcgattctcctgccttagcctcctcagtatctgggattatagacgtgcatgaccatgctcagctaatttttgtatttttagcagagatggggtttcaccatattggccaggctggtcttgaactcctgacctcaggtgatccacctgccttgccctcccaaagtgctgggattacagtcatgagccaccgcacctgtccagagcctgcgtttcttctaatatacagtggaggagagtaatttttgcattacctactttgcaggctctggagttagattgagcgcacctgaagctaaggttaaagatgatggctatgggcatgatgacagtaattgttcttctctggttggggactgattgatgatccctgatttctctgtttaaacgttgcccaaaacaaaggttgagaggtccttaggggagaggcgagataagcagaggtaggacttgcctttcttctgtgcttctccagaattagttgtgtcctgtggcatccacagacaaaaattgagcaatctccttcatagttgagttgagattgtataattcgataaaataggtttaaatagccttatgcctgtataatattcatgaaaagtgtcatgagtgaggtggcttgcttgttttgaaaatgggctgattttgacaaaggggaaaaatcgggattcatttactgtaagttgaaagtaagaaacaacaaagttgaatattagaagaacttggctatcgcaaaaaccacatactttcacatcagtaaaacatggagttctgatctgagtgaaatgtgaaacttcttgcagaccacagagagtaaaaaggagtacttttgtttcattattaataccattgtccttatttctttaaatgagaattgataatacccataacagaatctttcacacaggccaaaaacaggaaaggataaattaaacaaaacaaacaaacacccaaaacctcaccaccaccaccatgactgccaacaaaacccagtgctgtgaggatgcatcagctttaagatctctttaagtcattgtgttctagagaaaggggttctttatttgtttctatcaggatagagtgagtttttgttaaagttgtctttcttttttttttttttttcttcttctggaagactgacgaagttggccttttgggatattacaagaaagataactttgtcttctaatgtctgcagtgatatgaggcaggtgactgtgtgtattctgtggtgatccatgttcacaaggagagacaggccaaggatgcccggttgatgagtgcgctataggtgcttgggagtgagaaggcaagaaagcaaagtgaacttaaaaaatagctagccagtggaattgagggagaaatgctcattctttgctgacacatgaaataattgttgagggagagttgctcaatctttgcctacacattgaaataattgtgttgaagagtctatgaaaagggggtcaatagatttgagttttcatcactttggccaccacctaattatagatggcctccactgtgaaatatgtgagttgaaatagatttttttaaaattcattttctggactggcatttagaatttgagtttattcaatccttgcttcttgggcagttagggtgtcaatggcaataggaagggtagctgaggccagagtggtgggggtagatgttgggtggaatgtgtgtggttgagcagagcattattattattgctattattattttttaaaagaatccttatagtaaagagagccaacattgattgaatatatgttccttgccagaacttgggctaagtgctttattataagttatcttatttaattttcacagagacctgttgaagtgtaagttttagctttctgtttcacagctgtggaaactgaggtgctgaaaggatgaagaacttccaaaaagtcgaagatattaagcagctgtattagtcttcagatcctgatatctttctcatagttattctgatatgccgtattaagttgcagaattgaggccgggtgcagtggccccaatttttattttttagttattcttattttctaattattttatatgctctctctctctctctctctgtctactgtcaaatcccggcactatgggagtctgcagtgggaggatctcttgatgccaggagtttgagaccagactgggcaacatagtgagaccccatttctacaaaaaaatgaaataaaacaattagttggtcatgatggtgtacacctgtagtcctagctactcaggaggctgaggcaggaacattgcttgagagttcaaggctgcagtgagctatgattgtgctgctatactccagcttggataatggagcgagaccctatctctaaactaaactaaactaaactaaactaaactaaactaaactaaactaaactaaactaaaagtaagataaaataaacttacggagttggaacattgcaggctatctatctggcttccctgccctgaattcatcgttctctttgatgtgctattgtccaacatttctttttttttctgtttttttctgttttctgtcttgctgtcacccaggcttgagtgcagtggcctgatgttggctcactgcaacctccatgtcccgaattcaagcgattctcctgcctcagccttctgagtagctgggattacaggcacccgctgctatgcccggctaatttttgtatttttagtagagacagagtttcaccatattggccaggctggtctcgaactcctgagctcagatgattctcctgcctcgacttcccaaagtgctgggattacaggtgtgagccaccgcaccaggcctttccaacatttctttaaagaaactaaaaattaatttgaataagtaacacaaaaatatagtttaaactatagtataaaattcaaaactatgcaatgacaagtacatctttattttatctctttacttctcccacccagaggaaagtataagttctttatatatccttttagaaataaactgggtataaataagcatgtgtatacacacacacacagaaacacacacaaacacacacagatatgtatttatattccagtgtatataaatacatttatatacatgccatttatatacacatttgcatttctgttattagcgactctaaacaccatttgaaatgagccgtacccatttgtaattccgttttctgaactgtccttcacttccttttccattggattgctgaatttttgcttattgatttattacagttaagaaaattaacttgtagtctgtgacaggaattgtaatgctttaccattttgcatttcttttttaacttgcagattaaaataaaaagttttatatagttaatccttttttgattttatgtttctttgattttgtgtgatgcctagaaatgccttccccactttgtgatatttaaaaagaaatttccaatttttcttctagttatttcttctgctctttctcaaatctttgaaccattgaaattttattttggtaaaaaatgtgaggttaggatttattttgatatttttctggatctgcatttctaaacactgtttattgaggagtccatctctttcacactgatttgaaaagctacctttattgtatattaaatttcttaatacttaagtatttaatacttaagaacaccgtggaatactatgcagccataataaaggatgagttcatgtcctttgtagggacatggatgaacctggaaaccatcattctcagcaaactatcgcaaggacagaaaaccaaagaccgcatgttcttactcacaggtggggaattgaannnnnnnnnnnnnnnnnnnnatgttcttactcacaggtgggaaattgaaccaatgagaatgcttggacacaggaaaagggaacatcacacactggggcctgtcatggggttgggggacgggggagggatagcattaggagatatacctaatgtaaatgacgagttaatgggtgcagcaaaccaacatggcacatgtatacatatgtaacaaatctgcacgttgtgcacatgtaccccagaacttaaaatattaaaaaaaagaaaaaaaaagaatttgcatctatttttagactttctgttctattcatctgtcacttcatgtgtcattattatgctttcaattattgtagctttataatatgttttattatctgacaaagattccccattcctattagtttctctttttcagaaaatttctggcttttaatgcctgtttatttttcattgacctttataatgaacctatctagttctggctgggcgtggtggctcacgcctgtaatcccagcacttcgggtggctgaggtgggcagatcacttgaggtcagaagttcaagaccagcctggccaacatggtgaaaccctatctactaagaatacaaaaattagccaagtgtggtggcgggcacctgtagtcccagctactcgggaggctgaggcaggagaatcgcttgaactgggaggtggaggttgcagtgagccaagatcccgccactgcactccagcctgggtgacagagtgagactccgtctcaaaaaaaaaaaaaagaaaataaaataatataaaaaagttctgttgatatacttatgaggtttgctgggtttatttgttagcattacatgctatacattgtaaaaatgttgattctttttcttggaatactaatgcctttccatttgttgaaaccttctttgatgttccnnnnnnnnnnnnnnnnnnnnnnnnnnnnnnnnnnnnnnnnnnnnnnnnnnnnnnnnnnnnnnnnnnnnnnnnnnnnnnnnnnnnnnnnnnnnnnnnnnnnnnnnnnnnnnnnnnnnnnnnnnnnnnnnnnnnnnnnnnnnnnnnnnnnnnnnnnnnnnnnnnnnnnnnnnnnnnnnnnnnnnnnnnnnnnnnnnnnnnnnnnnnnnnnnnnnnnnnnnnnnnnnnnnnnnnnnnnnnnnnnnnnnnnnnnnnnnnnnnnnnnnnnnnnnnnnnnnnnnnnnnnnnnnnnnnnnnnnnnnnnnnnnnnnnnnnnnnnnnnnnnnnnnnnnnnnatgggaatgctcataatgttccctgttactagtgacattggctttcgatttgagaaatgtattgtgttgaaaagtatccacacttattttgatagtgttgttattgttgttgttttaattgagactggttgttaaaaggttatctagcttttttttttaaagaaactttgaaagtaatcatatattctaaaaaaattttatgtttttctcttttgtcctgtaaatttgctgtaatatatgaataaaattttcaaatatgaaatcttgttagtattcttgctaaaataattatcaacttgttcattgtttctgtattatatatttttagtgttgctagatcctagagatcattaatatattaatgatctgtgcttcaattttcataagtgagattatttgaaaattctgtgtgtgtgtgtgtgtgatcgagaccatcctgaccaaaatagtgaaatctcgtctctaatgaaaatacaaaaattagctgggcatggtgtcatgcgcctgtaatcccagctactcgggaggctgaggcaggaggatcgcttgaacccgggaggcagagtttgcagtgagtgagattgcgcccctgactccagcctggcgacagagagagactccatctcaaaataaacaaacaaacaaacaaggaagcctttcttttttctttattttgaaatagtttgataacatttacatgggttatttctttaaaatatggtagaattcccttgtgaaaataccttcacttattgccttttttggagtgaagaacggagtgaagaaagttatttctttaaaatatggtagaattcccttgtgaaaataccttcacttattgccttttttggagtgaagaatgtgtttgctctttaaaattttttacattttttttctgtagtaattggactaattagcttttatatctattctgtgattacctttgttaaattatagtttttttagggaagtcacctatttcaaattcatttgcatggtgtaaaataatttctcatgattattttcatttcctctgtatttatggttatatttcacattattatttaaagttttatggatttctgctatgtgtatccatctttctggctaaagcatcagagtttaatttattatttatttaaaaaatagcttttgcatttatgtgttggctctaccactttgtaattctttattttctctttaaaatcttcaataataccttctactttttctaggtttattttgttgtttttctcattgtttgaacttggctcttaatttccatatttttatttctgcttttttattcatataaataagatataaattttcctgtaagagatgcttatttgtatgccttaagttttgctaaatagtgtttttaatcttattttttagttatttgactatgcacaggttcttaaaatcccagacccattagaatgtaagctttgtagggacaggaaccttgtctgtttatttattttgggtctaccgttgtgcctgtcatatatttcttaagcacttgctaatgtgcttaagaaatgcttttgtgtgaataaataaatctccagggaattatggaatttgtggctgattcagtcctgtaactctagttcgtttctgcctcatttggatattctctctaggtatctactaatgtgtaggaataagaacatattagacatgcttcaaattacctttttaggtcatgatattaatagatttattttaaaagtctacatagtttttctcaaatcaagtatacctgggtaaaaatgtctttctaaagattagcctgtctgggcgcggtggcttacgcctataatcccagcactttgggaggccgaggcaggcagatcacctgaggtcaggagtttaagaccagcttggccaacatggtgaaacctgatctctactaaaaaaatacaaaaaaaccagccaggcatggtggcaggcacctgtaatcccagctactccggaggctgaggtaggagaatcatttgaactcaggaggcggaggttgcagtgagccaggatcgtgccattgcactccagcctggacgaaaagagtgaaactctgtctcaaaaaaacaaaacaaaacaaaaaaaagattagcccaatctatttctagctacttgggagattgaggcaggaggatcacttgagcctagaagtttgaggttacagtgtgctatgatcatgctacttcactccagcctgggtgactgaccaagaccctactggaagaaaaaaaaaataagaattgctcaagaaaaaatacagttgagtagaattagaatgctagcagtgttgcaatagcagagatcacatgatgcccatgatgtttgtgaccttggacactttaggctaaattttgcacagaagcccaagtccaggatagaaatgataacgatgaacctgctgtagtgcagggaaagatgcagagctgggggggagcccaaacccctactgatggccactttttcttctgacctcttcctatgtctcatttaaaaaccagtagctttacttcgaaaactcaattttcagatgagaatcaaaacaaaaatgcaaagaaggcaaatgattcataaaagttgctgagtgaattagaactataatgtgggacaaacactccgcctttctgtctctgcagctagtggtatttccaggttcccagggaacctcctgtcccttgctccactgtgcatttttagatggacctgatatttggttacctcccttgacaggcccaacaatccttgctaaggcacagacttgtgtatttgctgatccctgaggggaaagctgtgattcaggctctgaagtctaagaattgcagacttagtttcttgtctcccgatgaaactgctaatctgggtgccaatggtgtttctgctacatggacacctgcccacacagcatgattagaaattataatgatgacgacgatgagtcttccaggacacccacgttctttgcaagatatttctgctaatcgtttctaccagaatcagttggaaaacttttttttttaagttttttttttttctctgtatctaagtcaaccaaaaatgctggtctaattcaggtatagattaaaggtttgtcctcaccattaatggtgtgttattattcatgcagggcatcctagaaccttgggcacatagtgtaatggaaagcacgctgggccagggagatgtggattcaggcttgagcagtgccaaaaattttcgttatggccttggtaaaggtgatttcccatctctgtgactttgtgtctccttctgttaaatgggcattcaaatcttttgtacctaacttattagggccctgataatcaaattagccaataagtaagaaaatgttttcttaaccacactgtaaattaagaggattcatattgaaatcacttttccattattgctgtcttagcctgctaaagttatatttagtgtagtgcaactaagcagggttgtgagagctgggaaggtagactgttgtattgggcagggtcagggcagataaaggaccaaaataatgcctgaaatgctgtattaacctgctctaccttgaactgctgtcttgaattggggggaaaaaatgaagctctgaggggatggtgcacagggagaaaagagagaatctcaggaattgaaagtctcaatggagaagaggtgggagaagaataggaggctagagtgagggcatgtgatcgtggagtaccgatctggagacaagagaagaaagtagaaaaatgccagcactgtctttggaccctgtgtatctggagtgtgggaggacaggcagacacaaatagagaggctctagggaaaacagcattctcatagaagatccttctccacaaaaagccctccaaatgtcctccaggagggtagaagctggttttaaagctcctcagggtcaggaagatccttctcttatttttctttgcatcgtgcagtttaatttagcacagtactttgctcacagcacttaaaaaattattctgggccttgctttttaattttaggcccaaatacctgaaaaaatgttcaggaggaattctgataagaaagagctaacttaggcaattccatttctttttttggttcactgtttcctcatctgaaaagtgttgggctccatgacgtggtttctatgacactcagtacctttgttgaagagaaaacatttttctaaaactaggatttccaaaaaaacaacaacaaaaaaaagaaaaacaaaactcatgaatatgtggatatttttgtgatagtgatgaaggtttgggaatggagtagaatgtttcctaaagtccttttcttttagcagaagacttgagtttgtaaactcggctcatataatttcagcttgcctgtctaccttccttccatctacctacctacctacttacataagtacctacttatatatggagaacacggtggaatttaatttttcttattcttttcgactttggttggcttggtgaatcaagtaaactgtgttgaagaaaaactaacttttgagggaaaaaattgaaaaaaaattatgattcttttttttttttttttgagacggagtctcgctctgtcgcccaggctggagtgcagtggcgcgatctcggctcactgcaagctccgcctcccgggttcacgccattctcctgcctcagcctcccaagtagctgggactacaggcgcccgccactacgcccggctaattttttgtatttttagtagagacggggtttcaccgttttagccgggatggtctcgatctcctgacctcgtgatccgcccgcctcggcctcccgaagtgctgggattacaggcgtgagccaccgcgcccggccaaaaattatgattctttgaaaaggatttttctcaggttagtttatatagtttcacagatgcttgagataaggattagaaagttcagacactgaatctccacagacccctgtgaatgtgttggctaagcaccttgtcttctcaggaacacacactggaacagactttctttcagtaaaacagggccagaatagtctttgaaacatccaacggtggtttgggaagaggattctctatataatgcctgtccaaatacagaataaaaattttcaacaattagcaaaaatgtggatttttcagttaccaattccttatttggcacagttggtctttctcatcttattcattcattcatttatttcattttatttatttacttttaaaatacttgtttaattcacctttcttgctcccattgagccttttaactaatcaaatgcatttgaaatgctattaatttatgataacagtaagacccaagacatcactttatgtaatatcttgtattgtagttcattgttgtcagctctttttctgatggggttttgatttagctggaggcagtttaagggtgttcattccccaataatgtttgtctgttgaagctggtgagctagactaacagtacaaagagttcctgtgtacccttcacccagctttccctgatgttaacatcttatataaccaaagtatgtttaagcaaagaaattatcattggtgtaacatgactaaagaagtgattatatcttttattggcagttttccagtttttccactaatgcctttcgtttttttcctagatctagtttaggatgctgctgtgcatttagtcatcctgtcttctttgtctcctcctgactgtggctatttctcagcctttccctgtttttaggaccttgacacttttttagtgtaacggtcaggtattttgaagaatgagtgtcttgcaacttgagtctgactgatgctttctcatgattaaattggggttttagatttctgggaagaccaccacagaggtgaagtacgcttctcattgcttcatatcacagcgtacatgatgttaatgtgagttattactggtgatgttaattgtgatagtggccagttttgttttattttattttttaatagaagaccagttgtctgggactatacacactccaacacatttgcaaattggtggcaatgattattgactagtcctcaaactactaacttcatgataatggaaagccgaaactcccaaatcacatggacctcaaagttcaattagaaaatttggttaggacctgacgacaatgttgcgatttgctacagcctgccctgcagtctcaactctggggtcccctcagtggtgagctcagtcacagtgctgcttctgtgtatacttacccagtaaacaacccaggcattggggcctgtctcagaaaccacatctccaatagaaaggagaacacttgggaaagcaggaaggagtaagaaacggaactcgcccattcctgacaactaatccttttcctttctaagtatggcttagtggatgtcagccattcactgttcaggacaggatagggatgaggagagaattctttttcatttgacaaggacattgaattttccttatccatggatcaagactagaaggtatggagaggaaaagggcttctcatctctttctttcagtagcttcatgcactgatgcatcgtacttactgaatgttttaccttctctgtgctcttctcagaggatgcacagaggattgggaagaggaagtattggtgacttgatctagaaaaaagagattgtttcaagccacaaaaagtttgagggtaaaatctcaagtcctgtgtgtgatgaatcagtagaaaaggtatcccagtggccagtgtgagtaagctgtcatattttcggtagtaatccttggtcctgtttgattttcctcatcctcacatataagatggagccatttctccctctggcgtttgccatcacagtgtcctgcagtctcttggtcttgagatagaaggttgagagaaacactttgcagtattgggagaactgggtctgcctgtgggagtacttgtatctcaatcaatattacagaacttggctccttgtttccaacaaatgttttgctctgttctcatcctgggagttgaaggttgaggcgaggtgggagatgtgctgtataatatggcagccactaaccacatgtggctgttgagcacttgaaaggtggctagtgccacatgttgaaaaataatattttggatatatttgtaaaataatttttttcaatgagccttttgaaatgtggctactagaaaattttaaatggtgtatgtggctcctatgataattctattggatggtgctggcttagagcctgggaagaacatggatcagagtcaattgaccttgtgttctcccctgagttctaataatattgtcattaaaaggagaagcttcaacagccataattttcattttaaaaagtctaattcagaagaattggctcattttatattattgcttggactggagaaaaatctgacatttggtattttcataattgagaacataacttgctgacttaaaaaaaaaatcacaacattttgtgcttggccttaggtaccagcctttgagctctttgaaaatagggattgggtctttttctctttctaccatcctttttcccccaaaaccacacactaacacgtagaagatggttaactggcatttgttgaaaaccaaaataactttaaatagagaaaactttgtgaagctaccttgtatttatggttggaagagtgaaatacctttataaggcatcccattttcttaagatagccagcaaaaatgaagaacattgatccaagtgtttatttacttattgatttaattaccattctcatcaggtgtccctgtcatctcagcttatgataaggaatcttttcaagatgcttcacctcatcactctctaggtaaagggggacagaaaaggatgctgcttacatatacgaatccccatctttgctcagatattatgtctaagggcctaaggactggataatcttattttttctgtggcttgatcctttccaacatttaatctatggaggttgtgaggataacaatgaaaaggcaagtttaagcttggactgtagatacttttcactgggtggttttattttattatgcttcattgtgaaccagagcctctgtgaacatatgacttataggccctcaggcttccactgtgtccctttccctgattcgtccttcttcactgcatgccctggtgttgggtgagggagcaggctttatgtgatgtcattttctcagagccctgagctgggaaattcaagagtctccatgattcctagttagccatggaagagaccctaactggtccctcaggaacatgtttggttggtcagaggtaactcttatagaatctatgatggcttagtcgttcactcttcctagaaaagacctctttaaaaaggccttttggttatatacggcctgagttttaagtaatatttgcaatgttgattctctggtagaagagaatgaaaagttgtgagtgctcttggaagagtgccggacagctgtagtgatgggaaaagtattggccttggagtcagacctgtgtttacttcctggctctgctattttctagttgtatgactctatgcaagtaacttctcatctctgagcattaatttcttcacctgttcgacatagacaatgtctgcctcacaaagttgtgatatgttaatgtatgtgggatacctatctcaggacccaatacttagtctttataaaacactaaatgaattggttttctcatgtatgtcttatggttttgctggtgatggaccaataatcatcttccatcttcactttagaggtgggggaaaagggcattagagtgattgtgtggtaaaatccactctaattctagctgtgagaaaaagagcagtgaaaatgtggtaagcaagtgcttctaaaaagcttggactaaaagcgcttgatggatttgtgctggcttcccggtagactcatctctgtactgcccgcacagcacaattaattgttgttactagagaaggaacaaataaagaaaagagagagagcagacataaaaacatcctttcatctttctgaagacagtcccctttgtcagatcagtggagctgtacctgtgaatcaccttgggaaagcacagtgtgggtaactagaaggaaggtcttgtggctcattttgtacccacttcctgggctggggaaatatctaaactaacctttcttacttgtcaatatctactaccgttcaccatgcatcttcacagatgagggcctctttctcacatcttcactccaaacacattactgtgtagacagccacttattttctgggaagaaaactttgcaaagcagtagcagaataaagtcgagggtaaacagaggccatggaaaagcactagagtttgagtgcagagacatgagtctgagcatgagcagtgaatagctcatgaaacactcaagttgcattctccttatgtggaaataaaataagtcatggttgttctatgcacgtggcacctgaccttgggtccttattgctatgctgctagagtctatgaatcaagatttgccagttgtgatcttgaaatttagtcagattaaaagggaactctgactttgagggtgaatgccccaagtgggcatcttattctcctatggattcagcttgttaggcagaatggaagtggaggtcatagattttagggttttctcctgggattgaatccagctgaagcaggaatgattctgggtgagctatataacgtctctgagcattagtttgtcattttcttacataggaatagagttattgccagatttggagatagtacatgttgcaatgtggttgacacagaataagctttcaataaatgattggtattgttgttgttgtcgttattatctataactacaataatttccctagccttattttatagggataggttgtggcaacatgaaatgtgacttggaaaactgatttgcactagatagatagaaaccatgtttttctatctatataatgaacaatgtcatttaagaaagcttagaggcaattccaccagcaccatcttcttttttatttccactcctagattatttgccctcaagtctttggtaatttctttttgccacatctcttgaatgtttcttctttactatattccatctattattaccataagtccaacgttcatcacctcctgctccactgttgttcctgtctcctggctctcctagagccttggttctcaaagtgtcattcacagagcagcagcatcacccgaaatgcgtcatctcaagatctaccaagacctcctgaagcatgaggcatgttcacccccgtgttgtaggacctccatataactcatttaactacttctcctgctcagagtacatgcttggccagtgcgtgtttgttctgcctccagaatgttttctgactctgattgctatcattacttcttttgaatctacctaaattcaagttaccatccattgccatgactatggcaatagtctctgaaattgtcttctacttttatggtttccccttgtggcctttttccacaccatctggagagatctaaaattgttggtcagatcatatcacacccctccccttaagccatacggtggctgctgtagtatctgcagaaggtccctgacttatgatggtttgacttacaatttgtccacttcacactgagtttatctgggtgtaaccaaccccatagaaatcaaggagcatctgtagaaatgtttgaaagaccctttcatggcctgcaaagccctgtgagatgactctatgttctctcctttttttttctttctttattttttttgagatggagtctcgctcttgtctcccaggctggagtgcgatggtgcgatctcggctcactgcagcctccaccttctgggttcaagcaattctcctgcctcagcctcccgagtagctgggattacaggcaccagccatcacgctcggctaatttttgtatttttagtagagatgggttttcaccatgttggccaggctggtctcgaactcctgacctcaggtgatccacccgcctcggcctcccaaagtgctggaattacaggtgtgagccactgcgcctggcctctctgcttttttcataccactcatcactttacacagtaatctgtagacacactgaccttcctttagccctctgtataagccaagctttttcccacttgatctttctctgattctgtgcaaaactggcttggaagtatctttcaaggcttagctcaaatgttatagccttacctagctcttccccattctttagctaaagtagcacacatacccccctccccatcattcttctgtcattatcttgctttatagtctacaaagcatgtatggttctctaaaagagtgattaccatgcttttgttttctttatgtacattgcaaactgttttggtgagaaatattttagtaataataataatggtgaagatttagtgagtgtttgctataggctaggcacactgtatggtaaattaaataatttaatagatcatttatttggattatttcattctatttagctgattatatatttatattttttgtgttcctcttgttttaggatatcagcttcttgagagcagggtccatgtttgttgcatctgtatctccgcctgtagaagattctctggcatagggatttttgtgcaggaagtgtttattcaggaactgaatggatctcagaagattatcatttgggaatagatctacatgacaagaaagaacaaagagtctctctcattctttttcccagatatatcccgggagaaaataccctcgactttttcttatctttaatctgagaaggaagcagttgttggaatctgatttaggattggctctagtggccctgtgtgcagacacagatcttgggattcatctgaccatttggggagagaggttcttgaggggcaccttgatgataacgagtctttctaaagctttaagtttggcgtttgaggtggttggaaataccaggtcttccgacttttacgttctttgtgcgcacgctggtgatgtgcgtatgtgaacctttattattatggactcagccagcagtaaccatggtgagtagacctatcacacagcatttttctgagtcagtttaaaatgctgacaattaaatataccgtactcttttaagcaatccatcagtctctcttgttgtcatggtgaccggagtatatttagaaatgtgacaagtacactgagttcaattgcacttttgccaaaacatagttttgcagctaaaattgaatttcctgattgaagatccaagtgctgttaagggggcatgatcgtttctatacattattctggaagtataacttaacgttattctgttaaatccacagttacgagtcttatcaggtattgatagttaaagtggttgtacttaaagttgatgaaataaagtgaaataaaagtgacatgatgctttttctattgaaaatgaaactgggccttactaatataactagtttaatgattagtttctttatatatttataaagacattgtaggtatgtacctgtctgttcttcagaattatatttctaatttaaaattatatatcatggagatcctcccctgtttcctgcttgtattctattcttagtattgtgagggcattcttttttctttgggtctgacctctgtttgataagcattcttatttttcctcaatctcaattcttctggattttaaatgaagtaaagagacacaatgaacgtgactttttgcccaaacaaaggaaaaacgaaactcttctctttattcaagaatgtagattaaattcttactttcttatcatcctctgtcctgtcaacatagtgctgagaatgatgttgtgtatcaactcatttgaccacataaagtttaggaattaatgtagtggctgggtcatgattacaacactgatttcattcctggccaaagactgattcttctgctcttgaggtgagaaaagccagtactcctggatactttcgcttctctatttttatctgactgaatgagtctgcaactgggatagtttatgagcctctaataatatacggttagactaccattatctctttcgtgaacattgccaaaagtgtttttttggtaagagatatcttagttataataacagtttgtaggatttatggagtgtttactacatgctaggcactgtatatagtaagctccttaatggatccttatattggatctacacagaaatcttatgaggtagttcccattgtattcttattttacgttaaagaaacaggtttggagagatactgtcttttgaagaagcatataagtggagcagtagtggagtctgaattctgatacaggtcctagtaaccactgcctgttccatggaaggcacacagtgagtattttttttactgaccagtggcctcttgtatggtgacatcatacagatgtttcagtgtttccagaggctcaagaaagtagcagctatataaagatagacaggtagcagcgtctgaaagtagagatgagctactctttatctttcctagtggtttagagccaaagtagattagtgctagggagagagggaacataagtcctgtctagttcagtggtttcatctctgaactcctttatgttcttaaaaatgagcttttgtttgcatgcattatgtataatgatatttaccatattcaaaaaagtaagaaatgaaactacaattttaatgaaaaatatttgtataaaaaataaatatatttgtgaaaaaatagtgacaaaagtgggagctggattctgcatttaatttgttgtgaaatattgttttgattgatgtttatgaagaaaatccagcctctcacagctatgtatttgaaaaaggaaggataaaaagtaattgtggattttcttctttgatactataccaaaacttgacagttttcacattacctaaagttagtagtttcttataggttagtttcaatgtggaatgtgaaatcatattaatggactttttataccctattatattaaaatccattggtcaaattttcactttgattgagtctcctatgattttgtaaaatcatgcattggtcatttagaaagtcgttggtcactcacttattcagttcttgcaaacactgatcatttcattctataatataaaaagtcatcttcattaatatcactgctcattcatcaaaaaagcatttgaaatattagaaaggtgtcaagtgcacagtagtagatgtaaggttttcaaaattctgatttttacttgaaaacatgaattttatttttggctacaaatactgttgttttccttgaaacgataagctctcttgctttatttttgagaaaatctccggcaaaacccacatttaaagaaccatagttcgtcagtcattgtttcaaataaaaatgatgttccatgaaaaaagcgattggttagcagctgtcaatttaaacagttacacaaagtgcatttcttagagacaatcatcgtagtttgatcttcagcaggtgtttcatggtacttcccagaggtcacacagaatgtaaaaaagatgtgtactcaagaatattaaaaatatgtctactttttgattatgctaacattttatgtgatcaggtttctttagtaaaacctagtcagacagtactcaaggactgagatttaataagattgatacgtttcaatgcattaaagagagtcttaagtgaaactggctccctgtcccgcttattgtatgtgtcttacagtgaaatcactcccttgattcactttaagactgcaacagtttttttacccactgttatttttgtagcattaatgtaaatttcaacacagggaaacggcttcttagtatgattatgaaaataattttgaacttgtggactcttgaaaggtctaagggactcctacacatgtatgggtcacacattaacagccactcattgagtccagtcccttcatttgacaggagaggagagtggtggaaagatgtgtctaagatggcagcacaagttagtggcggagctgggacaagaacctattgttacttaactcttctttcttttcttttgatttcctgctccactttcaggaatttaaaggtaactcaaggaattccaaacttctttgtcagagatggtgatgacaaatatatatagtttgtatatcttttatctgaaatgcttgggatcaaaagtgtttcagacatcagatttttcctaattttggaatattttcattaaacttactggtttacattcctgatcaaaaaacatgaaacccaaaatgccccagtgagctttcagcgtcctgtctgtccttgaaacttctggattttggagcattttgaatttcagattttgggttagggatacaaaacctgtataattattgaactttttgggaataattccgttttttaaaaaatgttaaaccttttgcatattttccctactctccgctcaccactactatctcttctgcttttcaatggtaaccactcatgcctttttaaacaaaacatgtgttgtatttgccaagacacaggggaagcgaagttaaaggtacagttgactgttcattttctgaataagatggaattctagctttgtggggaaggaagaatcagtgagttttcgttgaaggacccatgccattctttacctaaattaaagttgttaaaagtcacaggaaagaaaattgtgcaagcaattatcatcctttatatcactataacccatcttactaggcaaactgtgccctttgctccccaattattctctattaaagtttcttgctctccctccccatccttctctttctctctccctgtctcctcccctttccttctagaaagaggttgcccaataaaacttgctcttaactttgcttttggttatgttgatattttatgtgacttgttttcttcactaaacagtagtcagtctatgagactgtattgaagaatgctgagaaagtcaatagaagtggacttagaatactacatgttcttttaaatatgtctcttatgttatagagtaactttttggggagctaaggtttgcagacaatgctgcgtgtgaacatatgtgagtaaatctgataagctgtggaaggaggcttgcaaactttcaaatgtattgtgctttcattttcaacttaattggatgttcttttgcaaggtcttgtttttttcctagttctcattcaccgttcagttgccttcccccacctgtgagctttttgagtcaaactttgtttattagcttttttcctgattcttctttcatgtctttctttcctatcccaaagtatgatttgattagacctcaggttacccttctgaatgagctcttcctcaatcctaggcctggccaggcatggtgcctcatgcttataatcccagcaacatggtaaaaccttgtctctacaaaaaacacaaaaatgagctgggcatggtggcccatgcctgtagccccaactactcaggaggctgaggtgggaatatcacttgagcctgagaggcagagattgcagtgagccgagatcgtgctattacattacagcctgggcaacagagggagatactgcctcagaataagtcagtcagtcagtcagtaagtaagtaagtaagtaagtaaataaataaataaataaataaataaatacgtaagaatcctaggccttggtgacttactctttttaattttttttcccacaaaactgatgtgttttgcccttactttcaccagaagaccatttagtcttcttattttttcttcctgagacttctacatttgtttttttctagccatttatattaggctcacaaattgcatagtgatagctgattgaccccttcaaaatgcctgttttctgcctccttgtctcagcttcttgaggatggtgctatctcatgcttggtgtatcataggagccccatggatatgttgaatagattttgctcaggggtctcctctttagagagcgttcttcacatttttatctggagatctgagcttttatgtatctcccactattgggctgctaaatctcccaaacccagaattgcaatgtccatcttttaatgcagactcccagccactgccaggatatcacatgtcttctctgacagatggctatgtagcctccacttgaacttttgcagctctttgcaaggcaatttgttctactgctggacagcttcatgtttaatgtttttccttgtattacactaaaactgattttcccattattttaatccccatatttctagcattgcatagtttgaaaaagtataatattgcttacacatgacatgtccccagatactcaaagatagctctaattcccccatctgcctcctttcctcctttagaccttctcttgctacttacatcccatagaaggctttggatgctcatcctcttggtgctttccccatttctacatcactttctagattttggtcctgatgtccaactctaagggactccctcaaggccacattttatctctgatggtactaggagcagtatgagtaaatggtatgtgtatgagtctgaaagctgagatatgaattctggtgcttattagatgtgtgaacttgattaggttacttaatctttctaaacctcagtttcccaagatgcaaaatgaatataatattaaattccaagactatttttaaggattaaagatataaaatgcttagcttagttactaaaatatattatgtttagcttgatcaattatttcatcttttatctatccaacaactccttttctttttcacacatgtgcacttggttttaaaaattatttcaagagttcttccctcctcctttccttctctcttttcttctctctttaaattttataacgtatatactcttataaaagttaccatcatgtttagatttccttctaaacttttatatctagaatttaacatgattttcttgacaaatatgttttcttctatgtgaattttcgcagctgctgcctacatttctgctcatgtgtttagcctctgttaatcttcctgtgaaaattgtgacttcatcctgccaatgggttaatgatgactggctcattgcatgtcacttaactcctcgctaaatgcttcacttgatcactcagtaactttacaatcatttagttgtacaatacatttaaaaaaattaaaagttcaattaatttcaatttcacaaacacttactaatcccatcttatatcacatgcattaaactaggtgtgtgttatagtagttgcatagaacattttgttcatttgctcattcattcattcattgaatgttcttttgagtacatactaaagaccagatgctggatagactttgggttcggattcaagaagctgtgttagacaaagagcctctattcaagatgcatgatcaactaaaagtgataaaacaatatggtaattttagtgatccagatataaaactaggcattatggtagttttaagaaaggctgcttcatcgaacatttttgcattaagaagcttcttatcggggagacactaaatgttgagtagggcctcagactctactagaaaggtaagacccatattagggcttggttttgtttgattataaagccattttgtgagaatcaacctccaggctccatgtgttatctttggctcctcaccttcacccccaccctcccaccccagttgcatgcatgccatatttttccttcttcttttcaataaggaagcatcagaatcaacagaataacataaagataggtgtggtgacattataggctcacttctggggcgtcattattacattaatttttctatatttccaagtaagaataacaatgtaagtacataaaaataatctcatgatagtagaacatattgcatagtatttctctattcatcattccctttacttcttgtagaaaagcttagtgcttgtggatttccttaaataagtgtcttaagcactgtatctgatctgatagatattagcacaacaattggcactgagtaattatatttggagaatttggaaggaattttttctctattgcaaagtggtcatgctgtgttgtctgcttttatttatatcacaagaccagatctgccgttaactagatgtctaggaaagagttcctttactactctgtgccttagctttgtcacttgtcaaacgagaatatactaggaacagtatcagttttgcctcactgagctgcagtgaagaataaaatcatttatctgtgtgaaaggacaatgcatacagatggtaacaattataaatattaaactaagcttttgagtgaccggattggctacttctcttaaagtgagttctgcttaattagttaattcttacttattgccccaaactttctgagatagcttcatgtttttttcctctctaccctgaagtgcctgcttgcaagcactatatgctcaatgagcatttgttgaatgaattttttaaaagtatttaccttttttgcttttattattattttaaattaacacataattgtacatgtttacggggtacagtgtgatattttgatacatgtatacaatgtgtaaagatcaaatgaaggtatttagcatattcatcacctcaaacgtttattatttctttgtgtttggaacattcaaaagccactcttctagctacttgaaaatatacaataaattgttggtaattatagtgattctatagtgctgtagaacactagaactgactcctcctttgtacttttgtatccatttaccaacctttggctatcctccccctcctgctacttttctccacctctggtgatcagtattttactctctatgtgatcgatttctttcagcttccacatatgagaaaggacatgtgacaaataactttctgcttctggcttatttcacttaacatgatgtcctccaggcttatccatgttactgtgaatgacaagatttcattcatttttttatggctgaatagtattacattgtaaatatataacacattttctttgcctgtttatctgttgatggatacttagattgattccttatcttggctgttataattagtgctgcaataaacatgggaatgcagatatcttattgaaaatgtttttttttttttcctttggatatatgaccagcagtgggattgctggatcttacgatatttctttctttttttttttttttttttttgagacggagttttgctgtgtcaccaggctggagtgcagtggtgctatctggctcactgcaagctccgcctcctggcctcctgggttcaagcgattctcctgcctcagcctcccgagtagctgggactacagacgcgcgctaccacgcccggctaatttttgtgtttttagtacagacggggtttcatcatattggccaggatggtctccttctcttgacctcgtgatccgcccaccttggcctcccaaagtgctgggattataggcctgagccaccatgcccagccaatatttctaattttagtgttttgaagaacctctatactattttctataatggctgtactaacttacattcccaccaacagtgtatgaattcccttttctttgcatctttgccagcgtttcttattttttttgtctctgataatagctattctaacttgggttagatgatatctcatggtggctccattttctgtatatggatgtccagttttcccagcaccatttattaaagagattcttcttgtttcctttgttgaaaatcagttggctgtaaatacgtggatttatttttgggttctctgttctgtcccattggtgtatacgcctgttcaagaactatcttgaataaaagtggtaaaagtgagcatctttgtcttgttccagagcttaaaagaaacctttcaatttgaacgtgtccagtatgttgatgactgtgggtttatcatgtgaagtgtttattatgctgaggtaaggtatgtttcttttatacctgacttgagatattatatcatgaaggaatgttgaactttatgaagtgctttttctgcatctaatgagataatcatggtttttgtactttgttttgttgaggtaatgtatcacgtttattggtttacctgtgttaaactatccttgtatccctcggataaataccacttgatcatagtaaatgctcctttaaatgtattggtggattcagtttgctagtattttgttgaggatttttgcatctatgttcatcagagatcctggcctataattttctttttacatgtttgtccttgtctggttttggtatgagggtaagaatgcattcatgaaattctttatttttgagatttattcttttttattatgtctatctttgttgaatttcttcttcatattgtgaattattttcttgatttagtaaaattgtctatctgtattttcttgtatctcactgaggttccttaagatcattattttgaattccttttctggcattttattgatttcttttttactggagtctgaaactaaagagctacattcctttggtggtgtcatattttattgctttttcatatttcttgtgtcagtgagttgatgtctttgcatccggtggaacaattacctcttctatacaaactttctggagtgattttcataaaaaaagacttccgcttgcaattagggttggtgttacagttgggaggggtgtgatgactttgtttctgaatagatgcagtgatagggtctccatgcagcttctaaagctacgttcaatgtcagcaataactgtgggcacctcagtagcttaagttgtagaaatttgtggcagtggtggtggtggcatagattattaatgtcctcagtgtcaagggcttttgaggtcctcctattcttatttttttcataatggggagatttagccaaggggactgctcttcatgtcagatatcacatgacctacaagcaagtgcagtggtgctgagttctaggtgcaggtgcttgaagtggctgtgggactagagtcttatgcccaggatcttgccaacctattgtgacacctgggtcttgggttacaggttcactctctgtgctagggttggatgtaggcttcccacagagccaggatttgtgactctgagacattactctacaaactcagtcccagctgtgagtggctcaactccaggaaagaaggagtgcagggaagtttggacccagagagcaggatatgccctgatttggcaacatgagccagtagggttcagtggcaacttggatctcaggggatgaggcaccatgtagtagtgattcttgacccctggatgttgggactcagcagtaccttagactctgtaagaccacatgcggtagcagtaccccagaatggcaacatacagctgttacttgtgccctgagtgggggcagagtacagcacagtggtggctgtatgccacagggagaggggtatcttagcagctctgacactaagcaggtagaccagctccagggaaacagcgtattagagttgttttccctttaggctggagtgtctcagatcagcccagccactgctcagttttccaaggatgtgggttatcacatcagctcagctttgggatttacagctgctcagctgagcgatggcaccaattcaccaagggacaatatgccacttcagctcaggcctgggggacatgacttttctaggcagcccaggtaccatttccctgggatgaagggtgctacttcagattaagtactggggtgcgtgaccgctctgagtggccaatgtactgttttcccaggaggcagggtactgcttcagcactggcctgaaggggagggtgaaaggtagattaagtgactctaccttcacctgggcccatggggaagagtggaacagttgctggcagctcggcttggggatgtcgggccactgggttcgggtggttcaacggtagcttagccttagtgatggagtgtcatagctatgcactcccagagcaagagacactccagccaaagctccatttccaagacggcatagcgcagtagctgcgcaggccacagagggcaggtcacactggttgctctttttcttggggaagcacggctatgtggacttcaggcaggtccctcagctgggacttggctcctgtgaggactacatgagactccatgggtgaggtctgtagctgttcaaggtgttgatggggcttgctgggatccttttgtgtaccattctaccctagagagaagttcctccctgtttccagcagatcccaagtgggtgatgggtggtaaagaccaggtgttttgtttctattctctatgtggtcattctgagtttcttgctatccagggtttctgttacttctctgatgcagtctggtacactgccttagttattattttttcttcttctgtttttagttcatctttttgtttttttctatatagcaatggggtttccctatgttgcccaggctgctctcaaactccagagctcaacagatccactcaccttggcctcccagagtgccgggactacaggcacgaaccatcgtgcctggcccagttatttttgttaaagtttagttgttgattgttgttgtggctgtctttgtgaaagagacgagagctaggggcttctggttggccatgctactgatgtcactcttaaagtacttatctttaaaagtccagtgctggagatttgtaagctacttatatttctgctcagaattcctaaagtctctcattttatttctagattatacattccattgatagagcccttataaatataacattaagaagttgagcattacctttaggccaaagcaatttacttttaaaaaatctgattaatttcaacacaatcaaccagatgtcagaagatttcagtgcctctgatagatgctgacaggtgtggaaattaaaatcagagagggaagcaattaaatcctggcaaacattactttaatgagacaaccaaatcataagctatggaataccttgtattcttgataagtatcttagggtggcatgagagtgcactttaaattgtatgtggtatttgatgactggaatgcagggcagtccatatttgtcatctaattcctttggcctgatttaacatttcagttgcttctggggacagacttctatgtttaaaacattgttttattttaataaatgttaggttaagtaatccttttactactacctctgttgccacatgaaacttatgaaaatgaccaaattattattggccttttcgcagtggttttgggataactgtgaaaagagaaacacagaatgtgtattttatgcaacttctaatcaaaagatttgataattacagcactaaaaccagaacccagttcctccatccccatttcattattcttttcaatatgattccccctattcggaatgaatatcttggacaccagggtgaaagaggtaccagtttattgacttagtgggagtttttataagatactcttatattgcttattgaggtactaaagcacttacaaaatatcaagtattttgagttagctttacactggttcaataacacttagaatttttgttcataatactaagataatcatcttagggatggttacattttgttgtgaggtgtggtggaaaattcaaaggacaccatggtttgtgaaaaacccattgcagctgatctctgcacttttcatttccatgtcattccattttcttctgctttttctttaccccctgttattttcttgcttctctctctttattatcttaccttcatttactccatcctgtttttctccaaaatatagttgcttctgtaaaattgcttctgagggtgagcatatttttgaggggagagaggatggatggtttgacaaaggatgcagacatgtcaggttctgggtcagcagttagttataaaatacacagaggcagccaaggataactggcttcattaccaaaaggctagagtgggatttgtcagttgtcccagatgtctgtatggaattatggaaaactccattgcattatgaaacactcaggagctactcaggacacatgccactcaatccacgtgaagagggctggtgaacttcttagctagaaagacttcagctttcctattgcttaaaatgagactgattggtgaaggatttgtattagtccgttctcacgctgctataaagaactgccagagaccacgtaatttataaagaaagaggtttaattgactcacagttccacattgctggggaggcctcaggaaacttataatcatggtgaaaggcaaaggaggaacaggcaccttcttcacagggcggcaggaaagagtgactgccagcaggagaaatgccagatgcttataaaactatcagatctcgtgagactcactcactatcatgagaacagcatgggggaaattgcccccatgatcggattacttctacctggtatcacccttgactcatggggtttacaattcaagatgacattttcggtgtggacacagtcaaactgtatcacactcttcacaaaacttcactggtacagacttgcgtatatggcttgtgcttcgacactttgcccagggatgttgcatcttgaaactttcctggtgagatctgagaaagtgtttatggtaacactgcatcaaacactccttttgccttagcttagtaatgtgtcaccttctggttagaccacagatgtgaagtctactctttctcctttcacttgctaataaagcagaacttagaactaagtgtgtgttagtgcttcgacaattgaattttctgtgctatacactcggtttccctttcctgaagttgtttagttaccctcttcaaatagcaattgggaggctacgtcatgtagtaggagggtgcttactgattttggtatcaagatacagtgttacatttttatctgctccatgttaaccatgtgatctttgaagtttggtttttgtatttgtaaaatttgggtaataaggtctcattggagttataaaggggatggtttgagacataatggtcattgtgatttttcaagctataaaataaagcatgatgttaaaagatgattaatgttttcatttggtggtagatgacaagtttcttgcagggcatctgatcaatcatgctctttttttttttttttttttgaaacttttattttaagttcaggggtatagttgcaggatccatgttcttttcttaacctgttttgagtcctttatgtaaacgggacattttatcaaaacttcctagaagtcttatatttctcaataaatccatccattctattaaaacaaatttgctttgttcttagagtctggtggaaactccaactctctgaacctagggcatgattatgggcacaaagttgaaaatgatgtgtgattcatcagcaggtctttcaactaaagcagtatctgttttgctttttaggggtcaaggaaacttttgattttaaaatcttaaaagtttttgggctgtctcttgttagatgaggtcatgtgagagtgacatagattaatatttcggtgttttaaaactaggaaacataagtcaaagagatattctcttgcctaatgtgcttataatgttatcttttgatcatataaatgtggatttatgggaagaaatgttatcactgctctctataaccatatatatggaataatggagagaaatcttatttaaaaagtttaactaagggcaactttggctatggagtatatatcataatcttcacatacatatgaagaaattgacactcatggagtttaaataacttgcctaaggccattgattaaaggaaatctgactggctcgaaatcctatgtacttttcccatttcctcatttcaatcaaatagctggttttattttattttctctctccaccaagccttgtgaattaagacaatgagttgctgtttgtctttgtctttccctagcctaataacctaggaaaaactgaagtagaaaggaaggattactggactagcaggcacaaactttggctccaaattcatgccctgccagatactaaactgtgtaatcttgggcaaattactttccttttgtgaacttcagtttctacttctgtaaaatgtggacaataatattcattttatatggtttctgtaaagttaatcatgaggatggtgttagttcctttctcatcctttctgtccctctttgagcttctgtttcctcacctatgaagccagtagaatcatctcttcctgcttcttcatcgggttcctgtggggtgcaatgaatgtgaaaatgttttgtaaaacaagaaaccattatgtagatataagaggttatgactattaatgaataaatatgggtttggtgtctggaagtaatttttacttatttcatttgtagacactagcattgcagttggctgaaccttgtgtcaaccatccattccaggagccagctatctgaggtaagagaggaggcgtgtcttcttgtttatgaaatactaataggcatctgagccagtaatgttgattttagaagaaatacaaagaatagaagaaatacaaagtactttatgaggaaaagaactgaaaaatggccaagacagtgagctgacctctctttttatttttgtttttttgatttatttttttcccttttaattcatagcccttaaggtttaataccaaaaccaaaaatctgggccacacagacgattcagatttaatgtgtatgtatttaagtgtccataaaatgcaatggagtagaatgtgcttaaccattattttattgtatcctcaactagtatgtggcaggagggctttttacctggtttcctaacccttgattgagcgcatttttgactacactatactgccagtgttacctggctctgaaggggccaaatatttatggctgggtcagtcactctctcttagctgccaaacaaaatcatctcaaaaagctagaatccaaagccacaacagaaaaatcctaagaacacagaaaattgagttagtcttttgaaaccttgcatccattgtatctgaatgccactctcctgggggactgttgggaatgacaccaatccttggcagaagaatacatttgtcttgagtttgccaagaaaatggaggccaatggagaaaaaacatttaaaggaagcatcatagttgtaaaatttaccagatgcgatttttctcctaaagtcaacctgctgaatctgtaccttctaatgagctctactgtgttttatgtaatgtaacttaaccaaaaagaggtgaagtagtcaatatgtagaatagtaactttgtagaagatttgatatcattatttagagtactatacacatgtattctgctgaatattttgttaattcctttggtatgttatatctatgacctcgaactgcaaccatgacttcagttgcacagacctttgagaagaataaaattggttggtattgccccaaatttgtaggacttagaaaatttagaattgagaggaaattaaggtgtcaggtttacatgattttcaaagctaatatcatatatatataataagaacacgtgcagacaaggtaggttatgtatggactatgaaatttctgtaattaaaccagacataacagccacttaagttatttagattttcttctcattcctacaaaaaaagaacattgtttttatttttattattatttatttatttttcaagtggaatataagctagtttacccaggaagttttttatttatttatttacttattattttactttaagttcttggatacatgtgcagaacatgcaggatttttacgtaggtatacatgtgccatggtggttgctgcaccctatccacccatcatccaggttttaagcaccgcatgcattaggtatttgtccttgccttgccctccacccatcaacgggccccgatgtgtgatgttcccctccctgtgtccatgtgttctcgttcaactcccacttctgagtgagaacatgcggtgtttggaagccatcattctcagcaaactaacacagaaaaagagaacattgtttttaaaaaaggtagtagcaaaaaatgtaagaatggctcctgtccaccttttatttcttttctagtccacaaaataaccctgcaaaaacttatttctaatgttttatttttacggataaatatatcagaaaagaatgtactgtagatacctactatcatagtttttgacagctctgtgaggcagagatctaacttgttcatttagaaactgcagttatcacactaaccttccctccgatgccaattgttaaatattaatagaataagctttgaaaagtaattaactgtatcccctgtccccacagaaacccatcttgaaactatcaagaggagttttaagcaagccctgaaaggttacaaaaattactctcaagaaagaggaattttctctctttctcttttcgttatattttggaggtggggaatggtagagagggaatgatagaaacctctcaagtaacctttgggaggtggagaagtaaatagtctgggagcatgctgtagaaatttaaaataatcctgtggcaataattggtatcagtggcagtaatgaagaaagaataacagtttcaataaataattagacttgacagtaaatgtgtcaacaggtacccacttaatgagtgtaatcattgtttttctctgctctcaacgttgatccactgactgcggtgtgttctctgtcccatttccaaaccaaatctatttaaagctgcactccacggaatctgcaacagtataccctgtttactatttagagctgatacctaatgttctttaataggcaagatctgtacttgaacgagaacaggcttctggcctcttgtagacggttgattatccctgttttccacagggtgattcattagcaaggatgaataatacccaattaaatctcatggacttgtctatattgccagagtgaattgtttattataatttggtggaaacagtcctggtctgctttaaataaaattaatcagttaccgttttttgaagtggaggtagaggcagtagttataagtgaaattacctctgtaataacctgaatagaatcacattgtttttgggagcaaagcagtatgttgtatgttatgtgcaccagaagccatgagaatccttttctaatcccagctgtaatgtcacctggctgtgtcacctaggcaagtcaccttccctctatgaggtctgtttcatcatctaatgacaaagttggaccagttgatcatggcattacttccggttaaatgttctcttatatatgattttatttcctagctagtcccttctctctcctggtgccatgtttccaaaatcataggacagtcctatgactctactgcacagccactgtggaaaattagttatttttctgcttagcttttgcttcttttacataccagacatgcagttaatgacttttattatatatactgtaagaatgggcatttatacaccggtagcggtagtcccttaccccagcaacttgcaattccttgttaggaaagaaaagctgttttcctccacatttctttactctgtgacattgttccctgatctgggtcttatgagaggatctggtaaacttcccccctattaagaccgttaggaagaggtggatgcttcttccattatttgatttttccagagcaaatcactggatctgtaaaggagatcagaatgtcaaagccagaggggacttcacgaagtaatctaaacaaattatttcatgtcacagatggagattttagtgtctgggagggaatctgatttgtctaaagtgtttttgactgatcttggactagaattcttctgactacatagttgtatctttaagtagagaaatctttttctataaactatcctttcacttcctagttcttaaaaggccattatcttccaggcaaaaccaatttcattttcagcatggggatgtgagatgtccttaaacataaatggactccaggtatcttcattaatttcatgaagacatggcacagagggttccggctaccttctgctttccgtgtttattaaaagactgtggattcccttgcagttcttcctgtaagaggttgtttgacgctgacatcatcactctcctccacccgcctcctgcccttttctgaatcagtgaattataggaatctgagaatgagctcctgtttcctgcacattgttggggaacattaaaaaaaagaagacagatgagggatttataagcaagaggacagaagaataatagccaacacaatgaagtctagttcaaggcctgcgattcccaattgctgggctacacagcattaatagcagtgtctctcaccctttcagacccttctctcttatttcagacccttctgccttattcttgtggggatgggctgggactgagaaacagctagtataatcattgccaaaatgaaactcacatgtacatgggggcttccaggtctggagaagagtgtagtaattgttacccatccgatagaaggtgcttagagaccactggacctaagcacttacctggaacctcacagtacagaggttcaaagagtagaaatcagttgactgagtctgaggttcaaatcctggctctaattaatttgctatgagtttagtgaatgcctaactttcctctgagctgcactttctccatctgtgagatgggaggaggagggtggcatagatgatgtcaaaggaaccctctgattttcatgagtctcagatttgcccaaggacctgcagcgaatgtgcagccaagccagatcttgaattcagagcccctttttctggtttgagatggtcatcattataagttccactacccatactttccaaacagtatgtttgcagctttcagccttgttttattaaatctactttttctcttttatttgacagtccctttctgtccagggacctgcctaaagtagcaaatcttttttttttttttttttttttttttgagacggagtctcgctctgtcacccaggctggagtgcagtggcacgatcttggtttactgcagcctccgcctcccaggttcaagcaattctcctgtctcagcctcccaagtagctgggactacaggtgcacacccccacgcccagctaatttttttttttttttttaagtagagatggggtttcaccatgttggtcaggctgctctcaaactcctgacctcaggagtccacccgcctcggcctaccaaagtgctgggattacaggtgtgagccaccgtgcctggcctaaagtagtagttcttaatatacgtgtgtgtatgtgcgtgcacacgtgcatacacatgatcctgtgtttggggcagatgtgaggattatggaattttcagaaactcagatgaatttatgaaatagttggaaaatgcagaactccagaaaatgctatcaacaagtttaggaggtttgtagatgctctgaaggccatccatgagttaagcaaaagttttcattctatgtgggaagtatgagatgacatttgagtggcatacatttccttttgctgttggattttccccgtagtcacctattgttatactctgagtgttaggctcgttttgtagcatgacttttggcatgtatgtatctcaaactattgagtgatattttaatattgaaactcttattctacttcattcattcactcatgcattcaaattcaattttaattcagaatttgctaaatgctagacatctcaatacattattgtatataatcctataaaatagaaaattgctaggtgctcagagaggttgagtaatttgcccaaagttttacagctaataaatataaaatctggatttaaatccggatttactccaaaatatgtgaatacctccagagataacattgaagacaaatagagacaatgatgcaagttcataaaccatggaaatttctggtagaaaatggtagatgggccccagaggaatacagagaatgtgtactatgggattttaggaagggacaagatcatacattatgaattacttcatatcataattcgttaactacgtgtttatctggctccttaagaaagaataaaaaaagctagataatcatatgaaacacattatgcataactcagtttttttcttgttcttcaaacttctgtcaggttagtgctctcaatatcttcatttggtaagtgagatgaggagatgaagagtagttagggtcatagtgccctgatcatactgagttttcacctaaataggaatttcagtgctttgggtcatctattttgttcccctcctcccggcctacccccccattatattgagcttgagacttttaacagagataacttctgaccatgcacagatcagcacaaatgcagatgtgagcagctagaatttggatgctgccaaattgtgatgactgccacatgtgtgaagctaaagcttagcacctgatgacccactgtgagtgtgtgggggggccagaagagtgaaaggcaggtcagagatggaagacgcctcggagtttgtcaatggcagtaccttcaccttgcagatgcagaaatggaggtggttagaaggggtaagacttactaaaattcacacagcaggttaatggctctctgagaataatggcaaaacaagaacaaggctttataccagcaatctacagtagtatctacttttatttcctacctttccgttggcatatactcacactgataggcttgacaggcagataaacctgtatttgaaggtcagcaggattagttgtgtggccttggataagttacttgatttacttgggtctcaggtttgttgtctgtaatagaaaccataccctttttcttttctttctttcttttttttttgagatggagttttgctcttattgctcaggctggagtgcaccggcatgaccttggctcactgcaacctctgcctcctgggttcaagcgattctcctgcttcagcctctgtagtagctgggattacaggcatgagccaccacgcccagctaattttttgtatttttagtagagacaaggtttcaccatgttggccaggctggtctcaaactcctgacctcaggtgatccacctgcctcagcctcccaaattgctgggattacaggcatgagccaccgtgcgtggctgaaaccatacccttttaacaggactataccagtgtactgttcaatatacagaaatactatcacccatctgattaataatccttatcacagcccaatgagacaggcacagatgttctgcttttcaagattctatttcctaacttcatcttgacagttgtaagtctcttgcttctcaaagtttggtctgaggaccggaagcatcagcattacatgggagcttgttagaaatgcaaatctcagatcatactctagaacttctgaatgagaatctctactttaacaagagccccaggtagttcatatgctcattagtgtttgagaaacattcacttcggccctcgccctatttcaaggctattgctgtggtgtgctgacaatgcctggcatgctgccagcattcttggggcatgctgtaccatgccttgagatagcggggtccggggggcggggatgctgtgaagtcactccttgggaataatggaagactgggttgaagggatccagcaggctttatctttttaacacccttcatttccttagaagttactattcagaaggggtcaaactgggattggattctaagtctttctgatccaaagtccatgttcttttcattaaaccacgatgtctcagtcaagaggaatgctgggttgtgggtgataactgttcattccctgtagtgtgaatatttccacactggctgctttaccctattactcaattcctagaggggaagaatttttttaaaaaaatttaaaaagcctgagttgaaagccaggatcctgcagcttaatcagttatttttgctttttaatgagggtgactattgtgaaataagtaattattaattactcaaaactaatgaaatattttagtttccttgctcaaaaagcatatggatgctaaaagaaagcatatgggtgctttctgggaagcatattggtgaatggacaaattacagtggtgccaatatgcctttgctgtctggctggggccatcaaaacgtgtgctggcatctgagtcctcgtgtgtttaaagggattttttaaaattcccatttgataagtgcctggggttgcctctggagttacacagcgctgtctcatcaatctttctgccatgctttcactcagacattactggctgagtataaactcggtataaacctttgctgtaagtagcttctgtggctctttctttccagatgcctcctatcctctgcaataggttcagtgggcctgccccatggatggcacgtatggagactttgtctatacaacattttaccacagtggtaaaagcagtagccgaaaaggtggcagcactgagacctgtttgctccatcagggactctgtctgaggccctcggccagctgttgaattgctgcactgcaaatttcttacttgtaaaactggaatgataataccagtgctcctgagctcacaagcatgctgttcatccaatttgcagtccatgccctttgctcttcctctcctttccttcatgcctcttctcctttgctgcatgttcagctggtctagtaaaaagcttgatggatttggaggtggctgaaaccattttgcttgctctggggattgcacacttctgagcttgtcagaggcaggcaacatggcatgttttagaagatacttggctgagtgtccacgaactgtggctctcagaccaacgtgacttagtaatcatttactcaacacctacaagcaaggtagcttgctaagaaattgaaggagggagctggcgggtctgtggaggtgagtttgattcagggccagtcaagacttggtgtgatgtgtgagctcagtaattatactttgagagagacagaatttggagaactctttcctattggaggtttcttatagaactagggacaagagctggctttgaaagattattaattggactttgataagatattacaaggatttgaagagtaagtctctgtcaggcaaaaaccagcttgcagtgggactcggaagcaggcaaatatcaggcatggctgaagaactgggcatcaatcacagacatgtgtagctgagagaaatcacttccttttggtgaaccctagactctatctgcaaaatatgagctttgaacaagatagttctcaggaagcctcaagaactctagctgaaattctacaaagtctcttatcacacagccaggttatccacttagcaaaatcctggcactagaatagcagcaatggagcaaggcctgggacccaggtgtcctgcctctattttatattcttcttactgtccacagagcattatgatgaagataggtggggtggacattattattctagtttttaatgtatgaaacataggatgttaagggaatctaagacataaaacgaataagagatttaactatcccagatattgatcacccttccaccacagagggccagctcttataaaatacaccccttgccattttgcctgtgtgggccttgctttcctgcctgaggaaccagcacgtaccccttctcccacgaaagtcatccctgtctgctctttggctctggaattcagtcttagcaatggactttgttttataattaaactttattttgtattgccatctttccatgtttccacccccatctcatccctcatacatattttaaaggctttgaatttaaggattactttctgcttctctgagttccctgtagctcctggcacagggccccagacatagtgctcagtagagaagcaaatgactatgttctgcaatagtttttctctctgcctattgcttgtttctgagatggatatgagacttataggcttaaagaatttcggaactggaaaggaagttaaaacctatctagtccagctcccccaccccagggaagaaatgacttacttaaatttgcctgcatagttagtggcagttctgcaaatcgtgcccacatctcaccaagcattggagagatggttggcacttgagtctcttcttaggactctacaggctctgtctggagtccttgtttctatgaagaccactaagaataaaggtaatacaggtgctgctgctgctgtattaaacagatggaaagaagtagacattcattgtatgtctgttatgtgacaggccttgtgacaggtgttttcacatagtttagcttggtcagtcatcaaaagctagaattcccattcctccatgagggagacagattgtttctaaataggacatttagcagaagctctttcctgtaagctctgaaaggcactcggtagtggatagatgcttccctcctagaacacgggtgtagggctctgcagagtagcatgcatggctcttctaagggatatggattgtagagactgtgaaaataagcagaagttgtgatcaaaattggcgttgggggacttgtggtcacccgagtgtaccagaagactgagctcttctactctcctttccacacatacatctgagtctttggagagctgcaacctgagtgcctcgttcttgagtgtctgtagcattggcttttacttgcacttactacattttactcctgcctcttccctagctagcctcgacctcaacgtgtattatttcctccccccttgtcatttttcttctattacttttgcttcttccccttcctccttctcctgacttaaccttgggtggccgcaggtcttaaggctctgtgatggcagagtcttctgtattggactgtgaagattctggcagggaagacaatacacaaatctgttaaatacacaataaaaatagcttatgatctatgggacttggtattaagcaagatgatattaacgaggtttgattgctgttctgaaatgtggcagctgcgcacacgtattggctgctttttctccccacctttggcagcttgtgagcggtgttgccatgacactccttgggctctgtttagatcagctattttctgaaggagtcgctgaccttccccacgatagaagctgttgatgtggtcacgtcagtgcctcttcgggagctgtgtgactggcgagccctcagttgccacttggaaacggttggaaactgtagatcaggcacagacattgaatgtttaggagcaagaagggcttgtgaatatcccgtactctcatttgatgtgtgaggacagtgaggcgcattatgcggaggtgacttgctcaaggccacagagtgcatagagagaaggctgggagaggaggtcaggtcttgtttccctgcttgttgatgttccagctgcatgcacggcactgagccctgcctgagtgcgcacttcagtcctgaaagctgcagagggatgggctggtgacactgccgtgcctaggagtgggcagagaaggtgaagacacggagagtaactcagtgcagaggcagcgacgggaaagtgaaggagagtaagaagcccagagtaaatggccaaggtgccactaacatgtccatccacagaaacttttctgggggagaatgtttcttatcagattccgcagatgggttccttgagaagtgagtgcttaaaggggctgggatagataatcataatgccatgttctcactgctctgaacccttttctgacctcacgtaagacctcacctaaaacttccacaagagccgttcattgtcagtaccatgctttttttggagtactgtataatgtcaagtatttttccaatagtttatatgtgaaatgtggtctctgccacaagattacagggtcctcgggagcagaaattgtgacttaaatgggcctttctcccttccactttttattcttgccctaccttttaatcaggcacctggaagagatctaaacacaggatgagcatccagtaagtttttgttgagttgaacttagttggattcggatgacctctaaaaaatgtttactaattgctggtgaaaattggcaaatgattattttgtggaaaaatgttctcaccgaattagattttgttaagaattcttatgtgtgattatttttcataaacccaatacactgtctattattatccttattttacaatgaagaaaaaaaattcaattgactgctcaaatttacctctaggaacaggtgatggagatttgatttgcatttagatcttttgtctccaaatattgtaatgttacttctgctttcccccactacataccgaagaggtcttacttcattgacagtggttcagccttctgctgaggagtcttcagtctttttatgttgtaatctgcctccttatgagtttgggaaaagaattatggggcctcaggtttaaatgctgttatgctttgggtaacactttagctgatttgttttcagtaaagccagaaggaaaatactgcatttctgtcttctttaatttccttaatttgaaataagccttgaactagtttgtaagactcctttaacttttaacaaatttaggcacatatgtaatataaagaaaaaggcactctgccctaaatgaattgactaattaagctgagaacaaaactagaccacttttttttttttggtttcaaaaaaaggatgcaggaatttttaaatgctacagctaaaacccagattttgtctgatattgatgttctgtaggttttctcaatatttgccatattcattagatgacattcattatactttcctaacttttataggatttagatgaggtttgttgataacattctatattctttctgaaaagaaaaacacacacacacaaatgtcgagcagtcttctttttttaatgtatattctcaggaaaaacaccattgactaatttaaatttcagtacggaggcaaagctgatctgtagtgaatgtaacatcttgttaaatacaggtttcatgcttcttttttgtacctttccaggcttttaaggaggagaataatttgaataataatggcataatgtccagagggaaagttgaatacgtaagacagagatgcatgtgggcctatttctgtactttgtgtgcgtgtctctgtgtggtggctttatggtttttaaaataaagttttctgtattttcaatgtatataataactttggaatcaccaaagaaaagttgatattgagacttgggtttttagtggggaggaatggatgttttttttcttttacagttttaggcaaagtgaaactttagaaaattatattatttgaagttagatggaaaccaaacactatctttatagtttctttcagaagaaactttgtcttaggaatctgggcactcttgtaaactttctaaatttcttcagccctcattgatacccacactttgcttaattcagttgaatcagtttacagtgaataacgtccctgggaacattaatcaatgaacacacacacgcgcgtgcgcgcacacacacacacagacacacacacacacacacacacagggaggacaaaaaggaaataaaagcatcactttgtaccttcctcaattcaaacctgtctgctttcttcagaatttcggatgtatgtgtctgtttcttccagtagattgggagcaccctgaagacagaagagacatatgtatatatatatatttttgtttgttttttcttttttgtttttagacagagtctcgctctgtcactaggctagagtgcagtggcgtgatctcagctcactgcaatctccacctcctgggttcaagcgattctcctgcctcagcctcccgagtagctgggactacaggcgcccgccaccacacctggctaatttttgtatttttagtagagacagggtttcaccatattggccatgctggtctcgaactcctgaccttgtgttctacccgcctcggcctcccaaagtgctgggattacaggcgtgagccaccgcgcctggctagaaagaagagacattttatgtatgatcgtcataatgattttgtgaactcaggtgtagtaaggtaaaacgccctggtaaaatcacttactgggacttttcagaatctgtttagaagtcattccattactcttgaaatccctctgctttatagactttctgagaaataaggaaagtccatctgcctacttgtcatagaaatgggtacttcagcagtaaaatagcctgtttacatactggctcaaactgtcaatgtaggaaaaggtttcgtgtattataaaatgttacagagctagaaaaaatatatacaagtaatatatagagtgcatatatatgtacatatatatgatctgttccttgtcacaatatttaacccaaagtgctatttacagtaatgaatcaaaatgtcagtcttaaaaatatgaagtgtcaaagtgttcccacgttgtagaaaagtttgatgtgacagtttgttaatcatatgactattctatcaatgtgtctcataatgtcttttgctcaacactctcgtaggctcctcacacttttttcatgaattcctagcttaagttactaacccaaggagcacatttgagttgcgtgtctcccacacctcacacaaaggcggctatgttttgctgtacttaaaactgaatggatttcacattattttagagtggtttgattttgtgcctgacgcatttatggatagtagcttaaaaaatttctgtaattttgctgttttcactacagaatcatcaaatgaaactttaacttatagcgcggatgttttttgtttctccaaagtttcccaagatatcagatgtccttatttgctagtgcccattcgttgaacttggacacatttttgaatttttctcagcacattgatgatcccaacttctttttcctactaaaagggcagagtcttagaacataaatattatatatgtggaaaagggcaacatagtttctttcgggaggatttttggccatgctactcactagttcgtggatcacacttaatctctgtgcctccgtgtcttctggagaaaatttaagggtgaaattagattagatcagtgaatttttaaacttatgctctagaagccctaggattctgggtagaaatgaagctccaatgattgagtgtggggtgggcagtggggactctgggcccttcaaaccaagcagctctgctattcgcttgttaaaatttagagttttataaactgtttcacttaaagaaaggttctactgcttaacctgcctacctgttggcatcactgtcttaagtgatctagagtcagtggcttatttcccacaaggattcagtgggcaactgtgacaatagttcttggctaacctggtcactatggaagttctttccgtggaaaaagattctccatccttcaatttgagataagatttactaattgagacctcatttgtttctgattttaatctttgcatcattttagttttaataaactaactttccaacttaccagattttcgggttgacaaagaccattatttagagaaacacaggcaaaggaaagtctaaaagctttggctggaatttcaactgcttctggtcaagaatatgaattttactttgtacggccaaagcgtttcaaccattctggggaggtgggtgaatgcccacaacttgaacttttcattccattgctttccatcctcaagtctctcccttcttctccatacacatgcaactaccaccaccaccatggttctcttcgcatggcctatgtatgtccccagacatggtggagcagaaaagtaaaaagttgtgatttacaaaccaaggtagagactataagaagaacaaaaatgattaaggggcatgagttagtgacactaacaaaaagccttcatgtatcaacataaaaaaatcaaattgaagaaaatatttttcatggacagaaaacctaccctaaagacaggaaagaaggtgaacggctatttcactagatgctgaaacatcatctccaaagttcctcaggaatcaaactatgggattagattcaactcttttaatagctgaaatctagaagggagagagtggttacgtctatagttttatgaatgatgctgaactctttctcacaataaaatgctcttctactaacaaatttaaagacttgagcacccagaaacagcagttgcatgccaagtcaggaatattctttttttaagtcacatgtcagccactggggatgcacccgggtttaggctggaggttggagagggttcatccaaaatccatgcacaagatatttatccaaaattctggagtggttccttgttcattctctgaagaaattggtgagataaggcaagcatcctaaacaaatgttgagctctaaaaatacagtttaaataaaacagaaagcattctgagtatagttttggccaaaatagaatagtataataaatcatttggctggagggtatgacatgagaataaacaaaaaaacagcatgtttgctatcttttctgtttattttacttatgcatcaacccccttctgcctccttttactccttgctagagtgtggaaggatcttgaattcagggccttgtctgtcttgtttttcagctggctggagtcacacttggcttatttatgagctcaataaacattatgaatggatgagcaattttgaaagattgacatattgaaggaaaaaaatgacgtgaatctgaaaaattctgacatggccacttctaaactctctgggacttgtactaaatgcttatagatttaggtagcattctgagcattacctcacttattcctttcaaccagcctctgaggaaggtactgttattatcaccatttcacagaggaagaattgagatccagagatgttacataatttgcccaaggttacataataataatataatagctaaagccaggatatgaactcaggtagtctggcttcagcagcttctctcttaactacgaagctatattgtttccacatggtgattataattataactgcctgttctactttcctgtacgttgtgaggctgagtttaggtgtgaaaggattagggaagaagtatatcaactagtgaaggcgagacaacacacaaacaactataacttaaagtagatagaaacttgcagagaaagttcagagaagaaaaaagaactattatttccaccagggtgaagggcaggagtcaaagaaggcttcctgtgggaagtgacttagtttggccttgaatgagtagaattatagtaaagggagatgctttccaagtaaacagaataaacagtggaagagatgccagtctaatgctgttgagtttagcagattctttccgaaagagtgtgcgctgagaagtggggagtggagagggtttgtggtggaaggaggtggaagccctgagaagggatctgagtgggaagatgcaagcgttccaaaagcatattcgcaatctctctggaggtcaatcctgggcaaaatgttgcttttgtcatgctttaactcattattttttgatgcattgtccgcaaagactagtccaaggaggtaccactccagaaagagtggccacacgagtctggaaaatgctgcaccctctggtgctctattaggtgctgacagtgcgtgttaacatgcccagtcttcaaggaagtcccgtgagacagcaatcaccttgctttctttgactgtagacctggtttgttgttttactttgagcaaacccctgttaacatccctcagaagacacacttcaggagccctcttccagccaaccagctggactaatttgtgtaaactttccaacaagttgtgtgcttctgctgaacacaggtcatctcagagtaaaacttgctccattctcaggacagccaacagtccccttttgaaagaagttagagcacgtttgcctatagaaattgttatgtgtcagttagaaagcaagctgcatccgaggtaacaaacttgaggagctgcagcccctctgacgaagtaaaagtgagaagcaggaagtgaaggagtctcagctcttgaaataaaatgtgcatacgggtgagagttgccaaccacaagaactctagctggctgccctgagaacatattaggagaaaacatggttaaagtcggcacctgacctattagctgcaggggcagctcattatcttttttattctttcaccctgcattggcccgaaaggggaagagaggcagtaagtggactgtaaagagtgcttattccacgctgggcaggtcattagaattgtcatgtcaaattcccttccttaatcccctcaactacccagtggagtcaggattattaatctcttcctctatacgtgaggacagtgaatccagagtggcttgctggtgctgaatagatcatgttgtcttacaacttgagcttttcccttgttcctttccctatttgtctgctgaactcatctgtctccaggttgtaaatgagattctcctctgaagagcctctgagccccctgtaactctattcttgtattgcatgacgatactcttgttctttaggtttatacctctttctccccttaagacctaaaactcgatctgggttactctagagcccacaggtttatattgcactgctctgcccacattccagccttctccactttaacatatgacttgatgatagcttttcagacccagtccctcacaagatacctctttttcaacccattattttagaccttctttacttgacatattttgagttttctggattctaggcttccttatcgttagtgtcactttccccccttctgttacatgtctgttaccttcttgctatttgcttaggtcctaccttaactttgaaggaacgcttttcaaacccggcctgcatcggaattaggaatcccaccctcagaagttatggtttagtaaacctgagagagtgtgggagaatttgtattgcactcccagatgatcctgaaactgtcattctgtgggcttatgtttattagcacttctttaaagcatagttcaagacctctgttttccaggatatttaactatcttagtccaaagtctttcctttcttccttgcctccttctctctctcctctttgtcttttcttcttctcttcctcccttctttctcccaccctcctctctctttcttctcatgaagtccatatgatatcctgtctgaattacataactttttttttctttttgtggagatggggtctcactatgctgcccaggctggtcttgaattcctaggctcaagcgatcctcccattgaagccttccaaagtgctgggattacagtcatgagccaccacatctggcctgaattagacaacttcttatttatgtggatctcagaagctccatcatccacttcttaagcctggtaaacacttttattagataagagagacagttttgcataaatgaacaaaaatctagatgaaaagttctcgaatcctgaatcacatcttgccataacctcttactagccgtgtgttcttggacatcttatggactggagtttccttgtctctaaaataattattccatttccttgtactgcagaagctcatgaaaaaggtcaaatgagatagcgggtgtataaagtgctacacaaatgcaatgatgctaatagtaaattattgttgatgttttctttgtttctgtacagttgactcatttgctttatcattaatgatgaggcatgaaagaaatgctgcttgtttttaatgaactatggaagactaggtggagctgacgggatgttgggatttcaggaaagctcttttaggtttctggaaatgatactcataccaatagttgtgagcttaggttgaagagcaatgttgtatttatactataatttttcttcaaataaactgtgataaagattttgaatattactttcatattctgaacttctcatgtacacttgaaaagagtcatgaaatagtagtagcggttgccatttataggggtcgtagggtgttgttatggttaaatttataaatccttaaaattatgatttctatcacaaaaatgcctaaaagggtgcattctctaggttttttccttctttcattcccttccttccctcccctccctccctccttcccctccctcccttccttccttccctctcctttcctttcttctcctttccttttccttttccctctcctctcctctcctctcctctcctctcctctcctcccctctcctctcctctcctctcctctcctttcatttttcctttcctttctctcgctctgttgctcaggctacagtgcagtggcacaatctcggctcactgcaacctccacctcccgggtccaagcgattctcatgcctcagcctcccaagtagctgggattacaggcgccctgccaccacaccaggataatttttgtatttttagtagagatggggttttgccatgttggccaggctggtctcgaactcctgacctcaaatgatttgcccattttggcttcccaaagtgttgggattacgggcgtgagccactgtgcctagcccctctaggttttcttaagaaaacctatctattcctcaagtgcttactctgcaaagcctaggtctgccaccaaggaataaaaatatggctaaatgtacttcctttcctcccagagttcactgttcaataggggacacaaacacataaataactagctcttgcaccaagcgaaatgtacagtgcgacaaaggagaggtacagatagtaggctgtgggcccgaaggagggtttccgtgggcgtgagtatgaaggaggggtttcctgaaggagggggtatttgaacaacccttttgaagactaaaaggatgtccgcaaatgaaatttagggtagaaacatgccagaaaaaggcacagtgttttcaatacgctaggcatttcttaaactatttatagctgaggttatgggaaaagagatagtagaaatatgagaatatcttctccaaagattctatgctaatatcctgatccatctgactatgcttatttgactgctttttgtgtttgtcttcttctttactggatatcctttttgccgcttcctttctggaattttctttcctggccattagcctctctctcctacaccgttgcctcactctcactgccatactcctttggacatcctccttctcttgtttcctaatacttttacatccccttccatcctttactccttagcttttgtttttatttgcagtgttaaagatagcctctttttatttccctgtagtgattagatcgacgtgtttacaatatgaacacacaggttttctcttcttcaggctctgagtcatcgagttcacaatgccatgtctagtcagtacttctatgtgtgtatagtgcccattgtggccgagtagagataaggtcactggggaagaaaataaatcgctaaaatctgttagaatacgtcagcttccaggtttgtctgaggatgcagtggaaaccacgttctgtggccagcatgtcagtagcttttgatgatcagagccttccattttgatactttaaaataatgtaatctaagttcacatcaactgaatccagacagtttcaccatccaccacattattaattccagatgggaaaattcattagggctcaaattttgtttgagacccaactgttttttaaattattattacaattattatctatttattttatttatttttttttttacaactgatgggaagggaaatttaacagctgtgtgattagcagggcatgaaattaaaaacgttttgcacagaatcaagaggttgtttactacagaatttgtcatctgagaattaagtgtcattaagactgcccacaggatgatctctttcaccattcaagctttgatttccacgcccggttttttgctaaaaggcctttaaccttttctggaaggaaaatgcatgtggatttatcacgaaggtaccatcagcatttcaaatgctaagtcaaggtaaaaacgacactcttgtctgtcacaaaataacagtacaactagatgttcagcctcactgctctcagcaaagagtgagttccaatttgaggaaatcaggtaaattagaaaaggctgcagctggattagtggcttcactctttccctctaaaactgtaggagtttcatatttccatcaaggcagctcaggtccctagagcatgatgtttacccttacattttcctgggtgtatgggctctttacgtctttggtctctttgcaaacgccctccttcgactgagctctagaaagtactctgtcctgggctgagcgcagtggctcaagcctgtaatcccagcactttgggaggccaaggcgggcagatcacgaggtcaggagttcaagaccagcctggccaacatggtgaaaccccgtctctactaaaaatacaaaaattagccaggcatgatggcgggctcctgtaatcccaactactagggaggctgaggcagaagaatcccttgatcctgggaggtagaggttgcagtgagttgagatggtgccactgcactccagcctggacgaaagagtgaaaactccctcccaaaaaaaaaaaaaaaaaaaaaaaatactatgtacttgttcctttgggcaagatgttggcagttttctgcagaagcgtggtcaagcacattagctggactgtcttggtcgaggtttgaaggcaatgccatttgcttgggcaagttacatggactctctgcagttcatttgcctcatcatcctccaacttaatgaaggtaatgacagtatctacctcaaggattactttggggattcagagttattaccaaaaatgtttaaggccctgcccgactcattgtttatgctcagttaatgttagctatctccatgcttttcagtcaatatattgcattgtgtttggaagtcttcatatctagtttcatacctgacacagacttgcttaacttctgccctggaatctttttgctatccctgtcttactgtctttaatagagcctttcttatttgatacttatttatatacttgccttcgttcgttttttagacaaattttattttcatatttgttgaattaaaccagacacagcttctacacttatggggtttcctttctgggagaatggggctggtgacaattaatgcagaaaacttttattggagatagacatgcaaaaacactcagagatagagttgaggaatttgtagtcattagaggagagagatgttagttttggctgggattggagttaaatggagagaaaataaaggaagactttctggaggaggagggttttgatctggaacctgcacgctcattagaatttgaattcgacctggcagaaaggggaaaagacttcccaggctgagtgaagttttggagctgcacattttattttatttttcatatttgtttcctgctgccctctggccaccattcagaccgtttggaggcctgttattgtaggtgggacctaagttccagcaccagtagatgtgtgagtgaggcttttatagtattgatgtcttgtatttaaaatgaacagaggaggaagccctggagtccattctaataaatgtatttcaaagggggctttcttcttttgtctgagtgagaggcaggaataggaatgacagaggcagcaagtgttggatgtctgtagaagaatcatagagttctctttagagcactaaacagagggctaataaagggctattgagtcctccttatgtttttttcctctctcagatgagttttaagggtaatagaagcgctttttttttttttctggtgacctcttaatcttacttttctctctttatctcttccttttcctagaagctaatattaaaaccactcttgtcctctgccattaaaaataaatctgggtaggtttcagcaagagagtatttcctagaatgcattatattctgggcagtagaagtgtatgtttaaatacttttcctgtagaaggtcattatgacaacagaggatgccaccagcaaccctgcagtatgtggtgaatgtgtttccacgctgtgtctgtctcgcctctgctctctgccatgtcaagctgattttaagtttaccgtcacttttagtatgtgacttgatgaggcaccataatgtgtgtgttgctggccaaacattacatgtcatgactgtagaatcatgagactggagttttagcctagaccttagaacacgtacctgcaagaggtagttattcgagcagcagtctttgtgagactggaattcaggcacagggaacacttgttcctaagttgctgccccgttgctcaaaacatcttggtaatgtctttctttctttcttttcttcttcttttttttttttttactctgttgaatgttatcttttattttgtttttattaaaaaatcaatttccagctttatcaggatataattgacgaaacaaaagttatgtatagttaaggtatacaacatattttgaggtacattgcattgtgaaatgattaccctagtcaagctaattaacataggcatcacctcacagttacctttctgtgtatgtggtgagaacgtttaagatttactctattagcaaatttcaagtgtacaatacagtattaactacagccaccgcactgtgtattaaatctccagaattattcatttggtatcactggatctccctttgaccaagaaccaagatctcctcattcccctggtcccggtagccatcattttgctctgcttctatgtgtttgacttttttaatttgcacatatcagtgaggtcacgcagtgtttgtttttctgtgcctggcttagttccttaagcaacatttcctccagattcatccatcttctcgtaaatgacaggatttccttctttgttaaggctgaataacattccacgtggtaatacaccgcattttctttattcactcttcaaatgatggacatttagatcgattccacatcctggctattgtgaataacgcagcagtgaacatgggagtgcaggtgtctccttgagacactgattttgccttagaggggattctggggctgggctccgtggtgaagggcactctctttccctcacctggaggttatgtcagcggtgtgctgggggttgtacaggtcatgttaagctgtccttcctgccttcctcaatgcgtcatttcttatttctatgttccacccaggtgctgcactctcgcctgaattccttaacgtgtgtgaggtattttggtgtgtggctagttgtttagaagtttctgagagggaatgagtgctggaaactctattttgtcatttgccaatgtaaccccacattggaattgtcttcagagataatgaagagccactgctaaaatcacagactcatgagatgtgaaagcggggaatctgtttagctcacatgcgtgtgagaaagctgagaccctgagacaaatattggcctgtgctgcaggctttcagttagacagggacagcatcagttctcattcccttgttagctctatgcctgatgtcttctcactgttttgctgcattataaagaattgattttttttttttttgagacagagtctcgctctgtcgcccaggctggagtgcagtggtgcgatctcgcctcactgcaagctccgcctcctgggttcaagtcattctcctgcctcagcctcccgaataggtgggactacaggcacccgccaccatgcccggctaattttttgtatttttagtagagacggggtttcaccatgttagccaggatggtctcgatctcctgacctcatgatccacccaccttggcctcccaaagtgctgggattacaggcgtgagccactgcacctggccagaaagttgattcttagttaagcctatgaatagttagaaaaaaaaaagagaagagagaaagttccccttagcatggcctattatcacagggtatgtttgtagcagagggagaacccagtccttatagagtgggttatggcttcttctacattccaagaaaatctcaagaagtagaaatcactctgagtgtcaaatattttagttgcctattgtcacatctattataaaatagatctggtatagataaaaatagagttaaacatactagttaatagatatatctggtgtggataaaaatagaatttagcatactagttaatatataaatatgatgtcgataaaaatagagttaaatgtacaagttcctaattggattgtagaacttaacattcaggagtaaggatgctgtcaagtctaaagctatgcccttatcctagtcagttgttatattcatggcagccttttctaaaatgtgctccatgaaatactagattcataaatggtcaaatcactgtgggactcttgctattatttccacccattgtggagattcttgatgcatccccaacaagtttaactctgagaagtcgaacaggcaaaagcaataagcacaactttcttttctcttatgttagattcaggttttgtccaatttattttataatggaaccattttgtggatgatttcccagacttgtgttctgtggaacattctttggatagcatgactttattgttaaaattcttaaggttcacatctgtcatcttataataatcttgtgtgaaatataaagtcatttgggctaaactgtagacctccatctgccctcccttccccacaggagaaattacaggtttatttaaggatcaaacagttttgaaatgaaatgttgttaggagggggaaataaaaacctttcagagcttaataattgtagaaagaagacagtgttataccggccaaaccaattttgtgaattagcactttaactcagagagttgttcctgaaaatagcttgtttttaagcaaaactttgttggcttctggtggtacactttttcaccatcaaaggcacaaatatgggtgattttaaactgtggcatactttttttgcattcaaaaccagggcttgtggaagaaacaacacccttttttaacttttcagaaacagttggcttgaccatcatggcttttttttttcccctatgtctttaggatattagcttttcgttaagctggaagggtcctcagagatcttgtccaagcccacccttgacagatgaagaaatagagggccagaaggctttagtaatctttccaagtctttttattagttactgacaaaatcagaactaaagtcaaggtctcttacttacctgtcatttacctgttcaatgcctcttttgtttgtacactctgttaaaaagaaagaggttaactgtttcttttggttataactgttatactacaaacacacacacactcacacacacacacacacacacacacacacacacacacaagagagagagagagagagagagagaacagatgaaagccatgattaggaacattttatgctcaaggtgagaagaccctctataggacctcgaatgtcttcttttctaaagaacttcatctacctcgggtcagtcctttgatactattcactttgaaaactggtttacctgaaaggaagaggtgtgtgtgaaagagagggtcacccgccacattttatctctctgtcttatttcaggcagacagattcactacatcaagatggtgtttacagttatcgccatgagatgaactagctcatctccaagtgcttaagggatattgcctggttataaatcatcatgtgattctctctcctcccacccccatttacagcttctttcttctttctccactgcccatgtctaaacctggggaactatctcactgcatagacagaaaaggaaggtcagatccaaggtagatctttctttctgctaggtttaacctagtgatagcaacaaaaacagttcttatgcctctgagtttcttgttttaggcagaagcatttgataggttggggatcacaggaaagtttttttttttttaaattctccattaagaagatgctaatgtacttgtgaaggcaagtacattaagcttagtaatggaagatatgggttctaagctgcacctctctgccaactagtagtgagatcctggggaaatcaaacaatcgtttggaaccacatgtggcctagtcttttcattatgacttcaggagtcataattcttgtcttgtcaacctcctggggttgttgtgaggattaagtgagataatagatatgaaaaggcttgtaaactacaaagcatctcatacatatgtgtaaggcattgttattatcaataataatagcaaccacacactgctgcctttgagctaggtactgttttaagtgctttccgtcgataagctcacttaattctgacagcaactctagtgtaccaatgaccagtgctgggcgctgtgaatcagcaggactggcagctcaccctgattagctggtgatttcctgtgttcttgggcatgtcctttcccttccctaggcctgaattttactctttgtaaaagaatcacagactcaggttggatggaaggattcttctgttctgtcatttgtgattttgtcaggcagtcattggccccacaggctaagtcactgattatttctatttatttatttatctgagacagagtctctctctgttgcccaggctggagtgcagtggcaggatctcggctcactgcaacctccaccttccggattcaagcagttctctgcctcagcctcccgagtagctgggattacaggtgcctaccaccacacccagctaatttttgtatttttagtagagacggggttttaccgtcttggtatgactggtcttgaactcctgacctcttgattcacctgcctcggcctcccaaagtgttgggattacaggcgtgagtcaccacacctggccagtcactaattattaatcacagcccacatttaactgagtacagtcattagtttcattctacagctatacagagagctcatgtaaattcctgaaggctgcaccgcctacaagtggtggggctggagttcgcacgttgctcttgtgccctggagtgatggcagcaagatagatgtgggtaactctctagcgatcccaggtgtgttatgttgtcagcatcctcatctaatcaacatgatgattatcattgagccttttaggttttcagttgttgttatcatttaactcctcaattagattccgagcatctcgatggtaggttttctgtactgcaatgtgtattgccagtgttttatgcaagatatgatgcaggctagtgtctcacagtttacgcaatttgttttccgtccatcctttcgatcctttgagcctctcaaggaagcctgggttggcatctgcccaactgtgttgggcagaatggtttttttctcgttgcccgacatggggctgggaaagccatttgaggaggtcgctgtggcatgaatctggacaagtctttctataggggaaacctgtttcaagctgtggctctttcactttctacatggcatatggaccctgatttttctcacgcctgcgtaactctactggtgtctcttggctgtcgcagctttgttttgctttgccattgttttattttattttttctgaagacttggttttcttgggctctgcttatatacaacacaaaatttgtagaccatttgcttatgggaaagagtcacacccacggaaattgggagaaaattaactcttggagcccaaagaaactgacataaatcttataccacgaacatcttcaatttccgactttgccttccttctctgtatggtgctgtaccaagatctcttattgggaccaggtttcatggagggttactggtaactattaacccactcaatgtacttattttaccattaacctatcatgaatagcctgtccaatccccattaaatgacccactatgggggtcattaattcatttatttatatatgaattatctacattcatttatatatgaattattagatattatctacactgaaccaggcaaaattggggataccaaaatgaattagacacagttcctgctttcaaaaacctcatactctgaagaggggagatttgttaattctgtcaagtcatctttgatgcctaccatgaccaggtatcagacatgctactggaactgtggacatctggcaggtacaagcctattcatcacagggtttcaggtctagggaagaaaaacatcatattaataattttacaaataattatgtagttatagttgtgataggtgccacagaggaaagactgagtggtgggaaaatatatatatatatatatatatatatatatatatatttttttttttttttttttttttttttttttggagatggagacttgctcttgtcgcccaggctggagtgcagtggcgcgatctcaactcaccacaacctctgcttcctgggttcaaacgattctcctgcctcagcctcccaagcagctgggattgcaggtgtgcaccacgacacctggctaattatttttgtatatttagtagagacggggtttcgccatgttggccaggctggtcttgaactcctgacctcaagtgatccgcccgtcttggcttcccaaactgctgggattacagacgtgagccactatgccaggccagttgtgggaattttataagggctttttcttttctttttttttttctccctctggcctagtttgtggggagaggtatgtttccccaaagatgtggagttagcctgttgatgtaggcatgggagagtgagcttagacagagatgcctctcatataaggtagaaagccttccatgcccaacccaagtgttgtagaagttgaaaggggaaaaaactttttcaaaattggcttgacagcaaaactcctctcagtgtcttcttttttgtccccctctataaatggtaggttttcgtagtatcatgaccctttttagtaattataaattaatataagataaatttatggtattccttactatatagatttgttaaaataattcacgatatttcatatgtacacacaagctccttcaatccaattagtaagaaaaacacttcatgtcactgttaaataacatgaaaataaacaactggttaaaaaacaaaacccaaatacaaagcgttgagcttcctactggaatctgaatctgggagtgtcttgttgtaagaaatgttttcagacctatcattttcttttgtttctttttctttttttctaaacagactcttgtcagttctcttctgattagtgttcccctgggcttttcttcccaaaataaagttaagtgcattcaagtttctgggatcttctttacatccttttgaaaatgcagagtaaatattatgttggcttctttttgttttttttttttaaattttattattattatactttaagttttagggtacatgtgtacaacgtgcaggtttgttacatatgtatacatgtgctatgttagtgtgctgcacccattaactcgtcatttagcattaggtgtatctcctaatgctatccctcccacctcccctaaccccacaacaggccccggtgtgtgatgttccccttcctgtgtccatgtgttctcattgttcaattcccacctatgagtgagaacatgcggtgtttggttttttgtccttgagatagtttgctgagaatgatggtttccagcttcatccatgtccctacaaaggacatgaactcatcattttttatggctgcatagtattccatggtgtatatgtgtcacattttcttaatccagtctattgttgttggacatttgggttggttcgaagtctttgctattgtgaatagtgccgctataaacatacgtgtgcatgtgtctttatagcagcatgatttataatcctttgggtataaacccagtaatgggatggctgggtcaaatggtatttctagttctagatccctgaggaatcgccacactgacttccacaatggttgaactagttcacagtcccaccaaaagtgtaaaagtgttcctatttctccacatcttctccagcacctgttgtttcctgactttttaatgatcaccattctaactggtgtgagatggtatctcattgtggttttgatttgcatttctctgatggccagtgatgatgagccttttttcatgtgttttttggctgcataaatgtcttcttttgagaagtgtctgttcatgtccttctcccactttttgatggggttgtttgtttttttcttgtaaatttgtttgagttcattgtagattctggatattagccctttgtcagatgagtaggttgcaaaaattttctcccattctgtaggttgcctgttcactctgatggtagtttcttttgctgtgcagaagctctttagtttatttagatcccatttgtcaattatggcttttgttgccattgcttttggtgttttagacatgaagtccttgcccatgcctatgtcctgaatggtattgcctaggttttcttctagggtttttatggttttaggtctaacgtttaagtctttaatccatcttgaattaatttttgtataaggtgtaaggaagggatccaatttcagctttctatatatggctggccagttttcccagcaccatttattaaatagggaatcctttccccattatttgtttttgtcaggtttgtcaaagatcagatagttgtagatatgcggcattatttctgagggctctgttctgttccattggcctatatctctgttttggtacccgtaccatgctgctttggttactgtaaccttgtagtatagtttgaagtcaggtagcgtgatgcctctggctttgttcttttggcttaggattgacttggcgatgcaggctgttttttggttccagatgaactttaaagtagttttttccaattctgtgaagaaagtcattggtagcttgatggggatggcattgaatctataaattacctttggcagtatggccattttcatgatattgattcttcctacccgtgagcatggaatgttcttccatttgtttgtatcctcttttatttcattgagcagtggtttgtagttctccttgaagaggtccttcacatcccttgtaagttggattcctaggtattttattctctttgaagcaattgtgaacgggagttcactcatgatttggctctctgtttgtctgttattggtgtataagaatgcttgtgatttttgtacaatgattttgtatcctgagactgctgaagttgcttatcagcttgaggagattttgggctgagatgatggggttttctagatatacaatcatgtcatctgcaaacagggccaatttgacttccttttttcctaatttaataccctttatttccttctcctgcctgattgccctggccagaacttccaacactacgttgaataggagtggggagagagggcatccctgtcttgtgcccattttcaaagggaatgcttccagtttttgcccattcagtatgatattggctgtgggtttgtcatagatagctcttattattttgagatacgtcccatcaatacctaatttattgagagtttttagcatgaagcgttgttgaattttgtcaaaggccttttctgcatctattgagataatcatgtggtttttgtctttggttctgtttatatgctggattacatttattgatttgtgtatgttgaaccagccttgcatcccagggatgaaacccacttgatcatggtggataagcttcttgacgtgctgctggattcggtttgccagtattttattgaggatttttgcatcaatgttcatcaaggatattggtctaaaattctcttttttggttgtgtctctgccaggctttggtatcaggatgatgctggcctcataaaatgagttagggaggattccctctatttctgttgattgcaatagtttcagaaggaatggtaccagctcctctttgcacctctggtagaattcggctgtgaatccatctggtcctgaactttttttggtcagtaagctattgattattgcctcaatttcagagcctgttattggtctgttcagagattcagcttcttccttgtttaggcttgggaggatgtatgtgtcgaggaatttatccatttattctagattttctagtttattttagaagaggtgtttgtagtactctctgatggtagtttgtatttctgtgggattggtggtgatatcccctttatcattttttattgcgtctatttgattcttctcttttcttctttattagtcttgctagtggtctatcggttttgtttatcttttaaaaaaaccagctcctggattcattaattttttgaagggtttttttgtgtctctatttccttcattctgctctgatcttagttatttcttgccttctgctagcttttgaatgtgtttgctcttgcttttctagttcttttaattgtgatgttagggtgtcaattttagatctttcctgcttctcttgtgggcatttagtgctataaatttccctctacacactgctttgaatgtgtcccagagattctggtatgttgtgtctttgttctcgttcgtttcaaagaacatctttatttctgccttcatttcattatttacccagtagtcattcaggagcaggttgttcagttttcacgtagttgagctgttttgagtgagtttcttaatcctgaattctagtttgattgcactgtggtctgagagacagtttgttataatttctgttcttttacatttgctgaggagtgctttacttccaactatgtggtcaatgttggagtaggtgtggtgtggtcctgaaaaaaatgtgtattctgtcgatttggggtggagagttctgtagatgtctattaggtccgcttggtgcagagctgagttcaattcctgggtatccttgttaactttctgtctcgttgatctgtctaatgttgacagtggggtgttaaagtctcccattattattgtgtgggagtctaagtctctttgtaggtcactaaggacttgctttatgaatctgggtgctcctatattgggtgcatatatatttaggatagttagctcttcttgttgaattgatccctttacaattatgtaatggccttctttgtctcttttgatcgttgttggtttaaagtctgttttatcagagactaggattgcaacccctgccttttgttgttttccatttgcttgatagatcttcctccatgcctttattttgagcctatgtgtgtctctgcacgtgagatgggtttcctgaatacagcacactgatgggtcttgactctttatccaatttgccagtctgtgtcttttagttggagcatttagtccatttacatttaagtttaatattgttatgtgtgaattcgatcctgtcattatgatgttagctggttattttgctcgctagttgatgcagtttcttcctagccttgatggtctttacaatttggcatgtttttgcagtggctggtactggttgttcctttccaggtttagtgctttcttcaggagctcttgtaaggcaggcctggtagtgacaaaatctctcagcatttgcttgtctgtaaagtattttatttctccttcacttatgaagcttagtttggctggatatgaaattctgggttgaaaattcttttctttaagaatgttgaatattggtccccgctctcttctggcttgtagagtttctgccgtgagatctgctgttagtctgatgtgcttccctttgtgggtaacctgacctttctctctggctgcccttaacattttttccttcatttcaactttggtgaatctgacaaatatatgtcttggagttgctcttctcgaggagtatctttgtggcattctctgtatttcctgaatttgaatgttggcctgccttgctagattggggaagttcttctggataatatcctgccgagtgttttccaacttggtttcattctccccgtcactttcaggtacaccaatcagacgtagatttggtcctttcacatagtcccatatttcttggaggctttgttcatttctttttattcctttttctctgaacttctcttctcacttcatttcattcattttgtcgtccatcacttataccctttcttccagttgatcgcatcagctactgaggcttctgcattcgtcacgtagctcttgtgccttggttttcagctccatcaggtcctttaaggacttctctgcattggttattctagttatccattcgtctaattttttttcaaagcttttaacttctttgccattggtttgaatttcctcctgtagcttggagtagtttgatcatctgaagccttcttctctcaacttgtcaaagtcattctccgtccagctttattccattgctggtgaggagctgtgttcctttggaggaggagtggcgctctgatttttagagtttccagtttttctgctctgtttttttcccatctttgtggttttatgtacctttggtctttgatgatggtgacatacaggtgggtttttggtgtggatgtcctgtctgtttgttagttttccttctaacagacaggaccctcagctgcaggtctgttggagtttgctagaggtacactccagtccctgtttgtctaagtatcagcagcggtggctgcagaacagcggatattggtgaaccgcaaatgctgctgcccgatcgttcctctggaagttttgtctcagaggagtacccggccgtgtgaggtgtccgtctgcccctactggggggtgcctcccagttaggctacttgcgggtcagggacccacttgaggaggcagtctgcccattctcagatctcaagctgcatgctgggagaacctctactctcttcaaagctgtcagagagggacatgtaagtctgcagaggttactgctgtctttttgtttgtctgtgccctgcccccagaggtggagcctacagaggcaggcaggcctccttgagctgtggtgggctccaccgagttcgagcttcctggccgctttgtttacctaatcaaacaactaactgggcaatggcaggcgcccctcccccagcctcactgccgccttgttgtttgatctcggaccgctgtgctagcaatgagtgagactccatgggcttaggaccctccgagccaggtgggggatataatctcctgatgtgccatttttaaagcccattggaaaagctcagtattagggtgggagtgacctgattttccaggtgccgtctgtcatccctttctttgactaggaaagggaattccctgaccccttgcaattcctgggtgaggcgatgcctcaccctgcttcggctcgtgcacggtgcactgcacccactctgctgcacctactctctggcactccccagtgagatgaacccggtacctcagttggaaatgcagaaatcacccatcttctgcgtcgctccctctgggagctgtagactggaggtgttcctattcggccatcttggctcctcctccctatgttccagacatatcattttcattccacatgtatttctttgtttattgagtgccttccatgtgttaattactttattggattcctgggggtgagaaggggaagggtgtgggcagggccactgcttacagctgctcaagttgtgccttgcttgagggcaggagcgcaagtggggctgaagtcctgccctccccactagccaggccaagataaggaccattttctttctttttttttttcttcctaatttgcacaaaagatactaatgattaacagagatcctggtatggaaacataagacacaagtttggttttgtctgaaagcactggtagtttagttggtgaggcagccacaaaactaaccaaaagtaattatattgccagccacaatgaaatatattaaccagagatacaaatgacattctgagggggcttggtggaagtagtttaaccctgatagggtggggagaatcaattcttacaactttcgaagagactagttggatgggcaagttttcttaatagctttattgagacataatttaattaattaactcaaagagtagaattcagtaatttttaatatattcatagagttacacagccgtcaccaagatcaattttagaatatgtccctcaccaaaaaacaaacaaacaaaaccaaaacaacaacaacaacaaaaacacatagtggtcgtttcttatttctcccaaatctcttgcatccggtactaagcaaccacgaatctactttataatctgtgaagttgcccattctggacattttatataaatgtccatacatttatataaacatcatacaacatcatacaatatgtagtcttttgttactttgtttctttcagttaggttttcaagattcatctatgttgcagcatgataagtaggcttttgattggtgaagaatagaagcaagtttaccccaaaatgatgcattagggagagctaagagattaacctttgtaagaaaccacggtctgtgtttgaaaggttgaaagtagactattgggtctgctgactagggcctgtagggaatgttacaggaattgaagttagaaatataagttgggagcagatcatggagattatgaatgcttggactttttctgagatgcagatgtttttgagaggggaatgatatgactagagatgtgtatttttctcccccataatgagaaaaattgatgaagctgtaaggtcccccaggttggtagtggagaaccaggtgtgaaatcatgaacaactccctcccaagtacttttccctcatattccactgcctcttactttttatgtttgttagctggagcaagtagaaaaagcacagatgatttgttttctgttataattattttttaaactactagaggcatggtggaaaattaaactcgatagattatagttataaatgttgttctttgggcacttgccatgaggcagcattttcatggcaaaccctactttgtatatttttgtcatattatgagaaagaggccctcttctgggtcacatgtttgcctctgcaggactctgacctgtcattttagatattgagtctatccttgttttgatttcctttggactcatggccttgagtatgtcccttatgttcatttgacagattcctgccaatcaaatggaagacaaagctatcccgagggtagttggcctgtgtttgcatctcttgtagccaagagaaatccctcattgcttgtttctgagctactcatgtcacagacttttgcaagaggaaggatttttgagattacatggttcaaatgttattaaattaaggtttagtggtccatgaacctcctgaaattgtttgcaaaattatctttaattgtgtggaggtgtatttttctcccccataaaattctcagatggattgcatccctgtaagggggaagaatcatttatccaccaacaatattgaacttttattgagtatttacactatgccttgtagaagacttgtgttatctcattcagtctttacagcccattctcatggattaggaaactgaatcatacagtagttaagttgacttgcccaaggtcacagagctagtaggtgacagaacctagattcagaccctggactctaaccccagagcctatgtcttcatccttctgcattttcaaccttcatgcctgctttgcactattctagtttaccttttataggctctggagttgatggagtctcctttaataaatgggtagtggaggcccagagagaagtgaaacatgtctaagatggtcctgtgattaaagacacatagctgttaacgtgtgacacgaatgcaaacaccaaagtcagattatgaggctttaacacataatttctaaatttaatttaaaatgctcctttttgacctttacttctgctattgattttcatcttttctcttttctccttcttaccccttctcttctttcctcttctgctctcctttcttcctgcttttcctttctttcttcagcaaccattactgagcatttaccttattggaattattggattaggtggaattattggtaattgtgtgttttcatgttactaaaatggactgtccaactcttctgtggccaacatctctttactctagaaggttctcaaaggagttaccacacatgaaagaaggttggggaaagcaaagtacccgaagccagtgctttacactggtacacaggagtaggtacccactttccgattcgggggactggattgtgtcattcattgaaatatgaaatagtgaaggaagcttcacttttatatcggttgggggtagcgtgagagttgtttgagcttttcacttttgagagcttttcaaatgaatcgccttatagttaaagctggagattagaagaaagatcaagactaggaaactctttatttaaatgtcaatatttaattgacaattaactgttgttgatttaaattaaatatatatatatgtatagagtcttgctctattgcccatgttccagactcaagctatcctctcacctcagcctccagagtagctctgactacaggtgtgacccgatacacccagctatttttttttttttagattttgtagagacaggggtcttgctatgttgctcaggctggtctccaattcctgagctcaagtgatcctcctgcctcagcctcccagtgtggtgggattacaggcataagccatcatgttcagccagggaatgtttgaagatagagaaaaaagccctgctttctccattccttctacggtttggcacccagttcatatcccatttgcccagatgctcccttttaatctttcctaatgcaggccatagacattggtctcagaattcttgtaagtctacttttgtcactcaattgtgtgaattgtgtgtttgtacaggtctcctgcatttactaaatatagtggaaatcatatttgcctagagatcagtagacctgtgcattgaatctaggctttgttatttgctatttgtgtgattcattgattgattttctttcagcatcaaattctaagttaataaaatgagattaataataatgtctaccctgtctctctcacagaattggtgttcactttttaactgtgaataatggatgtgatggctctttaaaaagagccttttaaaacaaaatgaatacttttttctacatttacatgtgtaattatgatgtttgtttgttttttcccactctctgggttaactctaaactcctttggattttaaacgcctttggacacttttctttttaaccctccttcatacctaagacagtgctatgtatattgacatttaaatgtacagggctaattatggtttcgtttcttcacttttttgttgttgttgttgttccttttgttacacatttattttgaagattttgttttcctggaaattagtgggatgttaacgtctccttaaagaactcattctttgtctttcctggttccccctcttatcctctgtaacctgtgacctcctcccaccatctgaggtggatgtctcctgaagttcttactctgtcccagcaatgatgaccttagtgtgtctactgactcttaaaacccgtagggacataggatccaactgcctcatagaaaagtaaggccgagagagggttactcctatatttggttcaagtcaatctgggtgctggtttataaacaatgcctattcagtgctctgcactaaggcatactggtgttatgcttctatttttgcctttattatttttaaagttttttggatgaaattactgacgttgatcacatattaaaaatttatgaggattctatttttgggttccattctatttaattctagctgaaatttgcttctcttttttatcctgttatggtacatttgttcctagacataatcaggaatgacaccagacacagactatattttggtgtgtattagtgagaaaatttagtatgtttcttttgtcatgttgaatgtagacactatggacaatgtttaattaattttaattgatttttgttgttgttattatctttctcaatttcctctgctttcttcttacttccttagcatggtatgccacagatagggacacatttcatctgaaagatgtatactatatatggatgtctttgcagtttcttcagtccttttaattacataaaaatcttaataatattaaaacaacaattatgtaaattttcaaaagaatttcaaaagcaatgaagaagaccactgttcagaacctcaatttctgaacctctccttacttttccttcttccttttcagccagtccttgctcaactctgaatatattttgacaatgtttcaattataatatatgcagaataatttacttctttcacttaacattatttttaaatgtcaatgttgctacatattccaaattactttggaattcattatatattattattcttttatttccactagatttatacttaagacagaatctcaagagtgggatatttgggtcaagtagcatttacattttggctcttgaaataactaccagcatgtcatttccaaagagacgttaatcattgacaccaccagcagcaaatgttctcattcatcagaccacatttgttttacacgttcctctccttagaaagagataagtatggtttcttttctttagttcttgctaataggatacccaacatattcaaaatggtactccattgttttaattctcatcctctctgaccattagaaatattttgctccatgtgtctttgacgaagtttatgtattgttttatgaagtgtaaattcttgcccttgcccatttgatctattgagtttatgccttctttctttatttgggatccaaaatatttattaactctctgcctgacctatttgttccaaacattttttccaagtctgtttgcctttttagttatggtattgtatgtttgtgcatgtgtgtgtgtgtgtgtgtgtgtgtgtgtgtgtatagatctacatacatgtgtacacaccatatatatatggcttataatggggacagaatcacttagcagatgggcaaccctgatgatccaggtatttacgaagggactcaaaccatcttcagttgtctaggtattcagaagaaaaaaattcagaaggctgggcgcagtggctcacgcctgtaatcccagcactttgggaggctgaggcgggcagatcatgaggtcaggagattgagagcatcctggccaacatggtgaaaccccgcctctactaaaaaatcaaaaatcagccaggcatggtggcacatgcctgtaatcccagttacttgggaggctgaggcaggagaatcgcttgaaccacgaagtcggaggttgcagtgagctgagattgcgtcactgcactccagcctggtgacagagcgagactttgtctaaaaaaatttcagaagtcccggagtcctttccatgatgcatttgaagggccagagagatagaggcatgccctatgtagtacatcttgctgctgtccctcgtgtgtttactctatgggtcaaatgagatggtgttggagcaatcaaaggatacagaccagtacccagcctttcttgtcaagactttgcctctccttgggatgttcacacacacctacccctattttctttagggatctagttgcttacttattttagacagtacatcctttatggccttgctgaaatgtaactccttgatggaatctcctctggtttctttctatctgtccacctcaattgagaactgatttccttcccctgaacccctcaccttcccatagtgctttagctgtagcttctttattcaatgtttcactttttactttggaccagagatatttatgaactttacaaaatctcttttaaggcagatatttcagttctctttgcattaacacaggacttgttggatgattgagtaagcgtgtgggggggtgtgaagagagggttcatttgttccttcctcgtgacagagctgagaggggaagggcccttgctggtggtggatgggccctgagggttaattgggctgagtgtggccacaaagcagaaagacttgctgtgctttctgaacttacgtaagttacaaacactattaaaatgtcacaaacaaataagagaatgaggactgtacttaggttccatacttgtggtatggaaagctatctaaaataaaattagctacatatctctgcagatttctctgattcactctacaaagaagcaagtgtttaatctaattctgcaaatatttgagactctttaccaggcgttgtggaacatgctttatgactggaaaagatgataaaggcatagtttctgccctaaggagctgtttgtgcatctgttggaggatatagatattttaacaggaagattctaacactaggtaggctgggtcctttgtgataaagtctgcattagaaatatgtgagaagaaaagattaacctgagtgcggtctctcatgaagttgctagtatactcttctttctttatgcatttaaccccaaaattatctctactgagatgattcttcttttgtatgtcaaattttacttggcttctccctcaccctgactcctagtcccaccattttaattttatcatgatttgaataatatcacaagggaatgaagaatttattctttttttcaataggtgaacaaaaaaaagtatgagaaatgattgatgtgtatttcaacattgagaaaacccaaggaattaggaagaaagttctctggcatatcaggaaataggaaatgatctcaccaattgnnnnnnnnnnnnnnnnnnnnnnnnnnnnnnnnnnnnnnnnnnnnnnnnnnnnnnnnnnnnnnnnnnnnnnnnnnnnnnnnnctctactgtctttcgtagatgatttcttttaccttgttcctttctaaatattacctccactgggacctaattacaacccctcaaaattcacattacattggaatagatgtgagctcccaatgttatctttaggcattacagaatattagaaactgactgtggttatccattgtgtatgcaggtatataaacctcttttgcccaaatcgttgtcagactgcagtgagaaaagtcaaggaaatatttcttactagcttctgaatgttgtatgaattttccccgaagaatgataataatgcaagctgagactttttatattctaaagtaaacatccaaagccagttttccccttctattaaatgaacctttaactgagctctgaaattgtgaggaaggacatactttgatgcccattattctgttcaatagccatattcagaagagaagtttaattcaaactccagcccatcaaagcattttgcagggttttcaaagcagttattgtaatagagagtaattaaatattactgttttcaactgcttatttataatgtacgaagacattataatgaccccaaagttggtttgcctttagaaaaataaggatacaaaatgctgtgtagaaaagaatatgctatcttaagtctagagagctgggttctagtcccatttctgcttgtgacttagtctgtggccttaggaaaaggcttttcttatcgttgagtctcattttcctgcctttaatgacaaagaaattacaaaccttatatctgtaaggcacttaataatttgtcccctcttcttaaacttgtacaagtgaagttacaacattctatcaagttcagaacatgtagactgtaaaattttacacctacagaacatgtaggtgtaaaatagagtcacccataaatctattacccagatacaggtacaatctatcatgatcatatttatgtattcctttcaagtctttagctattagcataaattacccatcatgctgtgtatctcttgacatcatacattaagcattttccatatcactgcatattcttgaatgattacaattttaataactttaatatttcattgagtgattgtgccatatcttaattgtttcattatttgaaaattttgcgatgattaacatttatgcataaatgtagcttacttcttcaataatcttatatatgatgtctgagggttgagacacacgggtcagaggttaattttttttttttttttgaggcagagtctcaccctgtcgcccatgctggagtgcagtggcatgatctcagctcactgcaacctccgcctcctgggttcaagcaattttcttgtgccagcctcccgagtagctgggattacaggtgtgcgccaccacacccggctaatttttgtatttttattagagacagggtttcatcatgttgataaggctggtcttgaactcctgatctggtaattcacctgccttggcctcccaaagtgctgggattacaggcatgagccaccctgcccggcccagaggtgaatatttttatggttatttctatctattgatgacttgttttgtgaaagggatttttttttttttagctttagtaggaatgtgtgagtgagtcagcatctcccctatcatgctagtattaaatatgttgtttttttggtattagcatttctctggttatttgtaaatttagatatgtttccacatgcctcatttccagttatttttttttattgcctttgaagatgagtactttccaatctttaggatcccattcacagcaaatcaaagaggaaacattttagtgagaattgtgcaattgtgcatgtcttataaaaggttctagaacattttttactcacatgaaggactgtttgaataagttgagacatgccttattcctaaatggaaacatagaggttgttaagtagttgttttccctacatttcgtgcaatcacagttagtacaactctcaggtcaattattcttgaattttaaccaaaaaattctaaattgtcttgacaataaacaggcaaaataggtaaaagaaatctgcaaaataagtgtaatgagcaactgggaccatcctagccagatgctgaggtgcatttataaggcaactctgattgaaggaggaggtggtgctggaatagatgggaggtcaaagcagtaacagaacccacccagacataaggcaactgcacgtggaattaattggcaataaaagaaccaccttgctacattccgaaaaggaaggattattctcatggcattgggataattggtcagcgttaatgaaaaacttacatcatgagtatgtttcacaataaaccctgatataaattagtggtcatgttaaaaaataaaacttgcaaaagtcttcaggcaaagaagaaatttgttatatctgtagtaactgaaagcagtaacttttaagtttacacctgaggtcctcaaactttttctgtaaagggccaagtagtaaatattttaggctttgtaggccagatggtctctgtcacaggtcctcaactctttgtgctgcaaaagcatcaatagacaatatgtaatatgtctcatatataaacaaatagagaatatgtaggtttataggaagagtcataatattgtgaatgttaatttcctgacaaatcgtgtcccatggtgaattttatgaatctttcatttttttggcaaactgtttgaaaaagcatttcatggctattttaatttatatttccctgattattatttaagttgtgtgtgtgtatgtatgtgtgtgcgtatgtgtgtgtgtgtgtttggtatatttgtgtgccactgatgtctctttttatgtgaattataggtagagttaatttatctcacttatttcacctctctgtcacctgatgtcccaataccctggagagctttgtgatatctacaccccagtacagactaataggtcactggtttgcttcagaactagaacttctcctgtgcctttgtgcccaagggcctgggacttgacttttggctcagttctacttgtctgctaacctgaccgcttgacagtggattgaggatggagggcactgagcagttttggctgtgcttgacctcctgcttagtttccctccatggtctcttagaaatctgagactgggcgtggtggctcacgtctgtaatcccagcactttgggaggccaaggtgggtggatcacctgaggtcaggagttcgagaccagcctggccaatgtggcgaaacgccatctgtactaaaaatactaaagttagccaggtgtggtggcaggagcctataatcctggctactcaggaggctgaggcaggagaatcacttgaacccgggaggcagaggttgcagtgagccaagattgtgccactgtactctagtctgggcaacagagtgggactccgtctcaaaaaaaaaaaaaaaaaaaaaatgggactccgtctcaaaaaaaaaaagaaaagaaaaaaagaaagaaatctgggtgagttgttgcctgaatcttgtctgaacctgcctatcccctctgggtcctgaaatctaactgtgggtgagatctgcctttgcatttctgttcatccaggtgagcaaacctggagtttggcctcactctgtccaattgtgttccttccaagagataaaactgagaaagtggtaaagtcacttgcataagccactttcagatccatagaggacccacagcatgagattctgactgttattattacagaggtagaagcgtcattttcttggagctgtgtctccgtgtctttggtgtgccacagtcacaggcctgctcctgcccctccctgcaatctttccattgttgtgtgtggtacaggaactgagacaattatgacagagccgagctggtttctcttctcttttggacatcattgtttgtcacaattctgatcaccatttcttcctctagatcacaaaattgtaaaatcactgctatatttacattttcttttgctgcctgggctttaaaaagtactatttatagctttcctttgaaattcctttattaatagtcttccttcacatgtatatcactctgctatttacaaaatgctcttacgtttagtatttcacttgatcagcataaacacccatgggataagctaggcaggattgttgtctccattttacaggtgaggaaattaaggctcagtgaggcctggaaggccctggcctgcagccactgctggaccgggtgccagaactgggtttagacgtcttactagatctctcttgctgtttttctttccgtctacaaaaactccttctcatttatgagtttcaaagattttcttgtctgacacataaggaaattagtggcttttcttgagagatctaagcattactgcatttgcctaatatttcttttactatacctattggtctgagtactttaagagaaaccagtgtctgtaaataatcttccttcttgtcagacatggaggcagaaattttccaagaagagagagaccctgaagacactgtttgttctctgctgttcttaacaagtactgcaaccacaattttggatttttctcctcgaggctttctagttgtaggctgccacagaatacttcggggtcacagattcctattcccttttaaactgtatcgggcatgtgtgttatgtgacctttgtgttctgaccttcagatttagggaactgaagatttaggaagtcttgttaggacttaaatccaagtaaattccctcatgagtacaaagactcatctgtggaggtgtggaatgttggagagaaagggactttcattcatctagccccctgggttagaaaacagggctggtgagtgatagagctgaggctagcatgcggagatcagactagattcggctttctgctggcttcctccatatcactcagtacttctggagttgtagcatgcctcttccccctggactgggagctttgagagggacggcactgggtgtgctctgtgcacggctcttctagaggtgatccaagtgctttgcataggcactcaggatttatttgcttgatgaatttgaacctgtctgttgttgataaaatatcattattgcccataaggatcttgagggagtttgtaaggatcttgagggagtttcagtcaggattcactataggaaacaaaccactttagatattttaagtggaaggtacttaatacagggtgtttcacagaagtaattagatggactgcatggagcagaatcgaggctgtctccagaaatgaatcacaaaactgcacaaaattattccattttctacaatcaagcaagacaaaaatggtgaagccaccatgggaattactgagttcagtgatacatcacaaaacttgtgaaacagagatcaaaagccatagtcagaatgatggtagctggacactgagacatgagtccagctacttactctttttgtcacggctgctttttgacagccaccaagctgaagactcaatatgagaacacagatgctgaaaaaccccatgtctgtgtcaccattcttctaacagaaaacagggcaaacagcagaaacatgtcttccatcttacttttgcctttcaaatatcaagccaattacatatattttggtagaatttcttttgcaatcaaaccttacctgcaagacagcctgtgcaatatgggaagtttgagtgtcgatctaccatatccaccacattaagggtgatggttttcatatttcgggcatgtcttccataaggctttgtgtgtagtagatattaagttggaaccagagtaacaattacgttctattacatctctacttgtcagtgtagttaattatataacagaatggactgcaacagttttactttagggaatccctaagggggaattcctatttatcagaaaaatgctgtaaggagggaagaccctgaggtgggagagtattctaaactgttttggtttcaaacatcttggaaagtactacatggagacatgcgatattataacatatcagtgcttaccatgtctggggggagttctgtcttaaaaaagcttgcctaccttctatgctgttgctccctcgctgcactgttttgaccccactttcctcctcaccagccaaatacaagttttgcaatgagaattaatgtaaaatggtttctttataacaaactaaataggcttattcttaaaaggaaacatagaggttgttaaaccgttgttttccctacatttcatgcaatcacagtacaactcacaggtcagttattcttgaattttaaccaaaaatttctaaattgtcttgacaataaacaggcaaaataggtaaaagaaatttccaaaacaagcagaatgagcaactgggaccatcctggccagatactgaggtgcatttataaggcaaccttgattgaaaaaggaggtggtcctggaatagatgggaggccactgcagtaacaaaacccacccagacacaaggcaactgcacgtggaattaataggccataaaagaaccaccttgaaacattccgaaatgttgagccttcactgaattcttctgacttttccctcaactctgtgtaaccccaatttagaaatgtgaaatagttgttagtaatcccttccacctttacattgtaccctagtgagtgcatttggatgtattttagacacattttttttttcctgctccaaattaagaatcaggcaacatattgtccttctagtacttgtaaccaagtatatattataaaatcactgataatctcgtatgtgtggggtcaggtgttaaagatataattgaagtaaacactcttgatttatttttatttttattttaagaaaaagtgacatttttgcttcaggagaaagaggctgagtgaataggttagttgataatagtttctgctaggtttctgctatatcttgcttttctcccgaagattcattttagtaccttctttccttcttaagagcacatgctcctaaagcagggaagcccccaaagcctcctctacttcccgttgctaattgctgtggcctcttatccacgccagtaatgaaccaaaagtatgggagggctttagccatatggaacttctgggagaggacttgactgtattcaggattcacttggactaaacgaccaaaacctcattaacacagtgttttcagtaggtgattatatgagttatcgtcaaaactgggacacttttgcaaaggggcactgttaataattacaccagaacagcaggtataaattggagatgtatggtcatcctaattatacagagccttcaagaacagtgtttgaaatgtgaattaaaacgattcgaaaccagagcttaagtcttagtattttcatgggtttaagtttaccttctcttttatataacaatcacttgctgagatctgatgatgggatatactgtgtattaggtcctaggaatatatagataaagtagataccaattttgtttttttcttcactcacagtattgtaatattttagaccagtgggtttccagtctggcttatagcatactggagatactagggcaataatgcattttatgcttcccccaaattaaagtatgttttgccaaagtgtgatgatttaaatgcccctgtaatggttttattaatttttctatttatacttggggttttgtttatgatttggcatgaagaaaccatttattttgctaaggaaaagtttgaaagctactggtttgagacttaaaaatttatctttaatatttggttataaagtcgtaaggctactttttaaagaggggaagaactagactgattaaagctgaaacacataaagatgtaaactgagtgggaaacaaataaattacctgaaatatataaaggtctgctatgtattagaggttttgtgattctagagggcacaggtaggaccaataggtggtacttatgggaatacaggcttcagctgcagaaaactttctagcagtcataacttttctgccatggaaggggctgtcttgtaaggtaatgagttccttgtcattggacatgtacaaatgaactcacagatggtgggtaagcttcatcttgagctccacattagataaaatgtcttcattaacaatttcacacttcaaggatgttaaacttctgtattggtgaatgttgggtcctttgctacttctttaaaaatatctaaagtgtgtgtgtgtgtgtgtgtgtgtgtgtgtgtgtgtgtgtatgtatttgtgttttatttccccagaacattagctgagtatatttttcatgtattttattttatatttttacacagtggtcaataattgataaaaatacagaagctactacaacagttctctcatcaagggaaacttaaaagggataatgtccatagatgtgattctgaaactgatttgaaaaagcctggttcatttttactgtgttgccattggttaatgcttaaccagattttgtctctgtttcaaaatcttgaaataaaagtggaacaacttccaacatgacttaagaaaaaggtccccagttgaaaatgcttccaatcgttttgctattaaatgtgaaattgcaaaactagcctctcttacaaaaactagtgagaagcttgcctgtttttcataccatttcaaatactgagaaataatttctctaggctcttggaattagagttaaataaaaattatatttcagagtatataatgcatgaagttggatttctttgttttctaaaactgtatctcatggtccttgaaggttgataatttatatctctggtaccactttatttttctattatttgtggattaaaaattttaaatttagcaatatacttatattttgctttagaataaagttgatttttaaaaacttatttagagacagggtctcattctattgcccaggctggagtgcagtggcatgatcgtggctcactgtaaccttgaacccctggtctcaagtgatccttccacctcagcctcccgagtagctgggattagagaggcgagccaccattcccagctaatgttttttagaaattattattattttttttttccagagacacatcttgttgtgttgcgcaggctgatctcgaactccaggcctcaagcaatccagggtctcctcccaaagtgctaggattatatgtgtgagccactgctcccagctgagctttttcttaatagatatttaagatgatatgtaattagagaatcggagattaaactggaaactttaatttacaataacaataaaatattaattcaataatagtaatttaaattacaggccaggtgtgatgactttaatctcagcagtttgggaggccagggtgagagcaccgcttgagcccaggagttcgagactagtgagaccctgtctttacaaaaaaaattaaaaaatttgccagacattgtggcacacctatagtcccgactactttggagaggctgaggtgggagaaatacttgagtctaggagttgcaggcttcagtgagccatgatggtaccactgcactacagcttgggcaacagagtgagaccttgtctctaaataataataatgataataataataaaaataaacaaataaataaattataatgtccaaactcaattcaaaagctctaagctaatttatagtagttctgatgtaggatacaaacaacacagttgacagttttgtgaacaatatgatgttcaaaaggctgaagtataatctctaactccccatcttgttgctatgattactcttagcagattatgtggcctgaatcaacattggttcacagtcacaagcagtgttatcagatgtaaatatgtcttaacgttcatcaatagtagactcatattcattgaaggaaaaattaagaatttctactttttcaagttataactaaaattgcttttaaaatcttccttattttattgagatatcaaaataaatattcaaaaacagaaaaatacaaacagaatcattaaaaaattaagataattagaacatcctaaagtggtagcaaaatctcatggcctgactaatggtcatgacacacttgtaaatggatatctaaaatggagtgtttacatgttttaatacaagtttgaacaagctgtcagggaaacacagctaagtgagctgcagttaacttgcagacttacacagttattggtaggtttagaaatagaagatgctagataaccattaaagagattgctaggtctcattagagatcatattggtgatttttcctatcgtcactttttcctgggtgaggggcaaaatctttatgaattaggcacttagcgtctcacctttacaaatccagatttccacctttagaagcagatttactgaactcaaagaggtgcaggctattgttgcctgttttctcttggccttgaacagaaaagcagtctataagaatcaaggacttataagaaacctgctaaggagcccgtttttttgccagcactgcacactccacagactagccataacattgtggatcataagaagttgtgggaggagattttgaaggtcatcattagttgcttattattttaaatctgcagaaactgaggtccagagagaattcacattttcttggttactttgccacgtggaacaattgttatcaaatgtgacctggaatgcaaggttggggccatttatcttctgtgctaattttcagtgccatggttgcgaactttcttggcagagaaattgtttacttctgtgccctattccattgccttttacctaccccatctagttataatctagcaatagagttataagcttgtgtaatcaaactttcccactgcagatgctctttggagacagaatatttgggtttaaacccagcctctgatatgttctagctgctctattacattggataagtttctttagcttctctaaatctcggtatttgaatactcaaattagaagacgtaaattatttcctaagatttctcctagctggggctctctatgaccttttagctcttaagtagtctgtcctggctattgtcaaccatgtctttttttccttgactgatagaaactgtggcaaacaaaaggccacttagtcagtatttgttccgtccttaaccttctctcctgagagtcctgatctttcagtgctgttgtttccctgtcagggttgattgtttccttttcgagtgccgttctgaatctgaagtgaaagtgcagcgtggaggcatgtcactgttgtgtctcacttctttttcttttttttttttgagatggagtttcaccctgtctcccaggctggagtgcagtggcgcgatctcggctcactgcaacctctgcctcctgggttcaagtgattctcctgccttagcctcccaagtagctgggactacaggtgtgcacctctgtgctcggctaatttttgtatttgtagttgagaaggggtttcaacatgttggccatgctgatcttgaactcctgacctcaaacgatctgccttcctcggcctcccaaagtgctgggattacaggtctgagccactgggcccggccgtgtctcacttctttatctgagacaatgtttactggtctagacctgatgcttctctcccttgctgcttcgtagtttatttggatcctgaaatgccgctgagtttttcttgtcacctgcagcattgccaagaacaaggagtgcaccattagtgttaatttattttttctggtactctgtgcaaggcagatgggcatttaatgtgctgattccaaccctaccttccctcatctacactccctggtctcataggagttaaaacatagttttgtaagaaaccttagctccttgaacttgtggacttgtgggagaatcatggaaacatgagagttagagggaatggtagtggatatctaatctttagtgtacagataggaagggtcactgaggttcaaagaggttaagaacgaaagtcatagacccaattagtgactgagctagatagaaagtacgcccaagtcctctgcatctaagtctagtgccttttccagtttttccaaatgtctctcagatagcctatataaaggtttggcatttctgtagcgttgttctctcgttacctcttctgagcaatgccagctgtccatgcagagagtggggcacttagccagtgctgggccaaagctgtctgtaagaagaagttgagtgaatacattgacattttcagcccatggtagatcctgctttgcccttccggctctatgtgacctgatgcttcagaggaagagtgaatacatttgctgttcaactaacaattgtgtgtaattttcagcctgccttattcttcaatgctgtcttcccacgcctccaccacatgccacagcatatctgcttcgcaattacgctggtagggacttaccccgtttggaaaaggtttgcctaaatacttatttacttgtgcatgatacatcttgattgataccttgttaatctctgagatcaacccaagaatccttccttcaagggggaggatagaagagtcagggaaacgggtgacagaaaaagagaaaaagaggactgtgcttcctcactgatgagcaaagaggagaattacagatgatatcaaaacaatgaggagaatcacaggtgatatcgaatctgctttacttggcgttggctacttgtaaagtcaagatctttcatagactcataaaagcttgtgagcagagttgtcatttgtaccatctaattccatcactacatttttcgagaaggacacaagatttcagagataacggaagttacacagtgggctcatggcggagctaagactagaagctgggtctgaattctgaagatcaggcatctttccactaaatactgagatgtgaacaataatggagagccgtatagcccagaggggaaaccacattataccactttagtggatgattaggaaagcagttttgaaattccaggaaggtactgacttttgtataaagagaatgttttaaaaaaaaaaaccttcaaagttataggagagtgttatttaaattgtaacagcttgtttaaatgaagaaaatgttgctaagggacatgaatgctaaacgttagtctgccatcagctacttctgatgtttaagtcaaatagtccctcagttctgtggtgttaatctacgtcccttttctaatatcattcatttattcagtgcacactgaccaagagctaggccttgagttagttgccaggaagatatagggactaatacaatgtcatttaaagattaatagaaatgctctaagtcaattattctcaacccttgaatcagagtatatacataaagatccccatatgaggttagtgtgcagactgttttgataaacactactctaagtttattgcactggatgttggataatatgatgtaacggttgtttgtttttcagttttggtgatctatataaatctttttagaagagtagcatattgatttggacgaaaaaaaggaaaatatgaccaaacactacttctttctgtttttgtgggtgacagtgacttgacattcacatggtatcctgagagaggcttagtagctttgttagtattaattgtcagtttgcctatggcactaagttttcccacctatgtggggcgggtcctggtcatcacatagccttttgtagttatttgctttctgttgtgccttgattttttttttctgttgactattggcttcatcactttgtggtcctgtggcttattatgattagatttgagggtacagaatagagaaaacattatggcaagtagaattcaagagctggaatggaaataataagagcaaaaactactgttaagtgctgatttcctttgaattgtggtgttttcctttcttctccaaatagggaggtagtacagagtgaagaccggagatttggagttaaagatctgtgtcccagcttcagctttgctatttgttagctgtatatccttgagcaagttattcaacctcttacagtcttactttcttgatttgctagatgtgggtaatgatagtgctacctcatatggcagtcaggatgacagtgtggccattgaaaatttgctagacatataataaaccttcaataaacacttgtttattgtcagtctctagtcttcttaggaccgctgggggaacagacagaagagcagcagaggagttgataagtgaaacctcttaggttcttcttaattgcttgcatgtgacaatttctgaaagagcaatgctgaggaagcagcagctccccagctcccttcagcagtaggcatcttgcttagaggagggccactgctcttgctttcctgtctgctgatggtggttgtgtattctcagagcctctctggaaatcttccctttcacttcttgctttcatgatgattatgaacttcaagtgaaacctagctagaatgaggggaagtaagagcagtgtaaatcttggtccagcaacaccagttctcaccactgcttatttttgtgtttacatgggtctctcttagaagccaagagccccaatgatatgtgctagttcatctgttcattaaacttgtgaagtttcatcaaacccatttatcaaaatgaagggctgtaatgaagattttagagaaagaaagcactctaaaatattagagctgattgggactttacaggtattcattttgcaaatgagtgtcatctcttgttaaaggtcacacttatatagctgagactagaactggggccacagggactctatgtctatactattggatttatcactttccttggatccatcctacatgattcaatttttaatacctggagttttcactcttgttatcttcctattcaaggataaaagctctagcttcttatctttatataaaacctttaaaaggcagaactcatgttatcttttaaaactttcccctaactgttctccctgaatccctcattttggtgccgctggtctgatccctgtcctacagaaatgccttgcttcatacccaagctcacagtattatttctaatctttgccctggttactccagttttcttttatttactcagcattcaaagtcctggttaagggctacctctgccaagcttatgctagcttttctgacatcccccaagatttttcatgtgctttctgtgttgctctctttctcttttcacatttataaatatttcttcctcaaatagtctttgagctctttgagtaaagaataagaatctgattcatctatagctccagtgccaggcaaataaattcattcattcattaaattaacagacatttttattgagtacctatcatgtggtagcccctggaattataaaatgataaatatttccactctcaaggatttgcgagtttagtttggggaacaggaaagcagatgggcagagcaccatgtgatgaatatgtgacaacagtatgtagatgctgtgggattgtactataaggatgtataacttgaactgtagaatatagtgcaagatttgccttcaaggactagtagaaagtaatgcttatgatctaaattgatgcatagtatgttggaagtcatttttagacaagaagtagcttgtttcagagggagcagagatcaaacctaggaaaaaaatgtgaatttctatcagaaaagtactgcaaaatgacctcagaataaatagaaaactactactattatcatagaagttactggcaatatgattaatgtctgttaaaagaagatatatttagatgactttatgctgaatttggataacctttaaaaaaccagataattccagtgtagttattaaatatcctagacagtagaggaggttggagaaaactcccctatcaaaacctaatcatgataagtaaaacaagcagaaaaaaatgctataaaatgatctttattatgattatatgtacacaaattatagataaaatagcctagttaattcattaatatatcaaaacacaagtgtaacaaaggatttattctaggcatgcaaagatggttcaatatgtagactttatcaacatatttcattacatcatcaaattaagggagggaaaaagagttgaatgtatcagtggttgctaaagagggcactgcagctgtaactagataggattttattccacaaatgccaagatagttcaatatctggaaatctatcagcatgcttcattacatcaccaaattaagggaagataaaagagatgattgtatcagtgaatgctatagcaattctagaaagatatgagtaactaagaaagagtaacgttcattcattctcccatttctatgtaacatacttgtttaaggggcttcctgcctaggcattgtgccggtatagtgagactagttggagtttccaacttgttgggacatgtaggcaggtaaataaatggctttcttgtggattgttataagtatgccgaaagtactaaagagcctagaaaaaggaattaggctactcttctttggagaagttagggaaatgttcacagagttagagacatttgagctgagacaatataaaaatatagggcttggtagaacgtgaagagagggaaacgacattgttgatggtgaacacagcatgagcaagggttcagaatcttgaaaacttattataaatcctgggaatggggtcactgggtcactgctgacatgcagaagaatggtaagagaagatactgaggaggacatctgcaaacaaatgattggtcagaagatgggcctctcaggaggagcagctggaggtgcttcttcatggagggcagcatgcgggtaatttatgatgctggggataactgaaatgactgtggagccaatgatttgcatattgatacttacattttatttatactctcccagaaattgcctgtttctttatatctgtgctatatccgaaaagccaagatgatacagtcagtcagtaacttgggattactatgaaaaatgtgaatctttgcttaagaaaatactgcatcctatattaaccaatttttcaaccttttattataaaatgactttagatttatagagaccttccaaggatagtattaagccattttaaaaattataattaacatttatactaccaatgtgcataatgcattaaaagttttaaacctttacttgatcccttttatttcacacttatattcactttagtcatactgaaagcaaaccagtcacttttatcccaatttagtagaagaccaagcctcaattaaaagcaaaagcaaaaccaaaattggcatttctcagccatgtgagatgggtttggttttggtatttagaaaaaaaaaatcatctgaagttattccaaatgaacagctaaatttaaaaaccacgagtaaaacagacattcattggtagtttttctatattggttttgtgctaggccttaatggtagtttataaatgtgtaaaatatggtccctacccttttaaggaactcaagtttagcaagtatgtatgtgtctttgtgtgtgtgtatatatatacatgtatgtatgtgtgtgtatatatgaatatgtaaaaggtacgggggaaagaaaaagaaaagaaaggccctgtaaccagagtgaaaagccagtaccatcactggcttcaatagcatgtgtcctgattaccagtttagagtctttgtcattgattcatgttatcctcgtcttttaagaaaactatacatcaagctgttcttccaagcaagatggtcataaaattgccattgactttctacaagaatagaggcttctttttttctcactttgcatagcactctatactataaaaagtactttaatatcatctcattggttgccataaaaattctgagagttaaggaagacagaggtttatatgtttgtttgttttttgagagaaggtctccctctgttgcccaagctggagtacagtggtgcaatcacagcttaccgcagcctcaatctcccaggctcaagtgatcctccaacctcagcctcttgagtagctggaacaacaggtgtgcgccattatatcctgctaattttttaattttttgtagagaccgagtctcattctattgcccaggctggtctcaaactcctggcctcaagtgatccttctgccttggcctccaaagtgctcggattagaggcgtgagccattgtgcttggctgagtcctctgagacagtgaaactatctgaggctctagaggcgatgccgttcaaagtcatgccacttgttggtggtgtggactgatgtgaatatccaggcaacactgtttcccagctctcccctccaccctgtctctctattactatgccatgtactgaggcctttgatttctgtgttctgatgctctttgtctttacagacatctggaggtaattgtgtagccctcttaattaattcagttcaattaataaattagtaggtggcttttgggctgggggcgcttacagggtgccttccgggcgtccctgtgctggagagctcttgcaatcaggcttggagagccctcctcggcagcagcctctgagtctcatccccagcaggcaggctgactggagaggtgattggcttaccctgacagaggagacatttcctctcttcaaatattatatgcaatctgatcagagcagcatctgggctgggctgattgttcccctcctagtttaagcaagcttttcatgaaggtccaacatggtatcagctcaacatacaagttgatgggcatttctttgttgtgcggggctgacctttgcattacatgtgttgaatattctatcctctggtcctaaattctaataattgtcccagacgttggggcaaccaatatgcccctcttccccttttccacataccccttggtggggaccagagctgctcctgcagatggatcatttaaaagtgtcctgccaggtatctgttaaaaccctgtttccaaaataaactttcagtggttccttaatgcctgaagaataaatttaaactcaactgtggctgctgagctgtctgtgctttggtttcaacccaccttttagttcttttgcttgctactttctgttattcgccctccaagcacactaaacgtaaatgctgtgtacttttctgcctgtataattttgccaacatttttcaggttcaaccctacttagcactcaaacccagtctgtatatcacctcatcaataaaatcttgttaattctgcccccaccaagaagtgagcctatcttttcctgcatctcagcaacacttgttcttaacctcacttaggtaacttagcacttcatttaggcataaccatttaattggtgagataattaatttaatagattattaataaaattcaagctcttttccatcctcctaccataaaatctccttcaagttaggaaccatttcttattcatatctatttcccaagagtggctaggcactaaaataggtaactattggaagggagatattcaagtttgaggcagtgttctcttcctgctcctcctctttctctttctttctttctttctccttttcctctccttcctccttttcctcctcctctttctattcatgattcctctgcctcttcatttttctttcttccattttctttcacccttctttccagagaactttatcaggatgcatttagtatggattaaggtgaaatagcaatgaaatgaggagtattgtcttcgttttcatgcttccataaaaacagtgtttctttttcattgcagattccaacaatgtctcacccatcttggctgccacccaaaagcactggtgagcccctcggccatgtgcctgcacggatggagaccacccattcctttgggaaccccagcatttcagtgtctacacaacagccacccaaaaagtttgccccggtagttgctccaaaacctaagtacaacccatacaaacaacctggaggtgagggtaagtgctgggatttcagagttggttacttggagtaggaaaattcagttatataggtgatttgtagtacaaagttgtgtcagaaaaacgtagtttgtgaattcacagcgtgggtgtcataggctactaaaagtaaaggagcccccggaaatagtctagaccaaccccgtcttttaggaaaaagactttttatgggttatatggctatggttacataatgaaatagggttagagctcaaactagaaacctggactctttagtcacagctcaatgcctttctactgcgttatcttccacctccagctcattctcttgtagggttttagctaccagacagtcatccctccctcttgccgttggacaaatgtccacaaatgctgccaagcagtagtccaatcagaaacttatacaaagtgaacctaataaagtgcatggaattgtttacctcctctggctgtttttcttcccttaggctgctgaaggataagttgtctagagtgttctgtgagatctgcatttgttgaatctcccagacaaatatgagtgaagcctagttccaggggttttaataacaatgcattcagtttacatcaagtagagtttgaaggtctacgtgagctccagctctcatgtgtatgtatacactcacacacgaagcctcagaggcagtataaatggtaccatactctttggttgaaaaggttccatatttttaccagtgaatgttagcagcttattcaaactcaagaaaaaataacttaaaataaaaaaaaaaaaaactgaagaatattagacttctaggagctgagagagaagaggcagtgaaaggagatttaactccctttgttttctgtccctgtcccaccattaaaaaaattattaatatcttaccctcttcatgatgtttccagttgcttcttggatgacattaatgtttgttttgtcaatattgcacgcaagtgtttcacactctgtgatatagtccagtcctcctcttttctttcctgtcctctcctgcgcccaggaaacactttactagtctgttagtattttgggtctgatgccagaagcctagttcagatgtctagcttgtgtaaggtgaacacctaggttgggtggtagagaggatcaggcttcagcatgcatggctaagctgcagctgtggatctttggatatccttttcctcagaaagtacaagaacgagaccctcagaaagctgctcttgaaaaacaataaatgaagcctttggtgctgtactaatctctgtagcactccatgatgttttattgccttagaaagagactgcatctttgcagttaatcaagcacttagtggaactggctttctttgactcatccttctttagtgacttcagggcttgggaatgggatctggaagagaatctctcttcatagggacaggaggagccatatgttggcttcctcatttatggttttttgttttttttttttttttgtttttttttttttttttgagatggagtttcactcttgttgcccaggctggagtgcaatggcattatttcggctcactgcaacctccgcttcccgggttcgagtgattctcagcctcagcctcccgtatagctggattacaggcatgcactaccatgcttgactaattttgtatttttagtagagatggcgtttctccacattggtcaggctggtcttgaactcctgacctcaggtgatctgccagcctcggcttcccaaagggctgggattacaggcgtgagccaccgcacctggccctcatttatgttttcaatgtttccctttgtcagcttactaggggcattgttattttgtctcctaacttttggggaaagcttcagtggacctctctctaatctgaacagaatacagacatggccagttatagagcagaaggcaaaggtgtgaggaagtctttgtaggtatgagagttcttataggcctgagcgttatggtgagggcaggtcctatattaagtgggctcataaatggcatatatgagataggtagaagagaagcatataatggcctcgctttagactcctttactgtgaatttgacatgccctccttgtactatgtgtggttcacccactgtcttactctctaggaacactgaagtgatttgtttgcgtgccctgcagcacagtccttggtcccctctcaacatgccaccccacacgtttttgttacctgaaaattctatttgtatcactttctccaaaatggctaggtgcagcctaggtcagaattaatcgctccctttcccgagtttccacatcttattctttgacttatccaaatttctaccacttttgttattgctcctgcttacattctgtcccatattgaacatgtagtatatgccaggctctatgctttctctttattattttattgccttcttatgtaaccctaaaaaatgtttttttttttttcttataaagaaatggaagcttaaaggaggtgacattctctatgatttgcttggagtatgtttctgaactaaggctgctgtccatatccagcatgcggtactgcctgtccttctattcacagcacatgtggcagcaaaccccatattacagtgatacatccctgcatcccttataagaatatatataagctttgcttcctcattgaagcaacaagacatggtttctcactcgtccttatgttcctcatagctcatattatgctactgtgtttttagtaggaatggttgcatatggtcaaatgtatgtctgtgtgttcttatgtatgcatatatatttggatggctggcggatggctggctgggtgagtgcactgctcagtgatgcttctccaaagcagtttggaatatggtataactcagtcttttgttttctgaaattttggctctctcttgcatttctgccaattctcactctttttctctctccccctctctctaaatataataacctttaccttttctgaatatgcaagagaagaaattttcctttaatatataagttaaagacaaatcttgggaacagtttatggacattcagactttttaaaatagaagctacatttctgcatctgctgtatgaaacaaagatgtatccatgtatttgttggaagtagatttgcttttctttatatttaatttaaatgttatcagtgcattctgttactctgaacatttttgtaacttacatctattgtgtttgtttacacatttaaacaatttataaccattccttttcgtttctttttttcatttagaatgttctatactctcagtgaaattcccaagatagtaggtagcacaggttttatttccaggatgcattggtgataccagcttatgctctgtattgcctcagctcatgctgtttttggcttttagagtgtacttgtcccccagtttcctgcttctacagtcttttaattcattgcttaaaagttgacctccacgaagctcaaccacaaatgcagaaagttagaactaatagaaatcacgcaatccatcttgttctgacgtaaatgtgaaaactgcagtctagagagtgtaagttatttgttcagagaagcacagcctgctctgagccgagttggcactcaagtcttttccctctaactctagagttacccaaaccttgtactatattctaatggcaaactgttctttactaccccataccctcatgcattgcctacaattcttatgacaatgtgttttttaatagatttgcttgtatatgcacctgtcttctctagcggagtctgaactttgagagtcaggggctgcctgactcatgccttttccctcaacagcacctagcaggatacctgacacatactaggaactcaatagtgtttgcagaactgaattaattgataaagcacagtaatataaacctacttctccagacacaggttctaggttctcagctacttattagacactgtggttctgcagtttcaacccacgtctttgcattacttttccttcctatgcccattctttgaacttacatttctcaccttggtgttacgtctgtaatctctggagtttgctttcccatgttttaattctgactgtgaaagtagaaaaatacccacatgttttccacatcaacttatctttctggggtacccatatttataatttcttttataagatattctgataataaccattttctaaagggctttggcacactgaaaagtggggcatgctttttttcccagttagtagctctttagatctcagggtccttttattttacttccattgttctcatttcttttcactgattttgtaacaagttgtgttttcatagctaacttagaatacccctacatttccaaatgctttctctgtgttcaatgctttgtgcttacgaactcatacttattttttaattaaatttagtcttcttagagattttttttagttcaatagcttttggggaacaggtggtttttgcttacatggagaagttctgtagtggtgatttctgagatttcggtgtgcccattgcccgagcagtgtacactgtagtcttttatccctcacatccttcccatccttcaccctgagtccccaaagtccattatatcattcttatgcctttgcatcctcatagcttagctcccacttataagtgagaacatacaatatttgattttccattcctgagttacgtttagaataatggtctccaactctatccaagttgctgcaaatgccattatttcattcctttttatggctgagtagtatcccatagtgtatatataccacaattttttatccatttgttggctgatgggtatttagaagatatacagacaataatcatatgaaaaaatgctcaactcactgtccgggaaatgcaaattaaaaccacattgagataccaccttactcctgcaagaatagtcataattaaaaaaataataaatgttggcatagatatggtgaaaaggggacacttttacactgttggtgggaatgtaaactagtacaactgctatgaaaaacaatatggagattcactaaagaacgaaagtagacataccatttgatacagcaatcccactactgggtatctacccaaaggaaaagaaatcattacatgaaaaagacacctgtgcacacatgtttatagcagcacaattcttaaagattttatagtgttaactatttcattttttgtgaaattattttggtatatatttatgatgttgttccatcactttctattctgtgtaactgatgacaacaagataagataatgcaatttttcttctggtcttcaaaatactagcctttagtgttgtttgtcctataatctgggttttcactctgctccaaatcaaaaaataaaaagatacaacaaacaacaaccaccccacccccaaaaataaaacaacaacagcaattaaactcagtcttagactttgatggcagaacagtatagttctttttctgtttttggtaaatagcaaagcaaatgaactttcctactgtactaatataattttttaaagatggtttttgaaattatcttactaatacactctggggattagtgttaggttgcctttaatggcaaaaaccacgattacttttgcaccaacttaataactctctctctctctttctctgtctctctctctctctctctctctctctaatttggctgaatgaaatttgataatactttttatccatcattaaaatagataatcatttggaaagatttgtaaagttcacgtttgtgaagctggagttgtcttgtggcctagaattcactttctttaatttctgaaattctttttaaaaaacatttttatgttagatttttgaaaaaacaaattggcatgacatgccagttctcactctttttctttctccctctctctctctaaatataataacctttaccttttctgagtatacaagaggagacattttcctttagtatataaattaaagacaaatattgggaacggtttgtggccattcagactttgggtctgcattaggtaccaattcaacgtgatcattttggtggaatccttttatattggtatactcttttatagtttatttagcagttgcatgttcattgtcttttcatttcagtagaaaattcttactgtcactctctgaggtaggtagaacagatgttattgtcattttgatgatttgtaagtagtagaagtggaagagcttaataaggaatcatgtagctagtaaaagagtagagggagaccctcacacctagggctcttacgaattttaaatgctttcgtttattaaagcgttggctacacagtctgatgtctcctttaacttcattattttattatttcatgattcttctttgaaattaatttcaaaatggtgaccctttttacaaaccagctttgtgaatattggttcacatagacttgtcaagatagatcaagataggtgaggtgaattatattaaatagggatcctaagcctggattatttttttatgacatctttctgtgctttctgctactgtgaggttacgaatgtattattccatggaggggaaacagttatagatgattgctaatctacccatgagtttggggctgaattgatccagaacccaggtttcctaaatgcactcattcagctgtaccactgtggtttatgggaaccaggcaagtttggagcttggttcctaggaactgatgagtcctggattattgatgcttggtggagaattagccattagtgatgtgaagccatgtatcctgggtaggcaggacacatttgttttcttagcagataactaacatgtgagggaaatggatgtccacttatggcattatatttaaaggaataatttagactggattttccccattatttttgctgcgaacgtatggtcctcatggtgtgcttttctgtctctggagtcttattgtccttttccccatgcaaagagaatcttgctctgactttggagatacaaatgggaaacatcttttttggaggttacaaatgggaaacatctttttgtaatcctgacagtcctgttaattgcaattagagactgcagttgtaacatcttggacgtttggtataagtatgcgtgttatgccatgaggatagccacaaattcacggaaacatcaggaactgtaatgaagctcgggtttgcctgtcatgccccttttctggatgagcgtaagcatctcgagcctcatccatcactgcacagtgcagtgcatgagttttaattttcaggtcctcagggggacaaaagaacaagctgtgtattcattaaaggatcaaatattaattgtattaatttgatctttacactgcatctttcagcagagaaattaacttgtaattcttggagtgacatcagatcttaccaaatattcttaggccttattgatgctcaaaagtgccaagatgcagccctggcttgatggtcagtgcagttacattcaagcttcagtttcatcacttggccttgggcatgatgcttttctaatccatatcctctttaattcataaaatattagctggtaataccaactgcctcacaagattgttttgaaagccaaatatgatgataaatgtgaaaatgtttttaaaccataaaataccttataactctaaggagttactattatatacttattcagcagtcatttacttaaaacagattttgtgccagatactcttctaggggctgaagtaatggcactgagtgaaacagagactagttcctgccctcttgggatgtattttcttgctataataaaaataacattattaataataatagtgataacatttgtgaaataaaatttatttaataaatgcattttataaccttacatataattaccaataactattcaaaattataaaaaatactttaatataggttaagtaactctaatccaaaaatctgaaatcttaaatgtgaaaaaatctgaaactttctgagtgctaacacaatgctcaaaggaaatgctcacaggaacattttggatttcagtattgtggattagggttgcttagctggtatgtgtaaatattccaaaaatccaaaaaatctgaaatttgaaacacttcatgtcccagatgttttgtatatgcgatacttagtctgtagtaatgaatatgtgataatataagtataataataatttagcatgttatccataagtactcatgtcattagcttctaacaacagtgatagagatcacaatgcctcaacactatataaactgtaaaattctagaaccagggtgaatcttaaaagttatctaatacaacccctttctttcctagatgagaatagttgagaatgtattcactaatacatttcagcgaagtacaggttctttgcccaggagtgctgtaaataaccaatgaaaattcttgaatgcaggcaacaatttaatcttcatttcagagactcagagaggcaggtggcttgttcagtattgcagattagtaagtggggaagccaagccatgatcctggggattccttctctggttgccatagacacgttttgggggacttgtttagaagttacagtgattgaactaatatacccgaacaaagtggattggatgttttagaacaaggagaagtccctgtattgttgacagaaatctcttttattttgtaacttgtcagcttaattaactactgaaatgagttccttaataaggtgatgggtgcctcctaattcttgtatggttcaaaaacaataattaatgctgatttgtgtggtgagatacatattaatcatctttatttttgaattatacaaatatacaatactattgtccctccgtattttacatctgaagagaatttaattgcttttttgataataaaaataaacagagagccacaaagagatatcaccacacatgtattagaaaagctaaaataaaaatttgtaccagatgctgctaaggatgtggagaaatgatctctcacaatgctggtaggcatgtgcaaaattttgtagccacgatggaaaactctttggtggtattttacaaaagtaaacatgtactaaccatatgactcagcaaatataccctttggcatttaatccagagaatcaaaatgttatgttcacgaaaaaacctgtacatggatgttcatagcaacttttttttttttatcataatgacaaaacactggaaacaacccaaatatcctttgatgggcagatgtttcagtgaagtctggtacagccatacaatggaataataccattcagcagtaaaaaagaatgaagtattgttggtatatgcaataatctggacatgcttaatgaaaaaactgtctcgaaaggttacatgtattatatgatttcattttaagacaaagctctagagttaaaggacatattcatgattgctaggggacagaaatgggtgggtcgggggggcaagtactggtcattcctacaaagaggacgcagcaagagtctttgtatgggtggaacagatctgtacctcaattggagtgatgattacatgaatctatacatgggataaagttacatagaactgtatgcacacacaaatcaatgcaggttataaaatggtaaaaactgagtaactcctagttaacaataaggtaacaatgtcagtttgctgggttttcgaatgtattacagctttatgagcattaccatttagggaacctgggtaaaatgtacatggaaactctgtactatttttgcaactttctatgagtccatatttaaaaaaaaaattaataatagtaaaataaaggaatgcatatagatatcttaatgtattcttctcttactcaaagtgctatcttacatgccatctgaattgcttgcatgatactttgaaagatcactgctatatgtatccctgccaaaatgtatggcttaaacctgtggttttcaaagctggccagtcatcagaaagacttggagaacatttttcaaaagaaaaaaattaaagcaagtcctaggtcccatcacaattttacagaatcaaaatatctggccatggggcccaggaatctgcattaaaacaaagcaaaataaaaaataaaacagaacttcccgggaattgtgattgatgctcaaccaacgtttgggaaccactcatttatttcattaacttcagggaccagtgccttaatctcctttgaaccttctccaagtcctgagagtgtactcttcctcccgtagttaatgatggtagcttttgaagtcttgagagtctttatcttgtgaacattgtacagattcagagacctagagcatccttcatgttgctattcttttccctcagtgctttcattatagacaccaatcgtttgcatatgttgtcctgggtcattttatttgggatccaaaaccagaaaatttcaaacaacaacaaaaaaatggattcttcgagaatgccctagccatggccaagcttctgcattacagagctcttgctattgtgttgctttgggtagcaatgcctgaaatctcagccaattttgggtcacagtaggcctatgtaaattatctaaaaatggattcattatggacattataaaaataaatctgacacctgagcctttgggcaaatataccatataaagaaatcataccctagaataacgattaacctaaagaacttaaaaaaaatcagtatgatatttttatcatcctttcttaaaattactgcattcagagagacctgatggctgaggacagcacctggggcagaggagtataggtcattgggatgtggcatcctgagtcttctagcagtttgctcttccagcactctcccttattatatgttctttacattgttctgtatgtcgctgtcttcaaacagaatagataagtctactagtcaagatagacatataacaggcaccacatgtgcataaaaattgcattatgtaaatttagtgccgtaatataatatgaaggatgtcctctaggaggaactggggaaagcatcacagacgaggacacatctgatctgagtgttggagaatgagttagttgtttaccaagcagaaaagggtggtggacagcatggcatgccaagtaaagggaacagcatgtgcaaaagcagagaatggcccccatcctgacccttgtaattttggcagctctttgctgatgtcctcaggcaatgcatctgggctcctgggaatagctttgcaatgtgaacagagtgacttcactatgggtagacctaaatgttctagcgtgctctgaaacttacctctagaaatagctccaggaagttaggtagcttcagagaggaaggaccaagaaatatgatcttataccacaggcaagaagtactttcctggaggtactggccagaagtactattgctatctctctgcacttgtctgttatattttagaatgaaatgtgcctgtgcatacaaatgctaaggcaagaaagaaaaagcaaaaggcaattctctttaaatctcctgaaataatttcaggcagctttttttacctagtcaaacacacacgcttaagaatggagttgtaagctaacttaatcattttttgttttgttttgctctcttacttgttcacacgttggggtaatcctgagaaaacaggaagcaatgaaagaaggattttattgtgaaatgttcattacaacttgtaattttaaaatgtgtttgtatgagtgtgcacaaatgtgaataaattttagagcactttctcacataatatctagtttaatcaccagaatatcctgcaacgttattatagttcctacattattatggttcctaaagacaaatgaaaaatctgtgattcagagacccaaggttaggctaataaatgtagaagtcacatttgaccaaattttagtatcttcccttaagtattggtaatgtacgataaacactatttggtaataatgaattattacaattactaaaacaacttatctggcagaacagtatcttaactatttgaaaaatattgtagtggatttattagcttccatttcatctgaagtccactttgctttactgcttactttatctttctagctactctgtaaaaaagttattatcaccctcaatctgccaagtataatgtatgtaaagtgaaataactagcatattgcaaagctgggaattgaacccttgtctcctaaatccaagtctgtagctgttcctcagcagtacactgtatctcatgttaatgccattattacttgtattaaatgaaataatttttccatcattattttcccgaattattactatccagagcgatttgaaggttaaggtcatccaaataatgtgtgaaaattgcttaaaatcaatctcctgtgcatggatgtctatgatgtatacaaatataaaacagccaaagtagtctcaagaagttattaccaagtttctcaaatagtgtctcaaggcgacattatttgacaagacctttggaataaccatttggaattttccttagttcagttgaattgtgtcatcttgcttaaacttttcagatatcaggggtagttttattgacattacaatggaattaaaatgacattttattttattttttaccgttctatagaaatggcattttaatttgtcattatttttattattgatctgttaatgttgtaatgacttgggttttagtaagggcatcctctgtaaaaattacctcctgggaaagaaatctccaagttctatgaggtctcccagaaatatcaccacttgaggtgagagtaaagtgtcatgaatgccacccaatgtgattcctggtagataagatttcactgttttatatcttgacatctgcattaaattccgttcttttactgggtcctattcacttccatcttgtgccattgttacttaaccaggctctgtagtggacaggaaaaagtaaaaacacgtcttagcccttaaacagtttatattttcattagaaattcaacatatgaaaatgcccagttaactaacaatataaagctttactgtacagcttctatttgtgaagtgactccatggctaactctatcagaagaaagagtttgcttggagccaaggtagtattggaaggttacagagaagaaagactcagggaggcagtggttaagcttgtagactctggcatcagatagatctgggtttcgagttttgattttacctcttaattctctggaaacttggactcaccaggataagtggcaacctaagttctttcagttttaaaatagagatagttatgcactaggcgtggtggctcacgcctgtaatcccagcactttgggaggccaagggtggatcacctgagatcaggagttcaagaccagtctggccaacatggcaaaaccccgactttactaaaaatacaaaaattagccgggcgtggtggcacacacctgtaatcccagctacttgggagactgaggcaggcgaatcacttgaacacagaaggtggaggttgctgtaagccactgcattccattccagcctaggcgtcagagtaagactccatctcaaataaatgaataaataaaaataataaataaatatatgaataaatgaaatagagatatttgtatcttaaagagttgttttcaaagttaagtcatgacaaaataatgacaaaatcagtggaagctgcaatcattgttcttgctattattattgaaatgaaaatatgaacattagctctgagggttctatccatagttttttttaaaaaattctgattataaaattttaattataaaatcccatatagctcatgctgaccatttaaaaaataatcttagttgtatccttgtttctttttgtatttgctaatagagattttagaattggcttggtgtatgtttgtccttgctagaattatgattccttttttgaatttgcattacacctttgttagaagtagaattactttacttgaactttgtcaatgtggcaaaaaatgattcatgtttatattatctctttgaaaagtagtgtttttactattgaactataagtacagttaaaatgtaaatgaacatttcagaaagaaactattgatttttattaattaaagaaattaattttccaaaatgtcagttgctacagagagattttagggattattaactacacaatctcagaaaaattaatttaattagggattttattttgggttccattcgtttttgagattcatattttggattaagccagtctcctgaaattgtatttaaacttagtctgcgtgtatgtcttttttagggaaagcattcacaacaccatcagaccctcgaagagattcttaacttacccattaagaaaagtaacatctctgtctaggggtcaccagtctctcaagccagttatattgttgctgcttgaataaacaaaacaggtttttatttctgctcttaccaacattactaggctgtgtttgtagcaaaaactgagtatgtggtggtggtagtaactacagtagaaagtgtaacgtgtacacaattatatcatgatacatggtttttaaacacattttatatatgtatatatttaatttattcacacaacaaatatttgcacatgttgcctgagctgtgcatgtgtaaggcagggcatagaaatgaatagggcatgggttctttctgctgaattagatggtaccccctcaccccccattttactgttgaagagagggaagcttggtggtgaggtggcttgccccagaccatacaggtaaaaagtagtccagagtagattcaggcataacttgtttgaaccaaattgtgttctttagactgcaacatgctttctgttccttagcatgtaactattacccatgtatttttatttatttttcttttacgtgaatttaaaatgtcatatttgttctgcttctattactgcagtcttgaatgatgattcatcagtgcagtggcctattttagtgaaccacaatagcttgggtagaaagaaaaaagatccaacatacacaggaatggaaagcagccatctttttatagctaaaattgcaaacatctggcaattactctattctacctcccttcaaaaaagaagaatcatcccttcaactggagcctgccactgtgtttaatcaaggcagaaagcaagccttaaggagcaataggttttgattcaaggaggccattgcctaacctagttggccaaagtctcttcagaaaataccccatttagtgctccccataagctactgggttatataatgatagtaatggtaatatagcaattaataactgcagaaatccccttttgtttttctgctgtttcatttgtggtggctcttatggcagcttttatattgtgaaagttaattattttggtcagttttgcctgtctccatctgcttaagcttcttgtattccttaacaaaagattcaaccacatcgatacaaccaataattgccaacttgattttattataaacatgtccggtaaaatgctgaaggaacaaataaatttatttttaaagcctggccgtgatcttacagtcaaaaagtggtccaccaaggttatggctcctaagtaccccacccgtatttcttattgtgataattgtttgtgaaactagttcttccctcactggccaaagtcaacactgttggcaggggaagtgagaacagctggtggttcacagtatatgctgagaatcagaacttctgcatttttctcatggggctagtaccagcttttgctctggccttgaccaatgcacgtacctttctcttccccatttacctttctcttcctctaggtctctgaagagtagaggtggatctttcccttcccaggttgtgccaacattattaccaatgttcccttttgttgtagaatattttggtcagtaatcatcagtaatcgctaagtaacagaaaatcaaggttcgacagcacggttttcaaaaacaacctcaaatactataaatagtctgttttctagtgttagcagattatggtacatggaaatcataagcattcagtgggggcctttgagcttacattaaatgcctgccttttgcttttatgtctttgctagaactgtgttcaatacccaaagacacagctttttctttgatataataatttttctaggctgtctttcctgccagtcttcccaaaatcccagtgaagtttgcaaacacctcattaaactaaatgcagttttgggagagatgagattgtgactagggagttttctggtttttacaaaaagaatagaaaaagaaaaagaacaggaactcctaacaacctaaaatgcatgccttgtgcaatatagttatcccatgcagagctacatagtgtaacgatctctggaatctcaaatgaatgtgctcccttttctctgtcttcattcagttggatagttctggtcttcctccctcgtgtgcacatctttgaacttgaactactgtattacagccagtgttctaacctatatgcgtttctctttggtggccctgctaatatagaagaggttacgctaatgttccttaccatatttttctttttggtgtcttctttgtgtgtgtgtgtgtgtgtgtgtgtgtgtgtgtgtgtgtgtgtgttttaattgtactttaacttctaggatacatgtgcagaacgtgcaggtttgttacataggtatacacatgccatggtggtttgctgcacccatcaacccgtcatctacattaggtatttctcctaatgctatccctcccctaggcccccaccccctgacaggacatagtgtgtgatgtacccctccctgtgtccatgtgttctcactgttcagctcccacttatgagtgagaacatgtggtgtttggttttctgttcctgtgttagtttgctgagaatgatggtttccagcttcatccatgtccctgcaaaggacatgaactcatttttatggctgcatagtattccatggtgtatctgtgccacattttctttatccagtctatcattgttgggcatttggattggttccaaatctttgctattgtgaatagtgctgcaataaatatacgtgtacatgtgtcttcatagtagcatgatttataatcctttgggtgtatacccagtaatgggatcgctgggtcaaatggtatttcttgttctagatccttgaggaatcgccacactctcgtccacaatggttgaactaatttacactcccaccaacagtgtaaaagcattcttatttctctacatcctctccagcatctgttgtttcctgactttttaatgatcaccattctaactggcatgagatggtatctcactgtggttttgatttgcattgttctaatgaccagtgatgatgaggtttttttcatatgtttgttggccacataaatctcttgttttgagaagtttgttggccacataaatatccttcacctactttttgatggcattgtttttttttttcttgaaaatttgtttaagttctttgtagaatctggatattagccctttgtcagatggatagattgcacgcttttttttcccattctgtaggtttcctgttcactctgatagatagttttttttgctgtgcagaagctctttagtttaattagatcccatttgtcaattttagcttttgttgccattgcttttggtgttttagtcataaagtctttgtccattcctatgtcctgaatggtattgcctaggttttcttctagggtttttatggttttaagtctcacatttaagtttttaattcatcttgagttgatttttgtataaggtgtaaggaaggggtccagtttcagttttctgcacatggctggccagttttccaaacagcatttattaaatagagaatctctccccattgcttgtttttgtcagatttgtcagagatcagatggttgtagatgtgcagtgttatttctgaggcctctgttctgtttcgttggtctatatatctgttttggtaccagtaccatgctgttttggttactgtagccttgtagcatagtttgaagtcaggtagcatgatgcctccagctttgttctttttgcttaggattgttgggtctatatgggcttttttttggttccatgtgaaatttaaactagttttttctacttctgtgaagaatgtcaatgctagcttgatggggatagcattgaatctgtaaattactttgggcagtatggccattttcatgatattgattcttatccatgagcatggaatggttttccatttgtttgtgtcctctcttatttccttgagtagtggtttgtagttctccatgaaagggtcattcacatcccttgtaagtcgtattcctaggtattttattttctttatagcaattgtgaatgggagttcactcatgattcagctctctatcattggtttataggaatgcttgtgatttttgtacattgattttgtatcctgagactttgctgaagttgcttatcagcttaaggagattttgggttgagattttgggattttctaaatatgcaatcatgtcatctgcaaacagagacaatttgacttcccctcttcctatttgaatattctctatttctttttgttgcctgattgctctgaccagaacttccaatactatgttgaataggagtggtgagagagggcatccttgtcttgtgctggttttcaaagggaaagctttcagcttttgcccatttagtatgatattggctgtgggtttgtcataaatagctcttattattttgaggtatgttccatcaatacctagtttattgagagtttttagcatgaggtggtgttgaattttgttgaaggacttttctgcatctattgagataatagtgtgatttttgtcattggttctgtttatgtgatgcattatgtttattgatttgtgtatgttgaatcagccttgcatcccagggatgaagctgactttttcatagtggataagctttttgatgtgctgcaggattcggttttccagtatttttattgaggattttcacaatgatgttcatcagggatattggcctgaaattttcttttttttgttgtgtctctgccaggttttggtagcaggatgatgctggcctcataaaatgagttagggaggagtccctctttttctattgtttggaataatttcagaaggaatggtagcaagctcctctttgtacctctcttagaatttggctgttaatctttctggtcctgggctttttttggtcagtaggctattaattactgcatcaatttcagaacttgttattggtctattcagggatttgaattcttcctggtttagtcttgggagagtctatgtgtcgcagaatttatccatttcttctagattttctactttatttgcatataggtgtttatggtattatttattggtagtttgtatttctgtgggatcattggtgatatcccctttatcattttttattgtgtctatttgattcttctctcttttcttctttattagcctggctagtggtctatctattttgttaatcttttcaaaacaccagctcctggattcatcgattgttttgaagggtttttctcatgtctctatctcctccagttctgctcttatcttagttatttcttgtcttctgctagcttttgaatttgtttgctcttgcttctctagttcttttaattgcaacgttagggtgtcgatttgagatctttcccgctttctcttgtgggtatttagtgctataaattcccctctaaacactgctttagctgtgtcccagaaattgtgacatgttgtgtctttattctgattggtttcaaagaacttatttatttctgccttcattttgttatttacccagtagtcattcaggagcaggttgttcagtttccatgcagttgttcggttttgagtgagtttctgaatcctgagttctaatttgattgcactgtggactgagaaactgtttgttatgatttctgttcttttgcattttctgaggagtgttttacttccaattatgtggtcaattttaaaataaatgtgatgtggttcttagaagaatatatattttgttgatttggggtggagagttctgtagatgtctattaggtctgcttggtctagagctgagttgaagtccttgatatccttgttaaccttctgtctcgttgatctgtctaatattgacagtggggtgttaaagtctccaactattattatgtaggagtcttagtctctttgtaggtctctaagaacttgctttatggatctgggtgctcctgtattgggtgcatatatatttagggtagttagccctttttgttgcgttgctccctttaccattatataatggccttctttgtcttttttatctttgttggtttaatgtctgttttatcagagactaggattgcaacccctgcttttttttgctttccgtttgcttggtaaatattcctcgatccatttattttgagcctgtatgtgtctttgcatgtgagatggatctcttgaatacagcacactgatgggtcttgacgctttatccagtttgccagtctgtgtcttttaactggggcctttagcctgtttacattgaaggttaatattgttatgtgtgaattttttcctgtctatgatgctagctggttattttccctgttagttgatgcagtttcttcatggtgtcgatggtctttacaatgcgctatgtttttgcagtggctagtactgtactagttgttcctccatgtttagtgcttccttcaggagctcttgtaaagcaggccttgtgttgagaaaacctctcagtgtttacttatatgtaaaggattttatttcttcttcacttatgaagcttagtttggctggatatgaaattctgggttgaaaattcttttctttatcaatgttgaatattggcccccattctcttctggcttgtagagtttctgcagagagatccgctgttagtctgatgaggttccctttgtaggtaacctgacctttttctctggctgcccttaacattttttccttcatttcaaccttggtggggtaacccaatctttctctctggctgcccttaacattttttccttcatttcaaccttggtgaatctgacaattatgtatcttggggttgctcttctcgaggagtatctttttggtgttctctgtatttcctgaatttgaatgttggcctgtcttcctgggttgggaaagttctcctttctttcagagatgccctgcccagagaggaggaatctatagcggcagtctgtctacagtgcctttgtggcactgtggtgggctttgtcctgttctaacttcctgggggctttgtttacactgtgatgggaaaaccacctactgaagcctcagtaatggtggacgcccctccccccaccaagctggagcatcccaggtcaacttcagactgctgtgctggcagtgagaatctcaagccagtggatcttagcttgctgggctctgtgggggtggggtccactgagttagaacacttggctccctggcttcagtcccctttccaggggagtgaacggttctgtctccctggcattccaggagccactggggtatgaaaaaacaaagtcctgcagctagctcggtgtctgcccaaacggtcacccggttttgtgcttgaaacccagggccctggtggtgtaggcacccaagggaatctcctggtctgtgggttgcaaagaccatgggaaaagggtagtatctgggccagagtgcaccgtttgtcatggcacagtctctcatggcttctcttggctaggagagggaattccctgaccccttgtgcttccagagtgaggtgatgctccaccctgcttagactcaacctctgtgggctgcacccactgtctaaccagtcccagtgagataagctgagtacttcagttggaaatgcagaaatcacccaccttctgagttgatctctctgggagctgcagactggagctgttcctatttggccatcttcatcctaagtcccatatttttcttttactttgggacttggaatctacaaatgttccggaatacagacagtattgtattgcagtggactttacatgtttatagtggttctctatcctcttaacactggtaataatcacctggggaacttcaaaaaatttccagtcttgggtctcaccctcaagtattgtaatgtaattgctctgggatgggcactatatatatatatatattttttttttttttaacactatccatttttagaactgctaaggtaggccaatctctcactgatgcttgaattcatataatcactgtcaaggtgtttttcaggcttatattgagtatttctagtgcaggaaactgaaagaacgctttctgtcttaaggaagttctgattttttgagagatcagatttattattatttaaattctgccttcataacatgagattatcttttagtcttataaatttataatttctagccatggagtttagttagtacttaaaattgtaactacctgcccttcaaaaaaacaaaaacaaaacaagaacaacctgatcacgtctttataattgtgactcaatcctcatcagataggacctttctgttcttcacttttgagttataaatcctagggaaaggaacaatgaggaacaattagacaaagaaataaaataagtactttctatagtgagacagcactagagttaccttgttaactagactgagagctggaactctaagcctttcatcattatattgacaatgtgtaacgtatggttaagttacagaagaaacattacattattattattgaataagtaataattatgagttttattaagagggcccagttcaatttatatgtgcaaaactgatgcccttaattgtaacaatactttagaaatgatagtggaagtaagttccttttgcagagaaaatgcaccttaaaatgcctaggcacaaatttaatgagatacattgttctatatcccaataaaaacaaagacaaagccaaagtaatgtcctcaaactctctagaaggacacgaggcttaatggtaacagtccctgatgcaggtgggtcctcttaggcaatcttaggtttgcattggccttactatatggtgaaagtgagcatatgttttatttatgcatcatccattttactttagattgaaagtatttccccatgttttggtaaaacctgctgctcctgaaacctacctttgttcctagtcctgcccttataaattgcaaaaaacaaagccaattcatcttgcttatatgagcccgtcttccctttcataatagagatatgtccttcattctgactcgtcttcttttctttaagcggaatagttccactgcagagtctcttaattatttaatgtagtacatccggaaagacctcatttgtaaggaccaagaactgaaaatattgctattgaatgcagaaagggaatggtaaggttctctcagagaattccttttcctaaacaaaggtgcaattgccaggaagcaccttcacatttttctacaccatgtcaggcttccttatagcactgttatatgtggccgtattatggttgacattaaaaaatgtgtgtatttttgaaagaactacttcctttattttaaatagaaaagaacacagcatctctgagagtgagaagatcaaaaataagttaaaagcttttcttgtgattagattaaccagattgattaggacaaatagggtttatctatagcttaataaataagttattatttcctcaaaatttagacttactaggcctaaaggagcatagaggtctttagacttaataagtctaaattttgaggaaataagttggaaaaactagagttcagaatgagtaatagtaaaggcaaaactaagattattaagaaaattatcagaatttcctatgtgatttttttaacaactttccctggcttatattgtacatgggtttaagttatcttacagctctttaattatttttaaaagtaggatagcatgttatcttccttctctctgtctataccaagtgtttgttatttgagcattacagttacacaccaccactatctggttgtaccgtgactgaaatatcagttaattggaaaagtgaaaaaaactctttaaactcaacctatacaattaagatgatgaagtggcagcaatcattgcactcttttacttacctgtgtgatttgttataccatgtgtttgtttagaatgtaaataatgtgcagttagagtaatagatgcagatgactgaacatccttagacatctggagaagcagcactggcaagattatctctgaaaatttctgaaaatctttttgttgcaacctgagaaggcatagacataactgaaagcccaatagtaaggccaagttcagtaaagttgaaaatgctttacaccatcactgatgatgttgagtcttccccacccagctcaacattgagattttttttttatatgtagaagttatttgttccagaatttttcctttaattcattgaattattacataattaactttttttttctttaggatttcttggctctcaaatacttttactctttttagagtgctacagccacagttttcttaaatatagggatttttgaggtatcatattttgctaatggtaagtttatagtattcctaagcagcttatctcatacagttttctctatattgaatatgattcagatgaaaattaacctgcgtgaaatggttgtcatctggaatgactgccttttaccctagaaaacagccagcccaaggttgagaacacatctgagaaactgtgcctattttgagaactaccaagaaatttttattcactggaacagctgccaggaaacttgttggtcatagaccagtgccttagttgggcatttttttcagaagtagagaaaggcaaagctagagtcaccgagggattggaaggatgaaagacgtgtagttgaaagctgggcaccatggaagaccgaaacactcttcaaacattctgttttcaagaataaacccaaccctaggagcacgagacagagtataaagagccatgatttttagcgaagacctcgcatttatcttaaaatttgattttgttgtgaatataatctcagaattatgcagggatggtccatcaaaaaggtctgccagagtcaagctgagtttatcttagccatgctgaaaagtaggtggcagtcaatcaaaatggcaattactgtacaagacaagagttcactggagggaagggtgaatggaaaggacactccctgcattcttgaggcctatgtaaatcaacaaatgactctgggttagtttccacaattgtaaaacaatgtgattgaacaatattgtttcttcacttccttcctgctctaagattgtacaaaagtatgattcaactacagatattgcataaaattggttactcctgaagtgcatggagtaaaattgttcccatagaatatcgtgaatttagttaggttgtgacatgggtcatagtctccgcagtctgtacgccctcagtatattcctctgacaaccccatgtcctttcattctaagctaatatccttacacatctttttctctacacctgagcaaaatatacattcatgttcttaagtgcatgtagttaagaggaagctaacacttaatttgttcctgctgtatgccgggtatctggtatgtcatcttcatagcattatttgaagtttggtactaatatttccatttttcaagtgatgaaattaaggctcagagagatagtaagttgcccaaggcatcatgacttacaaagaatggatcttagatttgaacacaaatatctctaaatccaaacttcatgatttttctactgtatttcatttgctcacttccaaagtctatacaaaaatatttgttaaatgtgcatgtactgagctaccgatatctactatatctgtgtatacagcgatagctatcaaaaggagagacgtcctctaaatctttgataaaagtatgtcaaaatggaaccctcccagaaggacttcatttttaatagaaatcagagtattagctgaaggcacgaagttctaagataaaaatgtagctatgaatcagggtggattcagagaggtctttgtgtgtatgctataggtgatcatgtgtgaatttgacctacggcaagaagaattttttttttttttaaagctcttccaggttatccttgtgttggggaggaggatagaataaagaaatgaatgtcttgctggttcttccaagttgtatgaggataatatcacccagggatgatatgctagataaagacccaggatctttattactttttgacatttagttttgttgttgttgcttaaatttctagtctgttttgatggcattagaacctttaaaaggagcttgtaaccttttctttttacttttcctgaaatgtgtggatgggaggattggacaagagcctcaagggatgggaagaagagctcagtgcgaacacacatgcatttattcatttagcaaacatccattaagtgcctaggacctttaaggtattctgccaagagctgtgcaggataggaatgaacaagggatgacctttgctttggctatgtacaccagaaaaacgagcaggggctggaggactcttgccaagaagctatttagtggttctcttagagccttatctctatctaggctggagattaactcagaacatttttttagtctgtttacctctaaaatgaaaagaaatatatattaagaataaggaggtggcgtggagctttcactgaatgtatttcaactggagtattgaacgttatagtgatggatacagttaatccatcacaaccaccatttcaaaggaaagtggggaaaacctttgtccctgtgtgaaaaataacttaggaaattttggtctgacagttgtgagagggttaagaaagtcaatcattttgtaaccaggcacagcaatcttgtatgaaccatgtcaggatgttgtctgcatgccgtctttgctgatcacagtaatcgggtcataagagaaagggaagtaatagagtgtctcttagcaaccaaccccaggaaaaagaaaattactcaaacccagccatccagccagagaagtagaaagaaaaaaatattctgatagtttgctgaaagagctcagggatgagagagagagaaagagagagagacagaaagtagagagagagagagagagagagagagagaggagaaaggagagagagaaggagggagagagaggaaagggagaaagaggagaaaataggaaggagagagagagatgatggagaagagaggccagagagaaagaggaaggtatggagagacaggagggagagagagagagaaggaaaagaaggaaggaaaaaagcagaaagaagtaaacaaaaaactgaaaccttttatttctttgttttcctttctcttggtgttatctttttttaaaatttttatttcagaaagagagaaagaggcaaagagtgggtgaggacaaaagaaaccctgtctcctaaaacaggaacttgatagtccacatcgtgagagaaagtggggagggtgaatggtagtataacttcatcgtgtcccatgtttctcatggtttccagttgcgatctggattactgttgagaagtaataggaagacgaagtctacagatgctgtgattagtgttctaagacctgtttttgaattctctgcttgttaatcgtgtagcagtcagttctacagcttactgcagtctttatagtaatgactttcgaactttgttttttctgacataaatagtggtaagaaacacatagtacattgacaagagcgtatatatgtacatgtcaatgtaatatatattgtcaatgtaatattatgctaagtgaaattttcatatatagatatatatattttttcatatataggctctttatgtgatgcatactaatgttttctattcaatttcattacaaaaattcttttggatacctgctgaattgattgtatgaccctaatgagttacattcttccatttgaaaacaccagtctaggatcagcacttgccttacattttgattttactagagtggtgccaggcagcaagttcagtcttggtgaagagtctttggccagcactgtgatgttcagaataacagctatttaagctaaatattttcttgtcatctgccaagtagatgtatcctaagagtctgtcctggtttggaatttaaggggataaacctgaggcaattccccctggactatcttcagtttagaaaagtgccacagtgtgttcaagaagcaccggactggactcaggagacttggttgcgcttgatggcatccttttctcactctgagcctggggtcaatgatggatcgaattagatgatgtcataaattccttctggctgtaacatcttggaatttatagctggatggggctccagaaaccatcctgtctaatgtctttgtttccaagatttagttcttgaaaaggaatgatagacttcctactttctttaaagatctgtgctaggaacaagtatacatgaaagactgaagcttagtacataacttcaaacatctcagtgtggtataggagtataccatgcgcacatataaacataattcgaagaaaatatataatttgttaaacactacaggtagggtagaagtaaaatataaaaactcagaaaaatgataatttaatcttactgggaagaatgtctgaatgctacactagtatataaggaggaaggctttgctgtggactttgagggaaggaaaatattgataataataggatgttccgggtagattaaatgttgtagggaatcaaagaatggagtcttaattgtctcctttgagttctgttttttgacctcattgaactcacaagggtttactttttaccactaaatattcctattattttatagctgttttttcttccaatttaacatgactttttaataatgatccattgcccacatttagtgataaggtgaggtttgattaaatagtatttgtacagtactacctcctacttggagacacacgtttatataaacacaaggtgttatataatttgtttctctgttggggggagggggaaagtaaataaggaaatataaattaatacctgttttcttttcaggataaataatatctgaatatgtttctttttctttcttttttcttaatgcaggctttatttagtttgattttacctttagaaatttataaaccatggaaataccccacatttttggggatattggaaataatctctgtgatgtcactttctgaatcagactaaggtttgtttattacatcagttacaggaaataagtgcataaacctgaattaatctgaggatgttgtgtttgtaatgttgcttccattttgtccctttccttgaagcttgaggcacttgcacatctcactcagtcttccttttctctacagctttcctgctgtcctaaagagacaaaaggcatatggctttctccagctgcatttcctgacctgtttccttgccatagatcgcttctaaagcaacattcccaccatttgaacttccattcttcctctgtcccaaacctaatattaacaataacaggagccaatgcaatttttcattataatatggtgttttacattcatagcacacacattactttatttgatccttggaactcgtggatatgtaaatggcaagagttactcttccattgtgtagattactaaaatgaaatatctagaggtaatgtcacctagtaccactgactatagtgttgtgataccaataccagaataacagggctcctgacttctgacccaagggagataaggtggatcatcttaaggttatggctgatatataattgacgttatcagttttagtaaattttattttacacgaagaaactgaggctaaaagaaacggagccactagtgcttagggtgtcaacatcagaatcagatctttgattcccagatttaacatttcctagattctgtgttctaatcatctcaatggacagtgcagatattacttgagaaacatgtttgcatttcgtgaacaactcctgtttattttcaacattttctatgtataaataatgtttgtgtaagcatatatttacttaggacccgatatctgttcagtactgttaattgccttgggagaaaacaaaagcaaaaatgtaaggcctgggatttctatgcaaaaggccaaaaagggcttttggtgagattttaaaaatagaaaaccaattagaaaataattaggtgtatagtggtaggcccagacttgaatttcagtatgaattttgaaaaagaatatatattttaaggcctacaagggcaaaagtagatgggctttaaagtttgtgtaggtaagattgtctgtgggtgaagatgggtagtgggatggtgagcaggcagagtggggttggggtgtggggtggcacggccagctttaatggagacaggcgacttcgatggggggtaggacatgaggtgcacagagcaacagttttcagaggtgcagtagggatgatccaggggatcagagaggaaaagagtaaagactctgccaacctttcagcctggagcctagagccacagtgtgagttaaagatgtaaattccttggaattaagaaccataccttatttagccatttatacagctgcttaccatggtaataattagaaattaagatgatgatcttttatgtgagcaactttcctaaataacacttgatgctgctgataaatgagacttaggtacagtgctttttctgtaggattcaggcctaaatggatctaggaggatactagagcttccgttccaaagtacgtgcatttgaatgatatgctaagtaatgccttgtgtatccttcaacaggaaaagttcctgctattaggataatttgatatgcacttgatgtttgctaatatgtttcaatcacataaatccttcttggatatttttgttctttgtggacttcaggtaagtttaaagatattccacacacttaaatatgtacacaaatgactttataacaagaaagcaaatttgtttaaaaaacaaacctacaattctgtctctctaacacatcaactccattttctctgtactcttttagtctttgccaatatatgtttatagttttcataatatgtaactaaagatagacataattttgcatttttttcacttaatactacagaataagaattccccaccatcatatttagcaatggcattatagttcttgaagtaagcatcccagaatttattgaactattgccatattactggtcgtttgtgttatttcactgctttaagtgtttttatgttagagaacataatgaaggtcttcatgggtatagctttttgagaagctagacatgttgaagaaattgggagcatgctattactagcttctatgaattggtatttactatgtatccctttaattaaattccattctgcagtaagtgtgatagctttgccgaagcacttgggggccaaaaggacatttgtaactggttaagttggaagatatttatttgtataaggtgggtagggacaggatggacaggctatttttcttggccacactcactgaatttaaataggcaatggagataaatcagttgtggcccaactagactgcctggatataatatccttttggactggatcatgtcgtttcattgcagtcaggatggctaagcatggtgatggatcataactgaccaaacagacaggttggttagaatgtatgaccagtcatagctgtgtaactgaggaactgattatattcctgtgactaatgaaaaagcccaatcttagagtagctgtggtaattataatgagaatactagtaaaacattttaaggtgttgtgttccagacactattccatgcatttacacacacacacacacacacacacacacacacacacacacacacacagtctcatttaatcctcataatattatgaggtagtgctattattaatatccattttctggatgaggaaactgaggccccaaccagtgaaataacttgctttgagtcccatattaagtagtactacccaggcaacctggccccagagcttacttacacgtgtagtaactacactgttcttcccatttatgaggtgattaaactatggaggcaggcatggcatacctgcagaacaggactagaatctcataggtttttgaacttattaggcagacctaaggttttttacacttcctgaggctatagaacagaactaatctcttagccttaatgtcactataacgtaaaaaccacgtgaagagaattacgatggtgagcagaggataggacacttattatagttgttacctcatttatttaattctttgtttcttagagaataagattctggtacatagcaggttcccattaaatacctattgatttaaagtttaaaacaaggaataatggctaaatgaatcattgaatgcgtatgtctatttcttggaggtctaatcatgttttcaaaactttggctcaactgtagttagtgcagagtatgtatggtcattctgctagagcaaaatcttagtataggattaaagaactctgcaaattgttaaaacatgcaggtacactagtttcaaaatgtattagtttgatttattattgtcattttctgataaagaaaggggagtagtctcccctaaagtttggtgattaagtcaccagccaccttttctattttggttgttgtggtaattggtgtttcctggaaattttccctctgttctattaataatgttaaagggggttacagccgtgactcactccaggaagtcaaccatcattcgcttcctcaatctcaccaaccagtccccatgtacaaaatcagcgacttctgcaaatgagttactttacagctctcaagagagttctagaaaatacagcttttgtatttcgctgtgtgcttcctgccttggcagagagtaaaacaaaccttcatgttttgctccttggtagtctcgagataattgaccagttaggtaactagtgtagtctcactcaagagaaatcccacttgctgtctaacaaaagtcccttggcactcagatttgcaaagttaaacctggggacagttcatgaagtccagtggagtctatacttcttttatacctggctttatgtttctgtattcattattttgctcaatgtttaattaagtaatgaatattttaacttgttcaacatataactccgtatgtcttagcactgctgtgtagtagataccatcataggcactgaggatgcagtacagacatggtagctgcccttgggaaccttctatcctagttattgttcactatattaccaagttaaccacagggaaaacaagttcagagaatacataggctgtgggcctgtcctaaaggaatcaatctgtaaccgacatgtctaaagttgtgcaggataggattattccacttaattctgtaatttgttttgtctggaatttatctcatctatgcccccaccctcactcatacacataaacatggagatggaacttaactgtgcattctcgtggtacttaaatttttgtaccttggattatcaaaatttttgttcatgtcctagcttctctgcaagttctttggttaaaaccagtgtgtgacacatctctggatcagaaatgtcttcctttctacctttcaccttccccaaccttcctggtctcctagcacagtgccagatgaatgacagctgtttagtatgtttggtaaatgctaactgtgtgtgatcttagaaaagttagtgaactttgctgattttcagtgtcctctttcgtaaaaaagagaataataaccatttctacttcctaggttgttgtcaaggttaagtattatatttaaagtttttttttagtagtgactagcacttagtaagcacttactgaatgttatcattaataaatgatcttacaaagcagtagcatttccttctaggatttttttgtagtccttcatgattgatagagaagagacatgcagtctaggatttcacatcagctttttaaatataggaaaccagatgtaaatatgctgcttcggttatttacatctgacattcttgcatgattgctgacaaaacattaagtaaaaattatgctactctttcccttagatgtcaattcatggtcacattaaagtcacaagatttttcctgaaacttactgctggtaccaattttaccataggttatcttaattagtatcatcacacagtggtgcagtttgacctttggggtttgattccagtcctttgtttattctgactgtgaatggaggagtcaggcagaatgacctttacatatctttacctccttctcccatcttctgctggcatagaaaactttgcataaagaaaggcaacagagcaactgcaaaattgctgggattaaaaagaaaattgtatgataatgagaaatccagtgtactctctctcccttaatatgtgtgtgtgtgtgtgtgtgtgtgtgcgcctgtatacatcagatatatggattgatgcagtgtactctctctcccttaatatgtgtgtgtgtgtgtgtgtgtgcgtgcctgtatacatcagatatatggattgatttctttttgtttataaaaaatattcacttttcaaaatgtatttatactatgctatcattgaattcttacatatcaaccctttgtggttgacactgcagagatgatgagctccattttataaagatggggcagttttatctcaacaactagtgtgttctagatcaaggactgattccagattctcaaagtcctacaacagtaatcttcaccatgctgtgtgtatgcgtgcgtatgtgtttatcagaatatattagaagataatttgcaagcagggattggttaaagttgaatgtttatatattcttttgtagtgttgcttacattttaaataaaaataaaactgcagtggatgtgcatttgtcatcatttagaggccttcagaccccaattcgtagtttcttcacagttgcctctattttctgattactagtccctggaaggtacagtgtcagagttgaagggatgttctcaaatccccctaaagttttccattgcaatactcattacagtttctttttttcttttcttttctttcttttttttttttttttttttttttttgagatggagtctcgctctgtcgcacaggctggagtgcagtggtgtgatctcggctcactgcaagctctgcctcccaggttcacgccattctcccacctcagcctcctgagtagttggtactacaggcgcccgccaccacgcccggctaattttgtttttgtatttttagtagagacggggtttcaccgtgttagccaggatgctctccatctcctgacctcatgatccgcccacctcggcctcccaagtgctgggattacaggcgtgagccaccgcgcccggccgcaatactcattacagtttctaattgcgtatgtgtgtaaaagaacatataacttcctcacagactcagctgtacactctacaggggcatcattgtatcttaggggtctagcctaatggctggtgggcactaggtgcttagcaataactattgaatgaatgaatgaaaaaatgaataagtgaattcaacacaacttttatttatttatttttattattatactttaagttctagggtacatgtgcacaacgtgcaggtttgttacataggtatacatgtgccatgttggtttgctgcacccatcaactcgtcatttacgttaggtatttctcctaacgctatccctcccccagccccacacaccccaagaggccctggtgtgtgatgttcccttccccgtgtccgtgtgttctcattgttcaactcccacttgtgagtgagaacatgcggtcaacataacttttaaaatccagaatgtcagtactaaaaggagccttttaagtattagaattcaacttaatgaaatgttgctacgtattttctctgttctcatcactgacgtagctgctttggagcatctatatctgatatttagatagtggatggcttcttgcaaacacttacattgctcacgtagtaatgtgaaccaacagattggtggcccgggcagcaacatattttctataatctgtagcatgaagccaactgaggtgtgaccgtggtatttcctgaagtggctttcttttgcttttctgttttgattattatgtggctgtggatttagttcacaccatcactgtgaagaattttcgaaacttaagaatcaagctctgtttatacattttcaacgtaagcccttaattacagtcactcctcgggcccagtgattttacagttacatgtcagattgaggggtttcgtcttgagaatgtcagctggctctgtgaagaagaagaagagcagatacgtgagttacccagaggagtgctgattgagtccaggagtctttctgtttaagagcacgttgaaagagtttgtgtgtctatttgtaaaaccattttggagatgataaaaagcattctgagacacacaaattttttttctgttttcaaaggcaagacagagacatgtggacaggttgatgaagggatcattgtgatcttttctctcagaacttgattttcattacttgaactttgtcttctatgcttttattaccaacacctgtacacaaaggtacacataatacttgcaaaaaagagaagaaactgttttcagactggggctctattaagtgttcattgaccacagtctacaacaacaaaaatgacaattcctgcttgccattgaaaataatgcaattgaaaagaaagggcggaagcaagttcttggctgcatagcttcagtctgatgccatattctagagtgaaaaggtattggcttggttttgaggcctgccttcatcacgtgaaggctctgtggcatggcagggttatcttacgctattgaacctcagtttctccatttatccaatagagatggaaagtattggcctgcatttatttctccttcaaatgacatattgtatagaagcgtattgtaagttgtaggtacttaacaaacatgaaggactgttatgatctcactttctgggctaaggagaaaatggtgggatgagtttcatgtccttttctttgtggttttgactccagcagcttccaaacgacttttgctgatgtttcctaattagcaatgctgaatctcgtgttgtatcaatcctccccattccttaagatggaaacaagtgttccagttatagctataccatgtgcctgacaggaaagaattgggttgccatcagaaccttaatttatcaatctcagtggcttaaaattttgaatttgcagcttaatattattcattaacaaagtatttttcatcccttagctttcctccagggaacaaaaggaaatggtacacactagctcttctaacaggctctcattcaataaaggatggtgtgcccttaattttgttagcatgtgtataaagaatgtacttttagtggacatgcttcactttgcaaatatagtgcataattttcaaatacatctttgactcttcctcaaacctgctcagaagctgtgtttttcctctcttcattaaaatgttccaacctggaaattttctctttacaattcagatatttttcacttcttgggaagggaataactaaataatttcaatactttaaactacaaggatgatgtatttttgttctacacagcattgatatggtggagctgtattctttttctaataatacaaataatatagggctgtaagggtttgtatcattgcatgtatatgttaagaggataagaggtatgtataaaagtaaattttgagaaattataagtataaaccaaaaagtcttatacctttagcaatgcctttaaatcttgaacttgaaagaaaaagttatgcccgactcgttgattgcatattaaataggaaaatacatttgttatacttgaactagattgttcttaggattttgtgaaagaaaatatataagcatgaatttattatagaaaataaaaatgaccctagaagaaaacctaggcaataccatttaggacataggcatgggcaaagacttcatgactaaaacaccaaaagcaatgccaacaaaagccaaaattgacaaatgggatctaattaaactaaagagcttctacacagcaaaagaaactatcatcagagtgaacaggcagcctacagaatgggagaaaatttttgcaatctgtccatctgagaaagggctaatatccagaatctacaaagaacttaaacaaatgtacaagaaaaaaacaaacaactccatcaaaaagtgggcaaaggatatgaacaggcacttctcagaagaagacatttatgtggccaaccaacatatggaaaaaaaacctcactatcactggtcattagagcaatgcaaatcaaaaccacaatgagataccatctcacgccagttaaagtggtgatcattaaaatgtcaggaaacaacagatgctggagaggatgtggagaaataagaatgcttttacactgttggtgggagtgtaaattagttcaaccattgtagaagacagtctggtcattcctcaaggatctacaaccagaaataccatttgacccaacaatcccattactggatgtatacccaaacaattataaatcattccactataaagacacatgcacacacatatgtttattgtggcactgttcacaatagcaaagaattggaaccaacccaaatgcccatcaatggtagactggataaagaaaatgtggcacatatgcaccatggaatactatgcagccataaaaaaggatgagttcatgtcctttgcagggacatggatgaagctggaaaccatcattctcagcaaactgacacaggaacagaaaaccaaacaccgtatgttctcactcataattgggagttgaagaatgagaacacatggacacagggagggtaacatcacacaccggggcctgttgggcagtgggagactagggagggatagcattaggagaaatacctaatgtagatgacaggttgacggatgcagcaaaccaccgtggcatatgtatacctatgtaacaaacctgcacgttctgcacatgtatcccagaacttaaagtataatttaaaaaaaaaaagtaaaaaagacattgattcattcattcatttattcaggcaatgtttggaactcatgatgtgccaggcactgttttaggaccaggaataagcaatgaccaaagtatttgctctcctgatagattataaacaaataaatatataatagctcaagctgtgaaagtcacaggcacacagagacacacacatctccaacatatgcagcaaggtaatgagataaagaattcctggccattttttgtgatacaggatagatgtaatggtttcctatcagttttatcatttttaaggtctctcttcttagaataaattattttatttgtttcttccgtatgccatttaacagggaggggaagttttctgccagttttgcacccactgtttttctttttcagtaagagccttctcatagtctgcttgaaggcagcggtcttgccacatgtgttctatgcataataatttcaggagagtcttgtccacaatgcttggttgattacggcttgtgggacaccacttaaatgactagaaacagctctctttaataaacacactggtgttgtccatcattttaagtgagcatgagagcccagcttcattttgccactccaatctcacacggcctagaagaactagtgaaagtagcaggtggtgtttgactttcagtttttctgaaatgtgtctctttctgccactctccagacgccgtgccagtcaggccctcaaggtcaaaacatcatgaaattgaccatagattatctcagccttttctttttaaaagtgtcattgtaacctgttggttactgtgtatgtcatttaacttctctgtctttagtttctgaagtaactggttttacattgccatcaaaaggcttctgtgggtttttatttttctttgtttttatttgtttgtaaacaatctccttttctaaactcatttccccaaatttccttaatttttcacggactgatgaaaatgttttgctgcttccagagcttgtcagcttctctttgtggcattgctttcattgttgttctccaagttcccactcagctcctgctttcttcaaaaaaccctttggtttctaacatctatgttttcaacatggcaatggagtgagttgcccagggaatgattggaccgtgattgttttcatggctttcttttgccttttctccatgtcctttttagctctaagcctcatttgtaagctttctagaaatgtggattctattatagaacttctgtttttctcatttttgtagttgctttctcaagagcaggtgctggtgaccacaggacgagtgagagacgagatggtgtctctcctttagcagttggcttaattaaggaggttttttgaagtgtatgggcttcaaaaagtctgacatgtgagttgtggcctgtgtggtctaactctgattcctttggatacagaaccttagaaagccttgagaaaaacctcagagatcatctatgcaatcaattctggctttacctggagggagttttataaaacacaaatgccagggcttcaacttgagagactctgatttcattgttttgcagtgggtctgcacatcagtagtttatagaaatttcccacatgattttgtgaaaccagggttgagaatcacttgattttacagggcatatataaggtccaaagcaaaagtgactcttggctgggcgtggtggctcacgcctgtaatcccagcactttgggaggccgaggtgggaggatcatgaggtcaggagatcgagaccagcctgcccaacatggtgaaaccccgtctctactaaaaatacaaaaattagtcaggcatggtggcaggtgcctgtaatcccaactactcaagaagctgaggcaggagaattacttgaatccaggaggcagaggttgcagtgagcagagattgcaccatagcagtccagcctgggcgacagagtgagactgtctcaaaaaaaaaaaaaaaaaaaattaacctgtcatggtggcatgtaatcccagctactccagaggctgatgcaggagaatcacttaaaacccgggaagtggaggttgcagtgagccgagatcgcgccattgcactccagcctgggcgacacagcaagactccatcttagaagaaaaaaaaaaggtgactctccgggattctatagcagtatggccatagagtagggacaagaacatatgcctcctcatttaccatcagtgctatttctattttgtttactaccatttactctcatttgattgtgtcaaattatctactgttgtactggggggccagagtggattcccaagcctcaaccacatagaagagtagattggaggttgttttcaaactattcaacattatcagtgggttgaatttgtaagctatcaactcaaaatataaagataatttttataacagggtctatattggattgtaaaaagagggtcataggatttggatctttagggctctgtaattcaaaatttgggatgttcattaggactatttgtgttatgttgtaaaacaattgtacttgttggcagacgtcttgggttcaagttatgattttgcatttaggaggtttgggaacgtggacaaactcccttttgagttttccttcaccccgtctttgtaatggagataatattctcatttccctgggtttttaggaaggttacctgagatgactcgtgcaaaagctaacacataatagataataatatctatctaaatagatattatttagatatctatctatattgagatatctatatttagataaagatatctatatttagataaagatatctatatttagatatctatatttagataaagatctatatttagatatctttatctaaatatctatctaaataaatgttaatttattctgaagtgtggtaagtttatctaacatttactgtagcaaccaaggtggggctaaatatggggaccaatcagaaagatgatctctgtcagttttgcctaggacgttcagtgggacttgggtaggagactgtggactaatctcacctatggaaatttgtgtggcctgtgctataactgagaggaaccaagtaagcctgtgtatatggcaaatggtagtcctctcccaaacaacatttgtaaagaaaatgcattttgcactatttcttagtgtgtctgaggctttttatgttcataaaaatcttagtgagttgttgaaacgtgcttttctgaaaaaccttggaatttacctggtttagaattagaatcagaaatgtgtctttttaaactgtattctaccttcttaaatcttttgccttctgcagcaacatggagcaactctgatacttttttctacttgagggcctttcgtagtcagagattatactaagatagcaaaaaatagaaagtgacacactagtcaaggttggtttattgtgtggtaggaaatccaaaagacgttggaagcaacaacaatagctctgaggtccttggaaccaggagttttgaaacttttactttattgcacgtctgttgacatgattccatgaatatttctgctctttctcccttatgtataccagatccactgggctgagttaaatataagaccccaagcatggtcaattcttattaatagtccttgaagaggctctctcttgtttttgattgactttctttttctttcttttcttttcctcatcctttctccttcttccattctcccttccacctcatagaagcctaatgggcttggaatagcacttataaatgcatgaatttttagaaatatatactattgttttcatttccacaataatcatgcctaacatttatcagccacttcccatatgctaggctctctttcaagtcctttaaatgtaataactataataatctcacaacaaactccatgagacagggactgttatctagtgtgttttatagattagaaaactgagacacaaagaaagtaactttctaagctcacatacctggtgagtcagtagctgaggcaagatttaaaatcaggcaatctgactgtacatctcactcttcgctactttgtccttgtgcctttagatcatggttctgtgctatcgatctgatcttatttcttactctttttactactgttgttgctcagcatagtcttcccccctcaaaaataagtaacatttatattgctattattattattattattttgagacagagtctcgttctgtcacccaggctggagtgcagtggcacaatctcagctcactgcaacctctgcctcccaggttcaagcaattcttctgcctcagcctcctgagtagctgggattacaggcgtgcaccaccacgcctggctaatttttgtatttttagtagagacagggttttaccatgttggtcaggctggtcttcagctcctgacctcgtgatccgcccacctcggactcccaaaatgctgggattacaggtgtgagccaccacgcccaacctgtattatgaattataatacatagataacgtgtaaatatttaatgtcacatattattcgtgtgagttagatttgtaaatttgattagcgctgagacattggtattagttttttctacagatgagaaaacaattacatacttttacaaatgatacaaatatgtgtgaaatatatttaatcacatacatgaataatgctcagtgagcaggcatagaattgtcaggacctttgcagtatctccaatatataccctgcccatagattaggaactattgctgtactattgctcatcagtttaaataattatgttaattcacatttatctatatgatcagcataatctttcaaaaatcgatttacaggcctggtgcggtggctcacgcctgtaatcctagcactttgggaggccgaggcaggtggatcatctgaggtcatgagttcgagaccagcctgaccaacatggtgaaactccttctctactaaaaatacaaaaattagctgggcatggtggcaagcgcctgtaatcccagctacttgggaggctgaggcaggagaattgcttgaacctgggaagcagaggttgcagtgagccgagatcacgccactgcactccagcttgggtgacaaagtgagactctgtctcaaaaaaaaaaaaaaatctatttacattgcagctcctttaggaggtttactacttgtaatactgtagagtcttccagagtgtgcatccattgtatttcactgattgatttcgttagtgatacacctcaaagtgaggtagtcatatacctccaactcttggctgccacaaatgtactgtcgtgagcattttgtatatgtgttcttaatgattggcagaagttagctcaggatttgtggctgtggggagggtgcttgatcatagtgcattttaatattgagtttcactaggctctgtgttttttgttttttgtttttgtttttttttaaacataaaggcttcactagggttactttcccccagtaaagcattaggattcttgttttcttcatgccatcaccagcacggggtattgcatgactttatattttttgctaatatgatgggtatggaactactagtacctcctggtttctgcttcttttccatacatagtaaacagattcagtctctcaaaattactgggaagaaaagtgatttgtttcataagtgttaagtgtctgtttctggtcatggctatctctgggactgtggtcatagagaggcatactggctattcagcagggtttctgagtgggaaaaaaatctcttgaaaatgtggtgttgtcaaggaaggccattttactgatgttacttcagggcccttctttcattccttcatatttttcaatatttattgtatggcaattgcattgtagaaacttttctaggtacttgggaacaaaattgtgaacaaaatagacatgtcctgtggtttctctggaacctttagtgtggtcaaggggacaggcattaatcaaaatactcaagcaaacatttaattacaaactatcatgagtgctacaaagggaaaggagaagagctctggtatataacggggtagatgatctgtgtgtgcttacttgatgcaggtgtcttttggggatgctataagatagaaaatttagaggataaggtaaagcagtaggaggaatattcagacagagagaataatgtgtgcagagatccacaggcaagagggaatgtggcatcctcgagggatagtgaaaccagagttgttttgaggacttttattcatttattcaacatatttttatggagtgcttactatgctctagaatatgacagtgaacaagacagaacactaggagatgtttgagatgaggccgaaaaaataggtaaggggctcgccctattgtacactcatctcccttggtttgtttttttgtgtgttttcagagagaaacagccgtacttaacaatctggtttcagattcttttaaccttctgtttgcctttctctgaaggtgctacagtttgtttgacaccctcttcaagaggggccagtagaactaaggataaaatttttaagtcttcccatcaagaaatgtgtcgttaacattaattaagtttcctcactgttatcaatgaatatccctccgtatccttctctttcactagctgagcattatattatgtgttgttcaagggcagatagtctgtgaagaagtgctttaaaaactgatagcgtgtgggctctgagcatgttgtgcggctgactggcccccacctcctcttgtttcctttctccccagaaaggcctcacttgctgcatgacaagtcaggctattgtttgctcattcgatattgtcagctaagatgcttcacaattccttaagaatttattattgttgttgttgagggatgatagagtcctcttcttctcatttaagtgacgtgtatcgaaaaggaaaaatgacaaataagaaaggacttgggaaaatttcctccactcctgacttccagacctttagaacttaatgctttccgttcagtacttctgccccctaaccttaaagtcttgagagaagaatgactggtgttgacaggatgcttgtttactggcttctgcctaatttttgaggcatgaagtggccatctcatataaagcaagtagttcacatcctgggactgagactacaacctggtttctccttgtcttgtttcgatggagttattctgtatcctgtgaagaatctctgttttgtcatattgtattccctctttaaatcttttatatctctttctcgtactattttgcccctgatgctgtttctttctttattttaagctttagattcacctcttaagttgtcagcccacatggccatacatgaccatggttcttactggtgtgaagaaagcagattgtagctggttgtttgagatgccttcttaggtggaccaacctctctcgggttctttggttttatctcttgctcttcctcttgaatgtttatgatacttcctggtcacgtcatttctctttgactctttctttcttccttccttaggttccggattcatacaggtatgaatctacttccccatctttgccaaccctggcatcgtgcccccttgattccttggcttttcacaggctagatgcttaatggactctggaagcctttatctctaggacgcctttatctgtaggactgggcttttttgtttgtttgagacagggtctcactccgatcacccaggctggagtgtagacctggggtttctaaacactcttcaccttgtgctcagctccttgtatgataccgaccggatcctatccatggacaataacaatcttgaatgtgttcacaatgcctgggggaataagtcccaatccggccaggaaatgctgatctccttccgacgggatctgcttgtctcacctcagcgccagttgcttccctttacaatctctttgctggccaggttagaacatgtgctaattctctgaaaacacaccatgctttccttcctctgtgtctttgcttgaatggttctctcagtccagaatacattttaaatatttctacttccacaaatctattctatagtatttatcaaaatagtaccttccctattaagtctcccctgattctttagctgaaagttattttgatttcctctgagttcctgttaattttgtgggtacttctgttaggcttcttagcattctacagataaggagatgggacttcgtttaaacagctctgggccacaaatatagcatgtagaactgtggagattctaactcacattttaacctaaaatgccatactctttttatcctattacattcttctcattccatatatgtctatcttatgtagtatgattgaaggcagggtgcttgaataaggtgtaatgtttttgactacttagcatatcctaggcactgtgtgacatattttgcatttatttaatttggctgtcataaaatttctgcaaggcaggtacagttactattcccactttacatatgaggaagtgaggtatggaaagattatgtaacttgtccaaggttaggcagctagcaggtgacaggcaggacaccagcttaggcagtgtggcatcacagcctatgcttgtaactgccgtgcaatgctgtaggtaagcaagagctaacaatataagcctgaaactactggctttctcagttgatggtatttgagaagtgtggtctatgatattcctcagtaactttcatccatggaaaaccaacatatctcatttctataggttttaggatttaaatatttttaaggatttttctgttgtagactttaaatttacgatttgagataaactgaatgctaaatctttcctgcttgggaagaattcagatgtaaaattgtaatttgtattattggaaaacaactccagttttatgcattctatgcaaggatgagctatgtattagttcattttcacgctgctgataaagacatacccgagactgggaagaagaagagggttaattggacttacaattccacatggctgggggaggcttcagaatcatggtgggaggtgaaaggcacatcttacatggcggaagcaagagaaaatgaggaggaagcaaaagcgggaacccctgataaacccatcagatctcatgaaacttattcactaccatgagaacagtatggggggaccatctccatgattcacatgatctcccacggcatccctcccacaacacgtgggaattattggagtataattcaagatgtgatttgggtggggacacaaagccatgactagaataaaccacatcaagttacctgcttatctaaagttttagaaggtgttcacaatgttattcgaaagccaacttagtgtagtgagcatttggagaagcatcctttatacaagtgagatgacatacattgttaatatgtgcttttatgtttgtctttgcaagatctgagctagaatagaatcatagctctagggccaattagagtgggagatagtttaatagataacacaggtgctattttgtcaagttgcatggtttctggacagtttacagagaaaaaatttttagctgagagcctgatgaagtcttaaggctattattaatagtaatatttggggactagcaaagtgctcacataaaaagcaccaacaaggattaaaaaaagagaaggtactgaccagattcactgccttctattcccaaaaagattattaaaaggttcatgtaaatagaatatgcgcacacccaggagaaagtgatttatttttaagctgaagccgaggttttacacatccctgataatagggtttaattaatgtttggagtgaataaaacacactcagaagaagtgtagtcatatccttaatttccttgattggcaaagtaattgatatcatgtgtgacatttgagtcagtgctattttatcagtcacttgctctctgcgagacagagactgtgattgaaaacagtaggtatgggtacttgattttaaaatgaactctatcataatatactgattacagaatcagaagggcaatgttggtgaatatttttgggcaaaaaatgactgtaacctattctagatatggtaaaaccagctctcagtacttaccctataaagagaatattggtttttttcagaattttgcagagggtctttttacttagggaacaaagagaactgtaattgtcaaatgtggttgtaaaacggtaaatctatttttgttcatggctcattcattcacttggcatttaaaaaaaaatttttttatttgtttattttagagacaggattttgctgtcacccaggcttgagtgcactagtgcagtcatagcttactgcacgctcaaactcctgatcttaaacaatcctcctgtcacagcttctcgagtagctgggactattggtgtgccccaccacacctggctaattttctattttttgtagagatgggatcttgctatgttgtccatgttggcactgggctcaaatgattctttgctttcgcctccccaaccactgcgattacaggcgtgagccaatgggcctgacctcatttggcgtttattgacaccatattagaaaccctgtactacgtataaagattattgggggaaacttctcagctatgcatgtgtgtacatgcatatgtgctcattagatcttggtgtaagtacagtttttcttctagtcatggtttaaaatatctgaaaaggtgctatggggacacagcagtttacaccaacagggaccttataattaagtagatatgactgtaacatagagagcgataacgttataaaagaaacacaggtatgttactataagaatgtgatgaacaaatcatttgataaagatatcagcagaggcttagtgtgggagatgccttttggctggacttgggcagttggttaattctgaatggggtttggggtaggggagtcaggtgaggattggtgtgtgtaggtatgcctaaaggcgtgaaaatatttccaagaaggattgcgtttctttttgccactgatggcagagtcaacctcggcttctgagtttaagaagagtgtgagcacctcgagcaaataagtcagctaaacaaatggagctgaggcattagaaaacgcctgtcgatttttaagaaaaggagctcaactctaagagtgcaaggaaaaataaatgcgtggagtgacaggataatagtctataattacttttaagattgctatattgaggctgtgacagtcacttagttcctgagtcttttcaggaaagggtaagaggtaactagccagagctggagtcactccttgtagaagttaggtggctttgatagtgacattaactcttcagaaactccatgactattatttggtatccaaagcagaaatttatgaaagagtcacagaattttacatctgtaagataatcttttgaaaataattagaaagaattcaggtttagaatatacatgggtgatagacagagtagtgaaaacatccccagaatctggtcctgctcaaaaatggagcagagtttcttagaatgcactgacgtcttcacattgaccctgcacagtaccatccctgggagatctggcaaaggagacatttcagaaatgtgtgagttaggtgccatggcattaagatcttttcctactgtacaacttcccgtttttaaactcaccatcttgatgtacagctaactaatgtaattttccaaagtttctagagaagacaacaaccttattgagatactgggacatctgggtgccagtctagttccagttacatcttacttttgaaagaaaggaaaatccattaaaattagaatttgtctaggaagcatctccctcccaggagcggagtactagctcttcactatcattggtctaagcgcttgaaatgctcccatgtttggaatcccattgtttatgtatcagttctcccaacacttccactcgttaggggtatgatttaagagttaaggccaggtgcggtggctcacacctgtaatccaagtactttgggaggccaaggggggcagaccacgaggtcaggagatcgagatcatcctggctaacatgatgaaacactgtctctactaaaaaaaaaaaatatatatatatatatataaaattagccaggcgtggtggcacacacctatattcccagctacctgggaggctgaggcaggagaatcgcttgaacccaggaggtggaggttgcagtgatccgagatcacgcccctgcactccagcctgggtgacagagtgagactccgtctcaaaaaatatcctttgaggtcacaggattgatgctatacaaatagtaattgtattattaatgatagaaatatgaagcatattggtattaaactatgagctgatacatggagcagcagatattgtatttttagttcatttccttaggcaaactcaaatattgtactcgcacagttacctcaggcattcacaagttagagttccagtgcaaacagtttgcagcaaatatgaaccacagtggtactattagttttgcatccactaggcacattttccagcttctgaagagataattgaaggagaacttggatatgggctaaattgtgtatatggataaaagattcagcagggatttaagcactttcgacccacatgaaacattaaatattagctgagactcacttgaagatggacttcttgattttgaagagttgtctgcatttttataaaactacatgagcatagtgcattttaactaataaaggaagtgaacacagttgagatgcattatctttcttagccttagggtactgggtgttactattataatttttaaaaatgtatgcttttcaatttttaaacagtttattatggaaatgtttaaacatatacaaagggatgagattactataatgtaccgccaggaatatattatccagcttcagcaataattgactgatggccagtcttgcttcacctatacacctattcctttccctcaccctggattattttgaagatagtctcagatattacgtcagttagtcacttctgcaaattttagtctttagtaggtatgtctaaaacatctctcaaccataaataacatgtcaggagagctcttttgcaagatgtttattgatcttgtgccttttgcatgagtatgggaatggctactgttttatggaaaaggagattaaagaatgcagtgtgggttttttttcatggccgatttctttctttccttctttttttttttctggaagtaggattggtttggggcatgatgtaggaatgttattgggtaagggtttaaactctatgtggcttctgtggtttggagagaccccaggttgatctgatctactatagttaacaagtcagataaactagattttatttgtaatccttttgtactgaagcccaaacaactggcattcttaaattagctagaatatcacttagtattccatttatagaagagttgtggttttaatttaaaaaatactgtaagtggagctactgaaataggcccaagtttattatagctaatacttcattacagagacttccgccattccctaaatctaaggagggggttgtttgtataccaaacatagtagatgtttctgtttgactagattacctagaaaatggcacctagggtaacaacttatgtgcttaatttgaatgaacacgcccagaaaaacaggagagaggaaaaaaagaaaagtaagagaaaagaggagagagagcacatagagagaggtacattatcaagctgtccacagcttcctgacaagagcagctgagttcttggtatcacagcacatcttcacaaaggcctcataaactagcgtgtctcagaatagttcattaataggagggaggaagaagaatttacgtagcagttcctgattcccatcgttcaaagtacatatttcctttttagtattgacttttccaggaaacttgttttattagtactcctactttccaaaataattctctatgtatggttttattttttaaaatgaaaacgataggaaagaaaattcttcgaattcattgtcatggggactcatactcagagaattggatatgacaatactcaacaccaaacctagttctgaaccccaatatctgattattatcaatagaatcagatcaagggaatacttattttcctcttagcaatctatattgattattcatgggggggggttctttgttctgagatcaggagaatgccctggttatatgtccatgtgtggccttagtcagtttctcatgtttcttatgttcatgtatcttttgcttaaaattggaaatatctaccttcaaggaaatactgtcgaagacatggttgacaatttcatagcagcagtttgatgaaatcattttgcacactgagtaaattagtcaattatgtaaaaattttatctgtagttttgtccaccttatgacaaaaattttggagaaaaacaacagccttattgatttacagacatctttctatttatcagtactagcatcagctttctgggacatgtcaactttcctgtttttgagtctgaatggatccataaacctaaacttgctgcaattggagtgcagatatcaagactattgcagaggtcttctcacacattatctgtgtgccttgagaatgggacctctactttggattctatttcatccatcctatacaaagagatcaagcaagataatcacgtattctctctgctttggcctttgaagactttaaatgacttagcttggtattaaatatttcatccaggagaagttgggacttgaaaatcaggctttgtcccttgcagaaaacttgactggttccaggcgcagttactgttggaacagaattctctttaatcttttgcggccattatcaacattgattttattccttgtgcagggcagtagagttccagcttctgtgttattacttttaaaacatggtataattttaggaaaccattttctttgtttctgaagtgtatgtataggctatgttcttcacattagatttttattttgaaagaacatggcaaagtgtggaaaacaaggaacatagttaacatgatcaagatatctgaaattgtgtaattagtgatagcttggataaagttgatatgaataagtaatatagagcagggagtgtccatgaatggagtggagttagcctcatgtcaaagtttactgtcccccagccagacctcagcttgtagacttagtattcaatttggttactctactgtgaaagagatactctcatctggagaagaccagccaagatagagagagaactaggctatgtcttgggaggaactgttgaaagagattgtaaggtgactttaagaaggtgataatcagggataccagaggaagacttagaggactccagaggatagaaatatgccagaatacagaacttaaacagaggcaaattttcattcagtacagaaaaagagtttctgacaaagtgatctgaaggtagaatgggctgtcctgggggatggtgagctccttcccactggaggattttcaagccttagcctagtgacccctaaggatatcaagatgtacaagggtcagtttgtggtttaactaggtgaccttcccctccaacctaaagacatttttgttgtctggctagacatcttacttcccatagtcttttaaaaaataaaattaaaaggcaataaataacttctgacaaaagaaaatagaagccatgttcttatcacccagtaatgaatatattgatatggttctttcaagtaacttttaaccttttacaatatacgtatcaaatgcatgtatcataggtgatatgttcaataatttttgcaaattgtgcatttttgtttaaaaaacacccagatcaagaaatagaacctcactagtcactcagactacttcatctccccatgaaaaacaccattatgatgtctaacagcatagattagttttgcttatttttgtatcatatgtaaaaggaaccacacagaatttattaagtatttttaattgtggttttcgttttttgactcaggcttaaatagctctctttttattgtccacagatttttatatatgcctagtcttgcaaagttattgtaggcagcaccttaatgaggttttaagggaattttgctattctaacattggaaaatttaggctgttttcagtttttatctgttataatctttgggcttgtagctttcctatcccctccacacccatttcttcactcatatttctcacaatatttcaaattgatttccatatgtggaattattagatcaaatggtacaatgaagttttaaagtttgatatttaccaaattttaatccaaaagttaccaaattatacttgcattagtaatatttaatagtgcctattgctttgttttaaaaaatgtgctaattttatgagaatggcttttcttcaattattaatagggcaacactttctttcacgtttgtaaactagttatagatttggtacatgtagtcagtcactgtgctaaattctccttaagaattacgtctcttttttgaaaaactaacttttaaaatagacattactattattattattattctcattttgaagatggggtaactgagaaacagagatactaactaatgtagctaatgaagtgaagctaattagtgtcacatttggagtttactcaaaatatgatactcttcagtttgatatgctactgcccttcatgttatcctttttaaaaaatatttttaaattgattgtatattattgcattagcatatttagccaatttatatgagctttatatatagcatatgtgtgtgttaccttcctggtaacacaccaaatggctcatataaatttagccaatttatatgagctatatatatatatatatatatatgcgtgtgtgtgtgtgtgtgtgtgtgtgtgtgtgtgtgtgtgtgttacttttttgggtgtttatttttaattttgttccaatttagaagcatataaaagtttgtttcaatgtgttttttaaattattcaagttgtaatcaaactgaaactaattttggtcaaaggtgaggctctacattgatttttaaataatttacccgtttttccaatttcatttaataaataatcttttctagccgagcacggtgggtcacacctgtaattccagcactttgggaggccgaggctggcagatcacctgaggtcaggaatttgtgaccaacctggccaacatggtgaaacactgtctctactaaaaatacaaaattagccaggcatggtggggggcacttgtaatcccagcttcttgggaggctgaggcaggagaattgcttgaaccaggaggcagaggctgcaatgagctgagattgtgccattgcactcctgcctgggaggcagagcaagactgtctccaaaaacaacaacaacaaaaataatctttcctttactgattcatttgtggtgtctcttttactgcatatgtatgaacgtgtggggtgtatgtgtatgtgtgttttagacataggatctcactctgttgcccatgtaggagtgagtggcacaatcatggctcactctgaccttgaactcttgggtgcaagtgatcttcctgtctcaacctccagagtaactaggactataggtgtgtgtcatcatgcctgactaatttaaaaaaaaaaaaagtttagaaatggggtcctgcaatgttgcccaggctggtcttcaactcctggcctcaggttgatcctcaagtgattaacctaggcctcccatagtgctacaatatatttggcaattatatctgcgtgcacggtttcttcattaatgtcgtcttattcctgtgtaaataacttccactcccatttcattttagattttcttacccatctttgcaatatcttcaaaaagaaagaagacttacaggagtccaatgctgcataatattaataaacttaattttcttaaattttcttctctggcagagaccataagcagtatgatatttagtcatgctaggataagacctgagtagaaattgtactagctatccagctcgtttgttaatttacttttgatgagacagagaacggtcatttaaccagcttttgttcggtgtctgttcggtactaggatctcctgagaaacccttgcatcctttatgtacttggtcctcataacattcacactaagcattcatggcagagccagcactggcacctgtggcttctatgttgctttttaccttgcattataccaattcatactaagaaaattgaagtgtgccctaatcacagtctttcatttgtaagtcgactcaatacagtattggatttggagttttgaaagaaagtaaaacctaatttccttccccaaagctattattattctatttagataaatggaaaagcaggtatgtgttgaggtttctagcttttaatctacagtgtttaataggttttaagttatttgttattgaaatcttgaagaaaacacataagttagatttcttgcttttatagcaaaaaattttttggatggcttagggagtcaagtgaaccattttaaatacagtatgactaaatctgaaaggcctgatatggtagctgctagccccatgtgaccatttgaagttgaatttaaatctacattaattaaacttaaataaaacatttgtaaaaattagtctctcagccactagtcacattttgagtgctcagtagccatcccttgcaagtattaggacagtatggaacattcccaccactgcagaaagttctgtggtgcagtgtccatctagatgattctacaaatggaagatttaggggaagaggagaagtaagtagtgaggtgtacctaattgcttctataagttttagtacaaagaacccttcctttaaaatattgatatttggtgaaacattcagatatcacgttttaaagtgatttcatggacactaatcaacagagcaacaacatagatatatcattgactacaaggatggatcaatacttgttctacctgtttcataacttagaggattatagggcactctataacacagcaccttaagtatcagaaaaataaaggctgcaggtgtttgaatgaattgttggatgttctgtttttataaacatgtggtcttctcatatttacaccccatttggtttgggatgaatctccattctgagtcccttaaatgttagggaagcttaagatgagaccctttggattctacacaccaatctaatttcggacccaatttgaagctgaaaaaggcttactatggaaaaaaaaaaaaaaaaaagcccaagccccaaaacatacacacacaaaacaaagtagaacaaaaggggataccatgatctttttatcaaattaggataataggatgacatggaattcagaagacagtgtgatattctctgggaatttgttattttatgaatgttcctgactgaaatttaaataaaaataaaatccagagtatacttccccctttagtaacagatagaagtgacaccttgttgaattccatttctggattactctgtttttattttcatctattggcacccaggacctggtgtttggtttgtaactatgattagtgggttggggttaatatgagaaattccgcaatgagtaagtcggaactattcggtgttatgtccaagaaagctcacatgtcctagttaaggctgtgtgaagtgaattggaccatcctgatgtggtggccccaaacactgggcttaatcctctggtgtgactgctttcacaggtcttttcaagagcctaagtaccataaaatattctcacaaaagccttcattccaaagaatgtgtgtgtcggctcatgtcaagagcttttagtgtagaacaatgtgtcgaaaaccacaatctaataaacaaacagataatctagttcagttttgtctaagtaatataatgtctttattaaactatttcctgcacctttagctctattcagaaggagaaagttctgcgtgggaatgtgtgtatatttactcttaataggaggccgtgtagctcctgtgactggatgtcttgtttttctcttctgagtagctcttgttttccatggtgggaattttccgtcttggtaatttggtattttacttggttttcattgtgaagtgtggaagtgtgtacaccttagttttagaaatgttgttttatcacctgcatctcagttatcaagggccaagtcagaaagttctcacgtgtttttaagcctttctaccagaccttgaactatccattaagtcaaaggggataggctatttccatgaagaaggtttagggattcctggcagggcaggaagaaggggcaagatttgcgaggatcagaatcctaggtactctcctttagactgcctggtgactactcatttgtcatatggaaaatcatggctcaatagttcagtagaataaaactttgtggaaatttctgaatattaaaggcttcattttcaacacggcagtgagatgggagagtcagggtcattcattggtattgtccacgttactggttgctttttgtctgatcttgcctggagaattatttttaagtaatgtgcctggaaagtgcctacttacagttaggttaacggccatcttatggcatcaggaggagctttctggctatacctattaaaggaagccttagtctcttattgccattaattgacccttgcattttgagtcatagaatcataaaccatcagtgtcgagagggctactaagcagtttccttggattaataaagcttgtatcttctttataatattcatgtcaagtggccttcctgcctctacttgaatacttccagttatttgtcaatctcacatcctcaaaccaggtaatttctatttaatttttgcccttaatcttcagggtttataaatacctattgataataccttcgttaatatggtgctttgaaactcttcatttttttccctaaataaacttgtaatttttctttctatatcatgacagtagaggctcatatttttatgccttttagtctcagttatatttttgtctgaagagctaaatatacttgaaaaaagtggtttctgtcatctcagaatatatatatatatatatatatatatatatatatatatatgctgtgtaaactccacctgtttgctaatcataacattcatttttctcaatgtgatggattttgtcaccacctccccccgcccccccgcctttatggcattgctatgtgaatcattgcaaaaactctgcactaacatttttcattctgtttataaggttcaaatagatagaacaattttctctaggctttagctctggtgtgtataattctggtcaggctcctaatctttttgagggatagtttccttatccataaaatggacctaagaaaagcaatcctatggggacaatataaaacttgtttagctgcaatcttaactcagacttgcttcctgaaattcctcaatctaatattaaataggggttttttgtttaaatgtggtagcaagattatagttacaaaaagaatagaacaatgcattaaaaaatagaagtatcttaaataatatgtttaaattttttaaaaatatgctgaaattataaagaaattcttagaaaatcatgaggaactctggaaaataggtaccatgaatacaagaacttttgctcttgtctatacttgtccttgcactgatgttcctactctgagtctagcactatgtgcagacttcccttcttatggtatgttgtggtgagcagaataatagccctcaaagttgtccacgtcttaatctctggaacatgtgaatatgttagggtacatgccacagggaaattaatgatgcacatggaactaaggttgttaatcagctaacctaagataatgaaattatcctggagtataaggatgggcccaacgctattacaagtgtgatagcaaatggaagaagaggacagaggaggtctttgaagtgatgtgatgtgagaaaaacttaacgtgtctttgctggctttgaagatggaggaaggggccacaagccaaagaatgaggagtagctttgagaagctggaaaagacaaagaagtggattctctggagagactccagaaaggaatgctgccctgccaacaccttgattttagtgcattgatatgcataactgatttctgatttatagaacagtaagataaatatatttctgttcttctaaaaaaccaagcttgtggtactttgttgtagtaacaacagaaaacgaatacacacaatatcatgttaaaatgatctgtttatatgtttttctcctttctaggcaatgaattcctcaagggtaacaatgctatctttgaaaaatcattttagtccatttccatatgaaaagaatacgaaatgtcctgtcaaacaccagaggtggtatttactcagtgtgtatgcaccatatgcctggcactgccctgggtattttgctttgaaaattttatttcctgtctgtttaaccctactaaatcttaactttcttatctgtaatgtgagtctatggactagatcaggtttggcaaacttttctgtaaatctggtaactaaatattttaggttttataggccatatggtatttgtcacaactattcatttctgccactggaatgcaaaagcagccatagacaataagtaaatgaatgaccttggctatgttccaaaagaactttatctacaaaaacaggaggtggtctggatttggccatttggctgttgcttgttgacctgtagactagcggacctctttattctgttctaattcctgtctaatatgattattctgtcagtttataacattgtgccgtgtcagttaagccaaggaagtgccagtaagacctgaagaaggaactcaagtgattggatgggtctgtttataagaagaagcataatattggagactcaagtgccaggaaggggactgtcaccatgtccttggcaaatggacctgggacaaattctctttaggatgagacataaggagatccttgaatgccaaagctgagctcgctgaacttgaaactcagtgaactggaactactgctggaggaataaaagggagcaataaatcctttgcactccagaatgaaagaccttctgaggcagctggccaaatgaagcaggaggagggaacaagttcctcactcagctaaattatgtctttgggctggccgacctggtctgctaaaataacaaggtggctgaacttctgctcagaacacgtcaccaaattttgcaatttgggactgtcttctatcccatgacttcctaatctgaggaagtgaagaaagcagagtgaatgaaacccaaggattgacttttttatggagggcctccttagagacaaaagttgatttttcaagagaaccctttatattgtgaactctgtattctaattcaaaaaccgttaagttcttggatgaagaacatccaatagattttggaggtcttgtaaactttgctattgatctgggacttaacctttgcagatgtgggactgtgtgtttatacatcaaagtgggtaaagaagagcccatccagagctaggcagacggaattgggatatgtttgtttgtctgattgcccggttgtggtggtggcggttgttttgacttggttacatcatcgcatttttgaggacaaaactaccctctttgattggtatgttacaatagcttgtttatgtcttgcaaattgttcgagaacagtttgtccattaaagaaaaaagtgacctagtaatactcccctacccaggggaatgtcgggttaatcagttgcacaagggcttgatatgccaagtcagtactaccccgaggctccgtatgcagttcctttccaagatttttaaacattctggggagaacacaatatttgtttatttggcttctaggactttgttttgttatcgttttagttacggtcttatgcttttctctcactccctgtctttcttttacccctaactctttggagccctggtgtgctaagagccatgttaacagtaaagcatctattcaataaacacttaactatattttatatttgagcttctaaatgtttgtgaagaatgtgtttctgggcaagtcacataaagaataatctcacagtaaaaataacttatatttatgtaggacattatagtttttatggtatttctaaattcagtaaaaggcgaaagatttataccatctgaagaaaaaccagggtgttgtatttttaaatttaaatactttggtctacacaaccctgggtagtataaaaggtaagtgctgttgctctcatttacaaacaaaaatattgagaatcaaaagtttcatgatttccctaggttcacacacatctagtaaatggttccaagtggacaaaaacttacacattttaatgtcgcagagctatttttttatatatgtaagttacctaactgcagcagtgattgccgagatcatccctatggtgatgttcaattgagtctccctatttcaatctttcaacctctcttttcttctctctctctctcatacacacacacacacacacacacacacacacacacacacgcacacataaaccacatacacacacattttgaaattggtagtcactcagtttctcaatcttcctttaaagactaatttattgggctagaatttatgggtgtagttgtcaaaaattcctgcatatacccactcaggaaatattttcccaaatcttctccatctcaactctgtgaggcattggaagaggtgcttttaggatagactgatgactcatatatgatgtctgccctcagggagcacacagtttagtgaggtaaatgtctcatgaatattccacaagatccaccttgataatgctctaaagttactatagagggctgaaggtgggaagatgctttcgtctggtggcaaaggatagtagtgtagggtgacatgggcctccaagaatagcttgggctcagatagtggagaggaaactcttaacggagacagaggtgtgagcaaagtcttggtgtccaggaagccagaggaagcattctggcagattaccgggtatgtggcttagcaaaagtcattattctgaaatataaaatgtccagtgctgctgtctgcagtattagtctcaaaggatacatactcaccagtacattccagagtttgttgacaaactttgacaacaaagcttatcaagtttctctccattgcctcataagaggcccatccagttagaggattcctccttttcagaatgagatcttgtcaaatcttgggaggctcagaacagacgtttaccaagcttccaataatactctcaaaccataattctctaaaacttcagcataattgccataaaatcaattgaccatatattagagagtttatttctgggctctgtattctattccatttgtctctatgtctgtccttatgctaggaccacactgttttgatcactgtagctttgtgataagctgtgaaatcaggaagtgagtgtcctccaacttggtccttttttcaagattgctttggctattcaaagagagccatgatatttttaatctagcaacagttgtatcaaatacattggaaaaacctgggtcaggaagaatgttgactatctgggctatttgtttagtctagatatgaggtaactatgcattaggtattttggtggcaaaggagatgcagagcagtaaatgaattagaaaaatttggtgtaatttaatatagcttgtttgtattcagagtgggtggttaagataaaaaggaaaagggttttccacctttgtgatagggagaattgtgataaggtaaatagaaaaatagagcacacaagaggaggttagcaggtctgtgggttatcctatctaaattcagatttgagcactgagctagaggttcatttgatgatgctcattcagcaatcagaaattcagaggtgaaatcaatgagtaccacaattattctgggtcttattttacttataaatggtgtatttatttagaattgcttttttaatgtaatgcatttatggttaccatggcacaagagccagatactgggaagcagttggggacagcagcaaaaatcaagatctggataaaggcagcttcatgaggcttctgtgccttacctcagctaagagtaaacagagtgctagatggctgttgacatgtgttttattttgaagtgactattattactaggatctgaaatccttagccttgatctcttggagcctaatgttcctgttctccagctgagagagactaattcaccatcttgtgttgtaaacactcactcattttaactgattacacctccaatgattctcaaatcactaaaattactaattgctattccttacacatcaaagagtgaatcctgaataattaaccccaaataaaattagatgaattggcccttttaattagagtccctgctgctgtttgttctgagcttccttttcttactgttaagagacttttagaatgattaaaactgtttaagacttaaacagccagtgaccttttaatacaatataaatccatgaaagcaatatttcagctagcaggtggtgaagtaaatttttagagcaagtacctgtcagctccagtattcctttggaaaaaaaaaatacatgccaaaaaacaaccaccttgaaatgaaatgagtgtctctatttgattatttttaaagcattcatgcatttgctaagcttcagacttgatgaaataaatgtcagggttgaaggagagtgagtaatggttggcatcattttatataaatagtaacaagaatttctcagtgagaagaatttgaagtcatttgtgcataaaagatgaatactggataaatcacagaaggcccctggcctcatgtagccatccttgtcttcggggattctcttgaagcaagagaatgagccccaacattggggaaaaggaagttttatggggtttaattgctgctgatcatcgaggcaggattaccagcctagccatgctgcattcagcctggattttgttggagatattttacatgttcctgctcgtctattccaagtctcctaaatagtaagaacctcttctcttcttcatagtcttctgaatttgtaggggtgtagcgggttttctcaccattcccaagaagtctcagtttctcacactaagtctgccatgtgctgtggtcagtgtgtccttagctagaagttaagatatttggggtcacagtgggctgcctggtgtggttctacactctttgactgtttctctattttttttccatggtggaaaatgtattcatctataaaaaaagttattggactagttcaatgacttactttttccttaaaatttaaaacataaattttaactttttattctgaaataatttgagaccctagagaacggttgaaaatagtataaaggattctcatttagtcatcacccagttttcccaagtattgacatcttacataaccacggtagagttaccaaagccaggtaaacactgacataatacttccttctaatacataaaccttatttagatttcattgattgtcctagtgatgtctcttttctggtctagaattatatccagaatcacatattgcattttattgccttgtcaccttagtcatctttaatttcagagagagagttgttcaatctttgtttttccagaaggtcaatgattcttaaccagcgctatacgccagaatcattgaaggagctttgcaaggtccttgtctgggtcccgaccccaaagattctgaattaaggattctaaagtcaagtctgggtgtatgtagtgtgagcaagtgccccaggagattccgatacacaccactggttaaaagtcagatgagtttcaatacctcaagctaagtattttcaaattctgtctatgacatgtatccttccccttccctcatttctctgctctttcttcatctccatctctcttttatgggattaaaaagcaaatttaaatgtctctttatactcttaagggatatacatatactgggtaaggcttatcaacagatcttttattggagaagatcaatacagtacagatggttgcaatatttctgaaggctagggtgcccccataaccaggtggtgacttgaggatgaagactctgttcctatactttgaagacataccctcagtaagataatgtgaaaacaaacaaacaaaaaacctagctagatggctacattaagacaggttattaactgtctagctgttggtatcatgaaggacctatgacccaccgtagtacattgttgaccttatgtcaatatttgaaaagtggcaaagttgaccatgggaaaagttcatgtgttcattgtctcaagagttctattcaatttaatatatgtagttttgtaccaataataatttatagcaataatatcattactgtttactgagtatctcatatgtgttctatatgctttatgtagagattataaaacagagagtctgccctcaaggagctgttaatcaggtaggggaaaccaatagttatccaattaagctaacaaagagcagaatattggctgtaatagagcttcagcaggaaggaagcctgcattatcattgacatgtcattgacaatgcattgacatgcattgacatgcattgacatgagaatggttccctctatagccaaagacagcagtggtgaaataaattaaatgccctatttaaagtgtttttattatgaaaccacactccctcaggcaccatcattgtctttggaggggttgtaagcttctggccttaatgaccaccacagggtaatgtcccaatcctaaggggaaaggatgtttttggactattctgtcagcactctgatatttgtttgcaagcttctttgtttttactggtaaattaagactttttgttgttgttttcctgggatgttgcctcattttctgtccatcacatgaatttttagatttttgtttcatttttaaaccgaggtaattttactttttcgcattggagctaaagatatctcactagctgatagaagactgatgcattaagctcaactcattgtcctatttattttgaatgctcatctttggaagtcaaaaatatatggtgtggtttgttgtctggatagcaattactatgtttttgtaaaacaaatgatacttggtggattcaaaagtgctatttggttctagtcgatgtgcagagctagactattgtcttaatttcatacgatttgaaatccatttaatgttttctactgagaaattgaatttgttatccaaccactgcatgacagagaattatagtatgcttgtatctcatgtaatacactgaggtgtctcacatttgtacagggtacttatttgtgattataaaagaggacttttaaagtctcagatatattctgtattagctaaatatggagtgaaactgtccaatttaaaatcagggagacgtcatctactttaaagataattcttcttgctttttaatttgagaatctcaaagagcatttcaagctaagttatttagaaagatgacagggacattaaattttggcttgagtacatatactgatgcattaaaattaaacgctgggtttgagtagattctgcgattcattttaaagtatcttatttttggttttttaaaaaaatgcatgcctataattcacttattgtataataattaagccaaaaggataaaaaattgaaaacaatgcttagcatctcatgagctgtagacaacccctgttaacataccggcctatataaaattgggaccatattataagcactattcaataacctcccttgtttcttacctgataagatatgaaaagcaggccgggcgtggtggctcacgcctataatcccagcactttgggaggccgaggcgggcggatcacgaggtgaggagatggagaccatcctggctaaaacagtgaaaccccttctctgctaaaaatccaaaaaaattagccgggcgtggtggcgggcgcctgtagtcccagctactcgggaggctgaggcaggagaatggcctgaacccgggaggcggagcttgcagtgagccgagattgcgccactgcagtccagcctgggcgacagagcaaaactctgtctcaaaaacaaacaaacaaacaaaaaagatatgaaaaacaattttttatgttcttcccccggatatgccaatacttactcccttactagatttaagtctttccccaaatatcaccttggtgaggccattttcatttttttttctttaaaattgcaactcccaccaccaccctaacagtcccaacccccttacttgccctacatttcatcatagcccttctcaccatgtgatattccgtttgatttactttttaagcattattcttctttggagtataagttccatggggcttcgtggagaagcacactttgttagttctatttgtttgtttttccctggggtctagagtaatgtatgatatatagatggcactcgatgaataaatagttgtaagatgtagatcaacatcattattttggtgaccacacaatttcccactgtatgattgcaatttatttttcaaccagtaccctgttaatgaacattctgagtttttgcattacattgctttgtgatgaagtttccttaacatgctcctctgcatgttaagttacttctttggtaggataatttattaaaagtgatattgctgaattaaagtttataaatatctttaaggcttttgattcctcttgccaaattttcttgagaaaagtttagtagcagtagcatatgagaatgctggtttccctatactattatcaattctgtgttttatcaatatttttaatcttagtccttccttttaattaatttgttagcaacttgagtattatcaaaattaatagtaatgttttctagttaaatagcagaaaatacaaatggaagaaaaatagaaaggttaatttttctaatgtataaaaggaacctgaagtttaaggatatctagcatgataactaaaaaattaatgttcctcggtcaaggtcacatatcttatttacagaggaagatgtgtcactgaagggagatatattgtgctattttgatgacaatgaggacagagaacatggaatggccaagccttgccctgataattatccctctcccagagagttctcaaaggagtttcacgctgtagaaacgggagcaaaatgagaatccaggtgccgctttattaatagcttcataagtgcttgctctccctctgggacagaggtctgtgatcccactgacatagtgcagaggctttggctctaggaataagtagaatttgtatccggtatcttcctcacaccactgtatcttggaagtcaacatactcagtgagctgcagctcctgaagacctggcttgacattctgatcctttgctttagagtcaagaagtacaacattccagctggtctgtcctgggagccagatgctcagaggtctgaagcaggaagtttaagaaggagatttcctgggtattgctttctaaaactgagactttaacagtagtagctggatcagtcaaattaataaccccttccttgtcagagagaagggcagagtgggacaggaaaagagcttgaaaaggtttcgtctctaatagaaatagcatgttgagcaagtcagtgcaattgctttcatattgttagttccaaccagtgcactgtaaataggttgagaaggccgagaagtgatgcattaaatgggatgtatcctcaatttttctcttggcctttgctgtaatgcatttcctggtggtttttaaaaccttactcagctgaacaattggagatgacacattttcaggtactgaaaatttctgttttgtgcatatgtgttatttaaaaattataaatgggtaaaataatgacaggttaagaatttgtataatggagagtatttcccttctactttcattcctcagttgcaaaatttagcttcatagaggcaacttgctgttatcaatagtttgggactccatttaaaagatagtccgtgataatacatacatatatgtgtatacattattaaataaatgataacgttatacatgctgtcctaggccttgaatgctgcatttaaaaatatttcacccaaggtgctttctggtacagttttcttggtggcacacatattttgatgcagattgaggatggagttgaagttgaaattggaagtgaagtcttcctttatttagtttcataataaattgcctgtagtctgtggagtgtacattatagctgtggcataattcattgccttatggagatcatcattgctgttacctttgttttatcctctcactttttctctttaagggaccttgttcagggagcttggtctcctcctctgagtgatcaagtttagattcagttgccctcttgtgcataaggaaaaagaaagcattgtcatgtataatgtagacattgtactaatcacttgcacgtaatttagctcagttatgttcaaaatgtaaattgagacctatttctgggccacagtcaatttagtgggtcagaaccaattttttttcaaataacagagcatttcaatgtgtgttttatttatatagtaggtatggtttcatgaaaccctttttttctagtatacatgtacgtgtacatatctagatagcaatattaccacattatataaaatatatttttttaatctaggttgtggtcaaaaagtttcagacttactgtgttagctgctttgatccacagattgacactgtgaagtagctgtggttttcctcatttcataggtgaggaaaactgggtctgggactatagaattgccttgcctgaaataaagggtagagctggggtttgtgttttaagtttttggacttaaaatttcgtactattttcctttcaaacatatatttttttctgtattagttactatatagttttttgtttttttgttttcttcttgttttgagatggagtcttgctctgtcgcctaggctggagtacagtggctccatctcggctcactgcaacctccgcctcccggttcaagcaattctctgcctcagcatcctgagtagctgggattacaggctcctgctaccacgcctggctaatttttgtaattttagcagagactgggtttcactctgttgcccaggctggtcttgaactcctgacctcctgatccgcttgcctcgacctcccaaagtgctggggttacaggtgtgagccatgcacccagccactagttactattaatggaaatgaataaccgtctttacttgaaacttatgctttgctaaccatgattaaaaaagtgttcaccttgtgtgtgtgcgtgtgtgtgtaggtattccaatccagtctcttttgacttcataatttagaaagttaacttgtggagtatctacatgcttttatgcttaccttaatagttagattttcctccaacaaccaaaaattctcccctcaacaaagtgggagaagcaatagctgccagctagcagaagctagagacatgtcactgccagtgcagcccatgggtctatgtcagcaacacctgagagcatgttggaaatgcagaatctctggctccagtgtggacctgaatcagagtctgcgtttgatctaggttccccgatgattggaacattgacatctgagatgtacgagtcaaagacaccaggtcatttattaaaacatcagttaaggaattgaatgggtttttatttttcagtcatgcgacctacagttactgaggatgttctggcccaaacctgtgactagagatgggcatataaagataaatcatgagtggactctacttgtaagaagctgcagttctaaccaggagggagtgatcataacacacaaatacaatcaagtattacagatgctctgatagaactgtatatgagacgcaaaaagggctgctatctaaatccttggatgtgtgtgtaggttttatatggatatttagatgaagaagagcatgatgctttctttgttttctttttgtaccacagtaaatgaatccaaactttgttgatagtcagagttgaattgttcccatgtgtttttctaccacaattacccataactagtaatttacttactttgcaggtaaattcttgttatcttcaccctctgatgggggcctttgtttcataaagggctaagcaagctctgcgttaggtagatgcctttcgtatctgactgacgcaagtgttagggtaaccacagtggggaatagctcagctggtcccagctaaccatccctgcttctcaaggccgcatcctttttacccctagattaaaagggagagcttgagaaaatatgcatagctaggtcctccggagtctttcctcactccctttttgagttaacaatatgcctaacaggctgttttctgaagtaaattggcagtaagtagtgtttgggaatcagagatggaatacttgatttgtccaactcctcatttaactgtttcttgctgctacctcttgcacccagcaaaaaccttttgaatattagctgaatgatttgggttcacatggagcaaatcaagcaagatatgtctcagcatctctccaagagtgagaatccatttcctgctctgtatttcaccagctatgtaactttgaataaaccattttacatgaaaattgaggcataaatatattttgtatgtaggtaggatttggaggatgagtggaggagtatggagggaccaggtctgaaggcacgtgtctatgaccactctactgcttctaaaactggacatttccattttagatttgatacatcgctgccaattgccggatggcattttgttttgttttgtttaaaagcttgcctgtacgtctcagagtctgagaggtgagttgcaatttccctgtaggtcagagaatctgggaggtgagttgcaatttccctgtaggtcacagaatctgggaggcaaggcagagaggacagggcatgcactaatatgaaggtctacagcttagctgtgctggctggaaggtactgcatttcatttcatccaggggctttcctccagaaggatcaccacctaggaatgaaagccgcatgctctttcattctttcattgttttcagaaatctattagaatggagaagacctccttcccccttcttctaatcatatataaatacagttcttttcattttcccatttttcttaaacatgataattctgccttgtctctaaagctgaacttattttcactgcaacttagaggcattttcctttatttacttgtctatgaaaatgatgagctctgagttagaattctcttaaacttttagtctgatttaggatagttattagcagtttttcattgaaactctcccggttagtttatgcctctctccaagggaaccatttcctctccttttatcagatttgtatctgtttttgagacatttgcccgttcctctacatcttttgaaaacgtgagcacctctctaaggaatgcagtaaggaccctttgatggttaagcttaaagaactgaaaactttggtctgacttaataattgatctaaataaagcagataattatgtgtttatcacgagggcttttaaacatctgccttttcatgcttagaatatagaatccatcttttcaagttgtttcttaaaaaaaccaaaaacattccacttttcttttttgttcgttttgaccctcccaggattgtcagcagcctgtgcctcactgtgtctgagttctattagagaaacagagtaaagaaggatatatttggaagggacagacagttgtactttttaagacttacttgttgtgacattttggacttttcatgtagcttctttatgacatagtttattgaacctttccaattttgtgggtctaaagtaggaataacatgttgtggttctcaaagtgcgatctcagacccagtcacatcaatcacccagggcctctgtttgataatatgatctccaagattttgttcagttctgatactgtctgatgctctgaaaatttcccatgatgtaacagaatctgatgaagtataagaggggacccaggaatccttttataaaatgggtatgaagaagacatagtaatatggtttagctctgtgtccccacccaaatttcgtcttgaattgtaatccccatgtgtcaagggagggatctggtgggaggggattggatcatgggagtggttcctccatgctgttctcatgatagtgagtgtgttctcacaagatctgatggtttaaacttatatggcagttcccccttcatgctctctctttcctgccactatgtgagatgtgcttgcttccccttcaccttctgccgtgattgtaactttcctgaggccctctagctatgcttcctgtcaaggctgcagaactgtgagtcaattaaacctcttcttctttataaattgcccattctcaggcagttatttatagcagtgagagaacagactcatacaacatagattcagatagaacatttgaacttggaaattaggttgtgaacagcaacctaaaccttttttgcctcattgcctaagctctcattgtgagcactgttttcatacatatgacctttaaaggcagtaaaaaacttcttgacagttctttttaattaacagatatgaaatattttttcatgcagtctgtggccaaatgaaagtttctcaatcctggctgcaggttcgaatcccttaggttttataggtgtcctggtgcctgaccccctcactccctgtcttctatccccaagattctgagaattgctgtgagatggaatttggacatcagcattttcgaatgtgtttctttggtgattctggtatttaaccaatgtttaaaactactgaatggaatgcatacagatttatgggatttataattgtcataaggatatgtacaaattatttccacagatttgtgcacccagagaataagaggagtagaaattttctttatgttgtaagttattgaacatttcttatcctgtgggtctaaagtagtaacaacatacagtggttattaaagtgtgctgtcagacccaaaggcatcgatcacacagggatttattagaaatgaagatggttggagttctccccagacctactgaatcagaatctctggatccaggacccaaaaatctgtattttaaaaagacattccagagatattgatgaactctaaagtttgagaaccatcagctttaagggttgttgtatgattcggtggcagtgtatgaaaatcttagcacactgcctggcatggtgtgagtctagtaagcggagtactcgagagatagtgcttttgattgcttagcagtctgaatttggcttggggctagacctgacagttcttggcttagctacactttgaattctaagactgttatttataaggcaaatagaggcaaactgaaccatttcaaaggtgtatcagaacaacaaaacctactcacagtcattctaatgtgctcactcttccattcttatacttctatttctcagggcctaaactgtgatgttttgataatatccaaaagcaactcacttaatgatggagactgctgccctaacccacaaagtgttgagcaactaaaatgcaaggaaaagctactcctccataaatagaaaagatctcttctccaacacatcaaaaacattatttttaataggaaaataacaaataaagaacaggttaaaaggtagaagtttctgtttccccaatacaattttttgcagactatttaaaaaggtttcattccaggaaccataaagctcttggatatatgtgtataacttagatcacagagatcaggttcactccctcaataactctgacagcagtgtgcttctcttgttggtaagagatgctaggtttttctcggtatcccaaagtctcattacttcttgcctggattatgtatagatttctaaattgggtgtttcttattcatttctcctaatctgtcctgcatggacttttacattagtctttagtaaatcgtattgtaaccaagtgtttctttctcagaaatccttggtggatctctgctgcatgcatgataaaattcaaaccctttttttgatgtgcaacatgtaaaaaccttaattttatcgcatatctaatctttataactcactggcattattttacattcctgtgtcccatgtttttcctatgtcatgacttgctttttattctctatgctctgaactttctgatcgccatgcctacattctcctgtctctctaccaaggatggacgtaccttctacatcatgtttcaggaaaattatatgatccactgagacttccatgatcctccactttatcttaatttccagaggttattcatgcatctttataaattacaccttgtgttatctttagttttgtacaatttttcttcctcctctatttgattgaaaatgtattgagggcaagcaccaaggtgtataaaattcagtaactctatctcccacccaagctcattcttcgctttgcttaatatattgacccctctagactagcttttataccatttctaaatatcaaatccgatactctttcttctgaaagttaagactactaattaaggctactaattaaactaagatggggaataattgctatacaacacaaaattatgtgtcaaagccaattataaaaaagtaaaatgccagcaaatatatcacgagtactataacgttgcatccttattaacttcatgttgtttacttcttttctgtaggtgattttcttccacccccacctccacctctagatgattccagtgcccttccatctatctctggaaactttcctcctccaccacctcttgatgaagaggctttcaaagtacaggtaagagctgaagttaaagtcatgttaggtaagagctgaagttaaagtcatgtttattagccatcctagggagctcatgaatttcatgattgtttctgtgctggataaacatttatccagagcctattgagagctttacaacttatgaagatctaaggtactttaatgcaacatacccaactcaagcttcccagagttctgctggcttaccctctgaagccctcaaaatacttttgcctactaattttgtttcagatcccaaagccattttttttttaggaatactatttgagaaggcaacatttccttgttattttggaggacatacagccatgtctttttattgctatgttctctatcttcaaacattgcattcaagtgagtaaggctgacattttaaggctgtagttggttaatgtggatccttttggtcagcaacatttttctagcaaaagcaacatcaaatatccttaggattttctcttctgggtaagttcaagggtgcacatcatacttatcaattatatagaactcttgggttccagcgagtggtaattgcaaagtaactcggggctgggatcagatgtgacattagaagtggttctcagactgtgatcatcggtaactgccgaaagctgccaccatttaagctgaagaagtgctttatgtcaagaagaaaatctaataaagtgatagaattattgttatagttttaggtgtgactatgttcgcatagatacattgaagaaaaaaatgagtcttctttgtctttcagagaaacattggaaatgtttgtagataaaatggaatgggccgggcgcggtggctcacgcctgtaatcccagcacttcgggaggccgaggcgggcggatcacgaggtcaggagatcgagaccatcccggctaaaacggtgaaaccccgtctctactaaaaatacaaaaaattagccgggcgtagtggcgggcgcctgtagtcccagctacttgggaggctgaggcaggagaatggcgtgaacccgggaggcagagcttgcagtgagccgagatcgcaccactgcactccagcctgggcgacagagcgagactccgtctcaaaaaaaaaaaaaaaaaaaaaggaatggtgtctggtaattattttcaaaataataagggttggaaactactgagtgagaacatgggtgaaatagggttggttatgatttgataactgttgggtgcatggaagtttattctgttattccgtctaccttttaaaaaatacctaatatcatttgtggaacataaaatatattgaattattgctcattaattttatcatttgttttacagtattattttttcattttaatttttgtagctacaagtaggatatgtatttatggcatacatgagatattttgatataggcatacagtcttttaaacatatacctttgtatatgtttaaaatatcctataataagaagtgtaaaagagaaaaagtcttagggaacaactgcttaaatggtttgttctattatttgcctttctttctcctaaatttgaggttgaaggagacaaagaaagaaatgattcattcgctcaacaaatattctgtattcctatgtgggcattattcaagcactaggaatgttatagcaaaaaagacagacaccactctgtcctcagggaacgtaaaagttagtgggactagtggaaataaacaagatacgcacattacaaagtacattagagtggataagtggggaaacagggagggggtcaaggcttacctactaggatgggcattatcaatatggccccactgagaaggcgacgcttaaatgaggacttgaagaaggagaggagggaatgagctctagagatttcttggggagtgtattttcatatagtagatattaagaagtagaaaaggcttttgatattatctatcatttgaaatcagtaaattgcagttgtaaccagtaagtaccaattcagtttctggagtctagatcttttaaggctattgaaaaatatgtgtattgcaaatataggccatgaatttcttgcattttattttggtgtatactaataaaatcaactatcagatgccagtgatgaatgagagtcctataaagtttgtatttattttatgtaacagatagaacctttggcaaataaaaccaatatgagtgatttttcttaattttagtcattttttaataaaatgaggaaatccttagctttggctttaatatacctttggtcttactttgctgaagttggttttttgcatattgtttaatatgtacaatttttaaagtcactgactctgtttcctctcttagattgtcatagaaactattttgttgcattttaaatctttagttctcacaatgttatttgaagtagtgacagaagactcgtgattgaaaactagttacatagattattctagttgtgtgatcttgcgcaatgcatgctgagtcccggtttcctcttcattagaaacaaaacaaatatatatacctcttacaattaaatgaaatacagatggatttgaaagtattaaactgaaagggctatacaaatattttgatgttatattaataatcactattaatatgtaagaagactagtaaggattttccagtgggttccattaaaaaattcaaccatggggctttcaaaagataatgaagaatttttttcaggtggaccttgttctgttagatgtactcaagccgtggctttgtttttgaagaggaaggaaataaacaaaatgcctgttgtcatgttggcttaagttctctgtaaaacagaagggaggaggataaaaaataaaatacggtttgccaaatggaaaaggacaaatctggtagggagaggcctgttatttttgagacgcttcatatggaagattgttgatacattcaaaagaaaacgaacatgccctccccttgtgcagaagtgacttagatgtgatagcggcttggtcctgctctggcccaggtttgtaccagctatagaaatgagccatggtagagcctaaagtagcatgatcactggagaaaattctgcgcagtttcctctcggctatggttaaaacctcatgttcccaagtccaaattatagctggtaaatgtgtgtttttatgcagaagactgtttatgtttccagccagattttcaggtcagagccaaaagaacgtctactaagagtgattataagagttgtaagattttgagagcagaaagggaccttagagatcatttagtccaactctggcgccaggcatctagttacagtcctttcaagtatttgctaaattaatttccttttttttttttttttggaaatggggaaactgagacccaagaagggatggatcctctggtttctgacagaggtcttattgaatttgaaaaatcttgactcctggccttgaccttcttcctgctgtcccagatggcccatgaacttggttttgctttagtcctctagcagacttcaaggctctgagattcattgcagagggttacacgtttttatttggaaggagcaggtgatgccggagttttgcttggctgtctgaatttttgatatatgctataagcttttatttcttcaaaaaaggcaaataaatatttagccttaaggattcttggtttaacagttctcattttcatgtgggaagatgcaacttggaaaacaggggaaggatttggtttgcttttctgtcaggatcaacgtgacctccatgcctgtgatgtttgtagtgacacttcagcaatcactttattaattcatttgttcttcattcattcagtgtaaattgaatgcttcttgtaagtagacatatatgctagtgattatagccttaaaacttggcatcataggtttaatgctctgagtctcagccttgggacggtcagttagttttatttatttatttatttatttatttattttgatacagagtctcactctgtcacccaggctggagtgcagtggcgggatcttggctcactgcaacctccacctcccaggttcaagcgattctcctgcctcagcctcctgagtagctgggactacaggcacccaccaccacgcctggctaatttttttgtattttcggtagagatggggtttcactatattggccaggttggtctcaaactcctgaccttgtgatccacccgccttggcctcccaaagtgctgggattacaggcatgatccaccgcgcccggccagttagttttattcttatctgaccccacagttggtaatttcttcctcttttcagccaggccataggcaagtattagtattatataacattgcttaaggtagttacaaagaagtcacgcgtctcagaattttggacttgcaagagaattagagttaatacattcaagttcctttctattgtttgaatcttgtaattttttcctacataacaaaatgtttatgggtaattatgataggtgaggcagtgctgcaggataaggagatggatcagtacagtactcagaatcacattcggaagatgcatatacacagtcatttaagtcattttatggtaaattatgctttggtcatcatacattgatcagaagcataatctaagtcctaggttagtggtggagagtgagggaagtaaattaactgtgactggagagaggcaagaaggattcatagaaacaatttaaattgaactgaactttgatggctgggtgggaccttaattttcagataggtgagtggatttttcagcaataaaataaaagaattaaaacacagaggaaggagagctcaaagtaagtgtggtaggccttgtgtttctaactgtggaacctactctttgttctgaaaccattgacaatttattgtaggggcttgttattattttaaatataagggtgatatccccagaactgttgttggatgccaagtgatactgttaacataaattaaggcaaaacatgttgcacttgcaggaaaccccatgcaaacaattctgagttgtctggtagacttccttcagatccatggggacttacctgctgacatctgatggctttgaattcaggggctcaatatttaacttcctctttttatgatatctttgttcgtcttttcttggtgacttccagttgacaacttctaactctgcttctctgtttgtttcccagtcctgtggcttgctttcatttgcctactattcagtatttgcatacctctggttttcatctttccttttctgtttggtcctgcaaaatggccaggcttgctaatgtaactccaggccctccacattagaaaacagaggggttttgtccattggtgattacttcaaatgttaaacatttctctttgttattgagtagaaatgtgtccctttatgatgtcctcatattggttttctttccccttttaaaaagtgatgcaaagtcagaggaatgaccaggccaggagagagataggtgctgtatgtctcaaggagttgatgagtaaagctactgaaagatgttacttttcaaaggagtgagtaagcacagagtaacatgagctatgcccagaattagtggaaaagtagagaaatgtctgaaattgtttattttaaagtcagcctccaaaagctcttgagcatctattcttgtgaaaacaattcaaagctcatatatgtgtatgatgaatagtggcttataatcttttttctttttttttgagacagagtcttgctctgttgaccagcctctgcctcctgggttcaagcgattctcctgtctcagcccaccgagtagctgggactttataagcacgccccaccaagaccggctaattttttgtatttttagtagagatggggtttcgccacacaggccagtctggtcttgaactcctgacttcgggtgatccgcccacctcggccccacgaagtgctaggattacaggtatgagccaccatgcccggcctcattttcctacttactaattttatgtgtttagtttaacaatgataatttgaaaatcaattcaagttttagcaaaactggcactggaattttttttttttttttttttttgggacagagtctcgctctgttgtccaggctggagtgcagtggtgtgatcttggctcactgcaagctctacctcctgggttcatgccattctcctgccttagcctcccaagtagctgggaccacaggcacccaccaccacacctggctaatttttttagttttttatttttagtagagacgaggtttcaccgtgttagccaggatggtctcgatctcctgacctcgtgatccgcctgcctcagcctcccaagtgctgggattacaggcgtgagccaccgcgcctggccggcactggaatttttgtcttgtgattccatgtaggactatcatggtctcaggtacagaacaacaggattttatttttagacataaggaactcaaacctacagtatggccacattcattcatgaactcacagaaataggcagctgaactggctttacgtgggttggaccaccttatcataaaagtctgtctttctgctgccggttagtgtgataaaggaggaggaggctgggtatgaaaagagatgtcggctgtggagattaagagtagaggtagtggacagtgttgccagggcaaaaacaacatggtcagcaagagctttaatgtattctaaaatgcttgttttcaaaagggtgagaatacaaggatatcttgatccatgaaaacataccaaagagatgattgagatgcttatttcttcctggccctttgcctagttccttttgggtcagcaaaccccagttgatttgtagcttgtttgtgaccctgacagcaacagtagcagcagcagcagcagaagcagcaatagcaggagcagcttgctttgcaattatctcctatttttatggtccacatatgtaggtcattgtgtgtttattaaggctgggtaggctcttagcatgtcactggctctggtcattgtgactttctagaagcgaatgtcacagttttcctggttgctttttgctcttaatcatcatctgattggttattcagataagaagatggacatttttgttgtctggacttgtaaaaacccttttgacagtagccgacctagagtccaggggagtattccaatatttcatttagcattaggaaacttttaatggaatatcatagtttctcttctttactttttaagaacttaaagaggtaaaactttcccctgggattgatagtggagtatgtgtacatatacacatacccacctactcacctatatcaacctgattaccactgccaccactaccttgaaataatttgtgacacatttatactctctgcagtgaaagattggttaactgctcgacaaaaaaaagtcttgtggggaattgatggtggttagttctgttgaatgtagggataaccaatgaggttagctttgccttagctcctgagtttctgtatagggagtaatatactatgcttgcatatttcagaacatttcctttgctcaaagttaagtgagactatagttggttctttttgagtcagtgaaagttttatcccaatttgtctctcccatcaagagtcttagtggtttcttcaaaggtgaaatgtacttattgttttttttattttaacttacaaaaaagtagtgggtctttttctacttataagaaagtaatgtcagccgggtgtggtggctcacacctgtaataccagtactttgggaggctgaggcaggtggattacctgaggtcaaggagttcgagaccagcctggccaacatgatgaaaccccattgttactaaaaatacaaaaatttgctctgtgtggtcgtgtgtgcctgtaatcccagctactccagaggctgatgcaggagaattgcttgaacccagtagacagaggctgcagtgagccgagattgcaccattgccctccagcctgggtgacaaaagcgaaactccgtctcaaagaaacaaacaaacaaaaacagtaacgtaaaaaaatcaaacgatgtagattagatattttcaaatttatttctctatgagggaaaaattatgatctgcttatatgtcctgctcccaataaacacgccaaatgatgcttgaacattcttttcttccctgctccatcccacattctattaaaataatttggagaatatgttgtaacatttttaactttatagcaaatctcttttgagaattgtttcttgcattaaattttataaccacatcagtaataaactgtaacttttacctgtttgctgtgctattttctatttactatctttttcttgtattcatcatcttgattcttctcttttttgttctttttttctgccatagtacttcattaagtaattttatgggaaggctacatgcttgatgtatttcctgagtctttgtatatctaaaatgagttgttattgccttcatatttgagtaaaagcttggctataagtagaattctcgggtcaaatttgctttacttcagtattgtaccaagatttgcacactatcatttagtatcatttagtattcagtgcagcagatgagaaatctgatgccagtctgattccttttccagtttagtaaatttttcttgtttggtctataggctttatttgtgggattcagcaattttactaaactgtgtctagacacagctcgctttttacctattctgctatttctactcaagtcaaggttttctttatgtaaatgggattttcttctttcttttcttcttttcttttcctttctttcttttctttctttcttgaactcctgagctcaggtgatcctcctgcctcaacctcctaagtagctgggactaaaggtgtgtaccaccatgcccagctaatttatttatttattattattttatttttgtagagacagggtcttgctattttggccaggctgatcttgaactcctggcctcaagcagttctcctgtcctgatgcctctcaaagtgctgggtttacaggtgtgagccactgctcccagtcaagattttcttataatatgttgaaaatatattttaatctttcattcacctttttcttctttatgaactcctactatatggaattggatttcttctctattcttcatattagttttctttttccaatagttctactacatggagggatttctgttgcttacttcccttttatattcttaatttttgtggtgatagtctgcttttgacttataaatgctctataaaactgaatttggggagagtatttggtaggagtggctctggatatctgttgttcagggtagctagcttgcacttaaacctttatcttttatctgaaatgggaatatatagttatttaaatgcagggtggccatagggtatatacgttcagtcttcaaccatatatgtaattaggggatgcaggccagcagaagaattgcccttagatgcacaggtcaagagcagaccagcaaggttaatctgggtcctcaaggctaatggtttggggattcataggcaggtagcaaagcccctcccttacatgccatacatgtatgccaggtgagggctgcaggagctgtggccagcgcttatgtatattggtctctagttgaattctcaagcccctttgatttcctccctcattgtgttttcatcggtgactttgcttctcaatgacacactgtcaccagcggtgctgggaattgtggcagagtcctttttgttagaaagcataaactcattaaatcacttcagtcaaatcacttttgactgactttcattaaatacccctaacgtccattctaaagagccttgccccacccctcaccctttttgttatgacagttcctggtgtcctgctcaggtcctggtgtcttttgctatgtatctcaaactcactttgctgcctgtgaggagttcatcacagaaaacgtgctctctgatagcattatctaagccaaagaaagcttcagagacagcataatgcgatggttaacactgcaagtgctcttccaggcttcctgggtacacatctggcttcctgcttactggctgcatgactgtaacgtgctgctcaacctttctgtggcccacttaaatcctctgtaaaatgggtgattgattgttgtgaggtttcaaagacataatgcacataaagaatattttatgtaattgacatgtcctaaaacttagtaaatattttcactgttgtgatattttgggctagcaggtctctgtgctgggttttgccatagttgtcactgacatttgatttgcaccatgcctcctcagagttaacccgtgatcccatcccttgctattataaggttcaggattttatatatatatatatatattttatttatattttattatatatttttatatatttatatttatattttattatatatttatattatatttatatttatttatatatatttataaatatataatatatatatttataaatatatatatatttttttttgcagaagaaatactcccacaaacttcctctataaaatgaatgattgaattaaataatcatgtagctctcttacagctctaaaattcagtgccttggtaataaaatatcacttctttgtaatttcatggtgatttataatttgcaaaatacattataacagcacaagtataatttaactaatgaaataaaaatgaggatccaagagttgaaggaacttgtttagatctcataattgtcatgaaagcagttacttatttttaaatagacaataacaaaatcatttcggtgactttttacaaatgagagaatgtggatactcttaaatcctcaaaaagcagccattgtcgtcaataatatatgttgatgtttagtaaccatgaacctccgaggtagttttctttgtaattttttagtggaagattagcacatcttccatcctggcctctagcatattttctgacaaaccccttgttgattgtatcacataccttttatccatggatttggtacgaaagccctattgggcccacaaatctttcggttcttttgtaatttacataatccaatcaacaggggcacagaaacaccttgttctgaaagaaggagtgaaagggagtagaggatgctgacaccaaaaacctagggcactaactcatattttatctctgaatatagtactttgaaaccctagtgtcttaggaaggttttctgttcatagctgatttcacttgatccattcaaaagtcaagcatttttgtactcttactatataacttaaaatatattatagcatggggtgtttataccaatccttgaggggttaagctattattatcattattttatcattaacttctgtgagtttgacttgtacagggcctcctagcctgcaaatttcaaaattgacgtcttttttttttgagacagggtcttcttgctctgttgcccagtctggagtgcagtggcatgatctccactcactgcagactccacctccagggttcaagccattctcccgcctcagcctcctgagtagctgggattacaggcacgtgccatcacacctggctaatttttgtattttttttagtagagacaaggtttcaccatgttggccaggctggtctcgaacacctgacctcgtgatctgcccacctcagcctcccaaagtgctgggattacaggcgtgagccactgcacccagcaaacattgctttttttaataaaagactttcatatactttatctcacttgaacctttagacaacttctgcaaagggaaaggtagggaggattctccatcttgtatcagtgaaggctctggggctctgaggttaagcagcattccaggtttccatggcattaactgtcccaggcagggatgaagctctctgagacgtgccagtccatttctctctccattgccatcgctgctgtattgttactctccctttatattcatttttagtgaaggaaacaaaacagcagttgtcactttcctttcccagtagtttcattatttgctgtcaccagttctgttgcaggatcctctattgtaatattgtcttcagattttaaaaaatgtatctctacatattggaagaaagcactgtggtggaaaatacaggaaaactgtgtacagacctgttaaatggaaatgttttcataatttttagttagttttatttgtattttactaatgaaatttagtaaagatgtcaatgtcaatctttcttactacggaaataagttaaattttgccaactagtggaaaaaaagtttctgtggcattttttttttttaaggaatacaggattgatacaagaatgagagcattcatattataagaaatataagttttgtggttttttttgaaataaaaatttggtttatgagaggcttaaaaaatgaataaattcccttctttcctgatagtttctgtcgttcccttggggattaaaggagtgtgaatctatcctacagccacttcctctctgaactgtagatgacacatcaggatgtgatttggggtagatcaagcctcagagtcgaatctcagtgtctagccgtagaggtggtatgatagtatgataattccacatgtcctgccttctgggctttttgacattcatagcatttctaaacaagtgaaggatttatcttaaaaaataaaattttagtattttcttcattattcgtgagctttaattctttccattagaaattatgtcatccccatatttagagcaatgaataattgcataacttttaaattgtgtatttgatggtatggtgtatattgaaaagagaatgagaaactatcccctgaatagagatttagtgattcaagccatcactttctaaaatatacgcacttcagagtgaaagttcagtgtcagaacttcatagagtgtctggccagctagagttaggtatttcatggagagatgatcaaacaattgaacagaaaatacagcaaccagaagagtttttcactgtgcatgttcagaagacttcatcatttttattatcattttatatcaagccattttataagtagagatgtgtctagaggattgttttcatttccttttagctcattgaaagtcatacagtgtcactttagtaattctcttcttgcccagtggggatagaaaccagttttgggccacggcaactatatagaagtattttcatagagttacagattcattaaatgagaccctctctcctccccttaacacccactgtgtttctgctataatgaggatttaagcaacagtcccaacatgaactagctcatttcagtactagggaaatggctgttgcatgggtttaccacctctgattctgcaacaattgttctttttctgacagcgtcttctacctcctccaggcaggcacaactcttgatgacttgaacctcctatgttcttttttttcccccccagcttgtaaaattatggtaaaatacacataatataaaatttactatcttcaccgtttaatgttctgttcagtagcaatatgatgaagtacattcatattgttgcaactgtcaccagtatccatcttcagaactcatttcatcttgcaaaactgaacctctataccgcttcaccaataaccccccattccactctcagccagcccctgaaaccaccattctactctctgtctctaagattttaacttcacgagcacatggtaaaattgtaatcagattgtatttgtcttcgcaactggcttattttacttaacataatgtcctcaaagtttatccatgttgtagcatatgtcatgctatatatatgtcatgttctgcttatccgttcttgttaatagacatttgggttctttccccattttacctactgtgggaataatgctgctataagtatgggtgtagaaatcactcttttggaccctgctttcagttattttgagtatatacccagaagtgaattgctagataacatggtagttctatttttaatattttgaggaacattcataccattttccacagcagctgtactgtttccattcctcacaacagcacacgagttctgatttctccacgtccttgccgacactgttttttgtctcgataatagccatcctaatgggtgcagagtgatagctcattgtagttttgatttgcatttctctaatgattactgattttgagcatctattcatgtatgtattagccatttgtatatatatatcttctttggagaaatgtctattcaagttctttattcatttttgaatttgacttttttttctttttgagttttgtaaggtctctatatattctgaatattaatcccttatcaggtatgatttgataatactttctcccattttgaagattgcctttttactccattgatactgtcttttgatttttaatttttatgaaattcaatttgtctcttgtgttatttgtgccttttgtgtcatattaagacattcgttgccaaattcaatgtcatgatgcttttgcatatgttttattctaatctacaattttagatgttacctttaggtcatggatccatttcgagttaacttttataattatgctaggaaagagtccacccttactcttttgtgtgtggatattaaattttcccagcaccatttgttgaaaagactgtccttcctgtattaaatgatcttggtgcccttgtaggcagtgacttgaacatatatctgagggtttatttctggactgtctcttatgtgttattatgccaatagcacactgttttgcttactttagctttgtattaatttttgaaatcaggaagtgtcggtcctccacctttgttcctttttactcaggattgttctgcctattttaggtcatttcatattccatatgaattttaggataggtttttctactttttaaaaaatgtcactgggattttgatcgggaccgcattaagtctggatatcatattggttgatattgacatcttagttatattaagtcttgcattctatgaacatgagatgtctaccatttatttatgtcttctttaattcctttctgaaatgtattcaagttttcattgttcaaggcttttaactatttattcacgttaatttctaagtattttgtcttttattttttgatgctattgtatatggaatgatttgcttaatttcctttttgaattgttcattgttgatacaaatgtaagtgatttttgtgtagtaactttatatgctctacttggctaaattcactatttagttctaatagtctttgtgtccaatctttagggttttctacatataagattatgtcatctacaagaagagatgatttaattctttctttttaattttgacacctttatttttttttcttccctgattactctgatgaggacttccagtattacactaaattgttatggcaaaagctggtattcctaatcttagaggaaaagctttcagtcttttatcattgagtatgattttctctgtgggtttccatctgtggcttttgctatgttgagatagttttcttctattcccagtttgttgaatatttttcttatgaaaggatattgaattttgtcaaatgcttttctgtgtcaattgagaagataactttttttccattctgttaatataatatataaccttgatttgtttgttgagtatccgttcgttacaataataaatttcacttggccatgatatatcaaacttgtaatatgctattaaatttgacttggggtatttgattgaggattttgcatcaatgtttattagggatattgttctgtacttttcatgtagtatctttgtcggactttgatgtcacagaatgagttaggaagtgtttccttctttttaattttttggaaagatttgaggataattgttgttagttcatgtatcaatgtttggtagaatttactagtgaagccatggttccagattttttcttactcagattttggatactgattcaatcttcttagtattcatagcatattcagattttttatttgtggtttagtcttggtgcattttgtgtttcttgaaaatttccctgtcatctgggttatcgaattttttgccacacacttgctcatagtactctcttaaatcttttttatttctgtagaattgttagtaatgcccctacttttatttttgtcttttgtagtttgagtcttctctctctgtctctctctcacttcatctagctaaaggtttgtcaattttgttgatcttttttaagaactgttggattttgttagtattctctattatttttctattctccattctacttatttctactcttatctttattatttcttcccttctggtagatttgggtatggttttttctttctttttttccaagtttcacaatctgtagatttaggttgttggtttgacgtctttcttatctttaaatttaatggtgtatagctataaattgcctcgtttgcactgttttcactgtttcccatacgtttggtatgttttctttcatgttcattcatttttaagtatttttctatttcccttgtgatttctcctttgatccattgtttgttaaagagcatattattggctggatgcagtggctcacacctgtaatctcagcactttgggaggccgaggtgggaggatcacgaggacaggagtttaagactagcctggccaacatagtgaaaccccatctctactaaaaattacaaaatattggccgggcgtggtggctcacgcctgtaatcccagcactttgagaggccgaggcgggtggatcacgaggtcaggagatcgagaccatcctggctaacacggtgaaaccctgtctctactaaaattacaaaaaattagccgggcgtggtggcgggcacctgtagtcccagctaatcgggaggctgaggcaggagaatggcctgaaccctggaggcggaggttgcagtgagccgagatcactccagcctgggtgacagaggaagactccatctcaaaaaaaacaaaaaccaaaaaacaaaatattagccgggcgtggtggtgggcacctgtaatcccagctactcgggaggctgaggcaggagaatcgcttgaacccaggaagcagaggtttcagtgagctgaggtcgtgccattgcactccagcctgggcaacagtgtgagactccattaaaaaaaaaaacaaacaagtatattatttaattactgcaaatttgtgaattttgcagttttacttatgtctatttatttctatttttatcccattgtactcagagaagatactttgtatgacatctactttttcaaatctattgacccttatttagtttatgggcttattcatgttctatcctggaacatgtcccatgtgcacatgagaagaaggtgtattcaattgttgttcaagtcctctatttcctgacttacctattgtttggctgttctatccactgttaaaagttggacgttgaaatctctattattatacaactgtctatttcttccttcaattctggtaatttttggtttatatattttgatgatcttttattaggtgtgtatacatttacaattgttacatattcttgatgtattgagcctcttattaatataatgttcttcatctcttttttgtcttttagccttttttgacttaaaatctattttctctgatattttgctagtctgctttttgtgggttactatttgcatgaaatggtgttttctgtcctttcattttaaactgtttgtgtctttggatataaagtctcttgtagacaacatatatttgggttatgtgttttaatttattctgccaacccgtcttttgaccagagaatttaattcatttacatttaaagtaattattgataagtagagaattacttcttattttcctacagatgctccttaagttgtgatggggttatgtcccactaaaactgtcttaagttgaaataattgtaaatttaaaatgcatttaatatacctaacataccaaacatcatggtttagcctaacctactctaaacatactcagaacacttgcattagcagacagttggaaaaaaatcacctaatataaagcttattttataataaagctttaattatcttatgtattttattgtatgttctactgaaagtgaaagacagaatagatgcttcaagtatcgtgtttaatgaatgtgtatcacttttacaccatcatatggtaaaaaaattgtaagtcaaacccttataaaatttataagattataaaaccatttatatttattttctatatgctttatagtttctttgtcctttatttcctatataattttttttgtgtattcaattgattttttgtagtaaaatatttaaattcctacctgatttcttttgtgtatattctgtagctattttctttatggttacaatgggggttacatttaacatcctaacgttataacactctaatttgaagtcataccagcttgacttagataacatacaaaattctgttcctttttcagttgttgatgtaacaaaattacatctttatacattgtgtacacaacaacataagctaataatttaatacactcatttcttaaattgtagaaaacaaaattgggcttaccaatcaaattacaataatatgagattttaaatttgtaatttaaaaaaatattagtttcttaaatcatgtagaaaacaaaaagtaaagtcacacatcatgattacaatgatgttagctcttataagcgtctgcctatttgccttttctgacatctgtatttctttgtatgatttttgagttactctgtagtatcatttcttctcaacctgcaggcttcctgttagcatttcttgcaggagaaatctaacagtaataaagaactctctcacctctttttttttttttcatgactggcattttgattttctttctcacttttaaaataaaattttgccagatgtaggattcgtggttgataattttttttccttttagcactttgaatatattggccctctgttttctggcatctaaggctgctgctaagaaaactggataattttattgaggatcccttgtatgtgatgagtcacctctcttgcaactttcaaaattctccggttgtctttgtcttttgacagtttaattagaaggtgcctcactatttgtctgtttgagttcatcttacttgtacttttttgagcttcttggatgtttatactcttggctttgatcaaatttgggggagtttttggtgattatttcttcaagtattgtccctgccttttctctctgtctcatacttctgggaattccatgctgcatactttggtatagttgattgtgtcccacaggtctcttaggctcagttcacctgtcttcaatcttttttctttctgattcttagactaattaatttactttgacctctcttcaagttttctgattctttcttttgctgttaaatctgtctttgagttcctctagtgaattttttatttcagttattgtaattttcatttccacaattgcttttttttctttttctgtattgatattcccattttattcatgcattgttttcttaactttctccttgcttcctttagttctttcagcatgtttaagacagtagttttaaagtcttcgtcaggtagatcccccatcaggtcttttttagagacagtttctgttggtttatatttttgttttgaatagaccgtgctatcctgtttctttgtatgtcttttgattttttgttgttgttgaaaattgcatatttgaaactaataatgtagagccctggaaatcagaccttttctcttccccaaggtttactgttaccgtttgtattttgtggggttattgttgccagtctctgtgctaagtattagctttttttgttaacttgtggtcttaagtattttctgagcctgcatgtttccctggttatgtgccatgactttctcatttcctctgttgttttcaaatgccctggttatcaaggtctgtctcccaaaatgagaaaaagtaaaaaataaaggaagaaaaaaaaaaaaaggactggccttttgagtcccatggaagtcacttcagctggagtgagaggggcaacactaatgatagttgcccctttttctttatgtgtgtgattaaaagcagcaattaatgttcagtccacagatccttgatatatggaagacaggtcctttttgcccagcttggatcatgtaagctgtatgcaagctgcttcaagtacatgtgcacagatgcctgccaaggatctaagaggtggggtataggtagttgctattgtgctgagatgtaaactttacctaaattaaccacaacttaccatctaaagcttccctccagaaagtagactcctttaatagactctggacttccaaaataagttgttgatatagatggtggcagtgcaatggttgtctaggtggaaagacagatttgtggtgcctcctgctttgccatattctcagaatccctttcacttccttcgatttttactaagcagaactaacttccttaattcctctgccatgcctgcaactattccttttctcccttctttaccaccccctcctcctttctccctgtctctaaatttaggttcccactcagagttctcactttgaccttccgttttctctcagtagatgtcactactctaataagatcaactttgatctttctttatctaattatttgaactgcttgtgacttggtactgtgttttcctttgacaagttttgtttcatttatccatgagatcttttcatagataacacctgccttttcactttcaatgtatccctaattctactcatcatcttactcaaaggcttacattctgttagacataccattatattttctagtcttgccaactaaatcgtgttcattgatgatatatcttgctttctttgtatatctatcaccaaggcttacaggattatttcaatctctttattttcttgcccatcatcctagttcatatcttctgggttacaacctactcattgccttcattctatctttttcacattccaactgcatatctgtaaccacttagtggtttaaaaaatattattttcttcctctggcttttccacattaaatttctcctcttggtttatttttcagagtactctatgacctacctcatcctatgtagcacactgtatctcccactgtgctttttatacagtccttgctcttttgaagctcatatcgtcattgtcagcttcatatgccaagccaatttttcttgtgtctttctcaatacctgatgaaccctcatatcctcatttttagaagcctaactctactattttactcatacgtgtctgacaactggatcatcttgatctctctcttctctgcatcctcagtcttttgattgagtcatgtgatgtggtggcatgagcccagggtttagggctaagaaaccctgctctgttgcttatcactgcatttcccatctttacatgcaaaaatgaggatattaataacaatttttagaaggttattttgaggactaattaagataatgtagagtatccaacaactgctggttcagagtaaaggctactatgagtcagttaataaatagatttattaatgctgtttgattttttctgccacttaatatatacccttttgtggggtaatgtaatcattgcatgtacattaatcttgccaccaaactttattttataagccagaatcataaaataacatgggagacttgtagaaattatttaaaatcacaaatcgtagagcaccagatttgacatggtcctaacccctctgccctttcttgtgatgaggaaactggagcctaaatttcttaagtgaactgttcatggtgacacagttactaggagagctggtcctaaccacaactagagatttctggactcccaggcctctgctctttccattaccttcttgttcatttattttagcaattgcctgaaggcaggatcacaacccatatttctgtatcacccataacctttattttcatttcattttattttttttgagatggagtcttgctctgttgcccaggctggagtgcagtggcgcgatctcggctcactgcaagctccgcctcccgggttcacgccattctcctgcctcagcctcccgagtagctgggactacaggcgcccaccaccacacctggctaattttttgtatttttagtagagacggggtttcactgtgttagtcaggatggtcttgatctcctggcctcgtgatccacctacctcggcctcccaaagtgctgggattacaggcatgagccaccacgcccggcccataacctttattttattgcgagaagatagaatagctacttgattgatatttgtggcttgattgatctattctttcttcgactgtgcaataggaattctctgggaaaggactatgaagtctgtatacttatcacccttttgatgcttttggggttgttgtaagcatgcaaagggttcattgtgcactgcttctgtatactgactcagggtggtggggagaggaaatgggagaggaagttatatacatcttgagcaaatcaagcttttctatttttagtccttgctactgtttggaaagtacagcctctgttcatggcagtctggcatgtgtttccttagtgccatttcgaaagggggaaaaaataaatatgggaattttttttttttgtagtgaaaatagttactcagtgaaatcacataagtttcccgtttttctcttgatgaaacctcaaacccactaggcacagattcctcaacctcaactatgcatgtgaaaggctcatgcagaacaggagaccagagtcagcaaaaccttgtatagcaagataagctgtggtgccgcagagaagcgcggatgggtggcggaggtggggaaggcagggaagggaatggtgatgttctttcatatttagtggggaacttggccaactaccagatcgttgccccctggaaaaggctgaaacctgaactaagataaagagacacatagctttgcagctttttgcttaagctgttccttttgcttcagtttctgtccttggtaaaagtttccctgactgctttatagctactcccccaattcaaataaataatttttctttaatagttgtgatggcatttgggagatttttccaatctaaggctatatcattaggacacgataaagagccttttatgctagtaaataaaatgatttgatctgtatttagatggattgctataacatagtggtactcaagtgatcagaaatggtgatgacagagtgtcttggagtcaccttcaggggtccattgaggcagacaaggaccttaaccaaggtggtggccatgaccatggagaaggggaacaagaatcaaaagcaatttggaaagagggggcttatgggaaagagaagagtccaggatgcttggcaggattgtgactttcttcagggagaatacatatccttcctgtcctagtatgtggcaaatggaagaatcctttggaaaaaaatgaggactttgaagcaggtgtgatgtgaatgttactagaggaaatgttgataccaatgagcaaatattgccctttgttaatgaaagggactatacagtctccagacataaacagctctgcctagacaaaattgtagcagtagggtgagaataatgcattgctataattaatgctaatttgtggatattgctgtattgttgtcattgttttttaattgaatatgtattaagctccaacagggtgctatgaataatgccaacttatagttgatttatgagaacactcagaagactttattaacaccagtaaatggaaactcgcactccttcgaggtggtaaacgtctttgccatttcgacagatgaggagaagtgaagtagattgtgttttctctgttggcactgcgggtgagaacacagaaactgtcgaatgagagaaaagtattttccttgtcccctggaattgggttagaatacattagtaaagaattctttaatgtgttcagagttgtgggattttaattaaattgttccagttattgttagcacttggattagcaactggcaaccaaattctaggccagcagatttcaaatttagcatggacaagaattggggtgaggccgatgggtttgttaaatgccaattattaggccctgccttcaaaggtttagatttggtaaatctaggagggggcttaggaaaatcttatgttcatggatatcgaaggtgcttctgtcctcaaaggttgctagcttcctttcaaaactccagtattttcttattttaggacgtatctttggccaccaaaatctagcttcacctgagaccaagggctttttatttaatagctgcaaattctcttataacacaccaagtataatcctgtaatcctcttttatacacaacataccaccagaaaacatgtgcagaagacttaccgtatgcttagcattctagtggacacatgatttctactaccttatttcacctggtctccaaaatatccctgtggggttggtattattgctcccttatttcataagaagacactaaaactaagagtatacgacttggtcaaacatcacatccagtttaatcctttctatcttaacctggttaggcatatattttactttaagtttgaacaacaggtgggattctttttggcactgacagagtttgcagttgacagtagagactgtaaactcggcttaagtggacccgtcccataaagaaaaacattcacattggaacaagggagaggtgaaaaggaaagttggaagtgagtaattcaacttttcatttttttttgtccccttccttccttccttccttccttccttccttccttccttccttccttccttccttccttcctctctctctctcttttctttttttttttttgagtctcactctgtcgcccaggctggagtgcaatggcatgatctcggctcactgcaaactccgcctcctgggttcaagcgattctcctgtttcagcttcccaagtagctgggattacagttgtgtgccaccatgcctggctaattttttttttgttgttttttttttttttttttgcatctttagtagagatggggtttcaccatgttggccaggctggtctcaaacttctgaccttgtgatccgcctgccttggcctcccaaagtgctgggattagaggcgtgagccactgcaccgggcctgtctcatttctttaatacgaggtactaaactgtcactgagtaaatagtagacatttgattattatttgactctgaatattttttgaaaaaaggaacatttcataagaaagcctgaaatgagacatgagcagaattctggggtatagaaatgatttttaagttgagacaagaatagtgaagcttgagacgacattattccttgcctcctttagactttcttcagcctccacctagcaaagtaaaagtcttgtcatagcagtctgttgcattgtattccctgggtctaaggcagaaatgtgtacgtgctccaataacccttgtttgttgtgctgtggaatcacgttcatttctgattaaggtgaaatcagtagctttctgatacggtctctcactcactttttatcaatggcaacctttttcctaaaaataggaatttctgctgggagtgttttaatataaattgtctgtgctcagcctgaaatatgtgtgattcataccatgtgtttgttcccacatcaacactaagtcccaagatacaattacccctgcccactctctccttcgtcatggggaatgtgtttatcctttagatatcagcaccttgggtaagagccaatctccttatatgccttggtttgcacacctgcattgtctgaccacagctgaccctttgagtctgctcttactctatttttaccttaaagaacactcgtgtttgccaagtacacttgcacattgcagagttccttctatatctttatgctcatgttgtaaatatgttaaatacttgttctccatttaaggccttctcaattctgtcgccatatagctctctctgatttctctattcagctactttctctctttcctctctctcattttgcttttttctcgaacatcttgtgtgtcttacctacatgtagtctgccttctaatatggacatttgtggataaactagtttcttcaatgcaactgtaagctcttggcagagaacccctgatccattctctttccctccctccccttccttctccctctccctcctttcctttctttcttccctccctgcccccctccctccctccctccttcctccttccttcctacctgcttccctcctttcttcctacctgcctccctccctccctccttcctttctacctgactctctccctccctccttccctcccttcctcccttccttcctcccttcctccctccctcactcccttccctcccttccctcctttctttccctcccttcccttccttccttgccttcctgccttactcccttccctttcttcctccctcccttccttgcccctcttgcctgcacctcatatcaccgcgacctgactattcgccaaccaccttacacgaaagtccccgacacctatccttaccgccgaaccccctggcacaaagggcgtgccccctcggcttttccgctgaggtttaagccccgcccagttcccgcagcctcacagggcccctacccctctccatgacgataaaaggtacgaccccttcccctttccgccattcctttcccagcctcctcccccgctccccctttcgtaatacccgctccctttcgaagatcaatcccaccctgcccttctcccccccccccataatgacccgtttgattccggccgccccgcaatccctcctcgtcccgcgcccacacacactctatacctcagcaacccgctacgacccccccaccaaacacacgtcctccccgcgatcttcgcctccgccccccccgttggggccggcccggccgcgacggccccaccccaccccccccccgtcacatccccnnnnnnnnnnnnnnnnnnnnttggtaatctaataggcccatataatctctgcttggtgttagaagggaagacctttcaccttttgtgttttcttcctaatgtcatgcaaagtgctagagctttggagcaaaacgtttgatttccaaattccaattcttccgtttactgcccgagtaaccctagaaagttctctttttctctctgatccttgggctatcctcttttgaaaacaggaataataacatctactaatctctaggattgctggaatagctcgatgagatcgtatatatgaaaatgcttttctaaacctgagcacttctctgtgataatggccgtacagagggagctatgatattttccctcttgttttcccagtagtgactatgtcccaggctgtgtgcagtggactgggtagctgcctagtaatattgctggcttgtaggatatttcctgttttatatgttcttaagaagatcagttgaaatgtacgagatgtcgttttggaaaagatgtttcacagtgggaggtgttaaagttttagtcctacttcagccccttcactatacaaactaccttacctttttgggggaattgtattatctttaaatgaaaatgatggaatagcgacgtaaattccccttctagttctaatattttatgagccttatttccattttctatgcttatcaactataaatgattctcttgcagttgttcaaacatcttttatctgcacatcctcatcaatggtatttaacatatagaatcagaaccacaaatgtttgaagaaaattctcggccagacatggtggctcacacctgtaatcccagcactttgggaggcctaggcgggtggatcgcctgaggtcaggagttcgagaccggcctggctaacatgatgaaaccccatctaaaaatacaaaattagccaggcgtgttggcacgcacttgtaatcctagctactcgggaggcttaggcaggagaattgcttgaacctgggagacggaggtggttcaatgagccaaggttgcagtgagtgccattgcgctctagtctgggcaacaagagcaaaacccggtctataaataaataaataaataaataaataaataaataaataaagttcccaccctctgtacgtttccatggcatgacgctttgctttatatctctgagtacatgatatggaatatgggacatgggaattgaatacttttttatggtttccaattttggtaacatttaaggggtcaaacaagagttcaagaaaaaaaatacttgaaaatgatgagctaatgtataaagttaacatcacatttctaactatttgaattttggggaatgtgagaaagtggcttttgaaatgtatcatgcctgagcttattaagcctgtgttaccaaaatgaaaaataagaaacatgtcttccttgaggttttaaaaaacaaaatcaatagcaaaattacctgacaagttctgtttgattcataaatccacacaattgttgcacatctccagccccctcaccacatatgaaagttttcttaatgtaaaagtaaaccttttctcccctacctctaaaaacttctgtctaccaattttattatttcatgttattttgttatgcaaaggattcctggaaaaatatccatgatcctagatgatcttatggatatctttataggtatttcaatgtagaaatttcaaataaatgtatttcccttttatgcacaaacacagagttcagaaaagacagttcatttagagtttgctaaactgtgtgtgtggactaactggtaaggtgacgctctaggatggcacagcttgcctagataatctgtagcagtggtttttaaactattaatttcttagaattgcttcaggaaatattactaaaggagatgggggataaagcagctctgtctgtatatgtttcatacaatgggtttccgtgtctgatttcattttaccaggggatctgctgcttaaaaagggggtgccaaatatctattttactgtcaaatagttcatcttattgtgattattcttagagttcctgttttattgatgaatagataatatatgtattgttccttattattatctatgcaaattgacctttattttaattgtaaggggttactttaaaaatatattatttatattatttttattttataaggattggaattcagtagaaatcattcaacgagtaggtaaatattgtgaaaagtgaggggtttttgttgcatatttagttttgctttcttatttgaatagaacagtgaacagtgaggctacttgtgtatacccaagttcagatcactttaaccatgaccctgcccttacttataaaagagttggcttaaactcggagttggcctaactcttacgggtttagtctgatggcttttgaacagcaaagatagtgacaggcaagttgtgaaatgtcattatagatctatgcagtattagaggttaaaaaaatagaaaacgacctggaaggtgcataccctcatttttgtagaggtaaaagttgagttccagaaagtcaaagaaactgcttgataatatcagcgggacttggtcttgtttaggctgcttcagtagggctgattgtgtgaaacagaggccccctggagtagcgctgaatcatggagtttatcttaaggatggatctgaatgagatctgatatcaggaagctcagggtcagggcagatctgtggctgaactcttccatctatttttcttctcattgttttttttccctctctcccttcctcttttcctctcctctccattcctctgcttctctagtgttcgcttgttcattgttttcctccacccaatgatagacttcctacctcctgttgtatgtttggattgttaataattaaccatgtacatcatctttttggttgatcacagccatagctcatccctgtggcaattttttattttttattttatttttttttttattttttgagtttcactcttgttgcccaggctggagtgcagtggtaagatcttggctcactgcaacctctacctcccgggtgggttcaagtaatttttctgcctccagcctcccaagtagctgggattacggttacccaccaccacgcccagctaaattttgtatttttagtagagatggcgtttcgccatgttggccaggctggtcttgaactcctgacctcaggtgatcctcccgcctcagcctcccaaggttttgggattacatgcatgagccaccgtgcctggcggcagttttgttacatgtttttcagtccaaacgcataagagaaggagatttatttgcccatctaatctccttgtcactgtccaaaagttaggttcaccagcctatttatggacccttggttctgtgggcctcagtgttctgaaatggagtcgcatggttgaaaacatggctgttttggcaacaaagaatgggggcaggaccatttcctttaaaggagatttgggttggccaaacattgctaacactgggtgagtgtgttagggctgaaaaggatgaaataatgtaaattgtgaggaaaaaaaattcaagcatttatcaagcgtagcatttatgttctatgttgacgtttgatacggcttggatgttttttccctccaaatcatgtcagaatgtgatctccagtgtttgaagtggggcctaatgggagatactcgatcacagaggtgaatctcttatgggggtttagtgccatccccttggtaatgagtgagttcttcctctgggttcacacgagatctggttgtttagagagtgtggtacctctccccaagccttgttcctcctctcgccatatgacatggtagctccctgttgccttcattcatgattataagcttcctgacgctctcatcagaaactgactggatattgacaccatgcttcttatatagcctgcatagtcatgagccaatttaacctcttttctttataaattacccagcctcagctattgttctatagtgatgcaaaaatggcctaatgtaacgtttttgtgctttatcatgaaaaactcttgtcttctgttgttaccttatttcttgtttatttaatgctgtgttctcagttgtcaagccagtattgcacttcagattatggaaatgtattcccccttatgaatgctctagtgtttgctcccaagacagcttttgcgacaacttttcccactgcctttaacatgtggagaagatgtccttctcggatattaataagacttgagtttaggcctggttttgcatattagaaaagttgaattgtatttctgttggccattagataagaaggattttagggaaggggactgtttttgtttttaaatttgtgtctcttccacatagttttacaaagagtatcaaataacatagtgaatttgatatctctaggcaaaagtgcaagtgatatttttcagtagaatacatatatatataaactcctcaaggttgggtatcatggcttttttacactgcatactacttagcataaactattttctagagcagcatgggagaaaagccatccactcaaatccatcatgagagttaccctatgaacattggtgtcatggaaaattagacaaagaggagtcagttatcaagttagtgggttatttgtaagtcctcctcccctggagaagggtacatttggggagatagataggtaaggtttttggaaagctaaacacttcaactgaatgactgggaaagaggatacacatcccaataggaatgcattcattttttccctaacttacaacagtttgtatctcattccataaaatgacatttctattagataaaatagatcatattttctgcaattctcactactgaatacggcctgtgtccactgaacattaccaggatccgtttggtgaggctgctcatattactatacagcatgagagattatattaaatagaaatgttactgtcttcatttttatttttatccaaatacctcttagctattatttggtgtgtcaattggtattttcatggcatcattaaccatatatatgacataatataggttgtttttaagggaaataaactataaattcactcagtacccacccttactccccctgccccacacacttaaatgttcattgtgttagaaatccacttagaaaagtcattctcaaagtgagaacacctcactttgagaatgactcagaccagcaccatcactggggatgttgagaacatccccataccagcgccatcactagcacctacgaacttggtagaaatgtaagttcttgggcctcacccaagatgtacagataagaaactgtggcaggtacagcctggtaatctaaggtttaataagtcctcctggtggttctgtataggctaatgtttgaaaaacactgatctaggattgtgttctttatggttaattcctggcacccttacacatgttcagatgcatagaagccccatctactgaagcctctcagtaacttagttttacttttgatcaaagtactttataaagtcacatactcaattgcctgactattaacagaagcatttattttgagactattgtcaaagtaacaattaaatagctagcatttattgaatgcttattatgtgaatattacttgacatgcataaacctatttaatttttacaactgcatgagggacccgagagctcaggtgaattgttgaaggtcacaaagccagcaattgggagatacaggtattacagcctgactccaaagctttcaccagtattcttttttattagggatactttgaggaaattacttaatacaaatgattatagacaaataaatattgattgtttccccaatttcatcaaagacagatgatggaaaaaagattgatctaacttacaacaaaatgattacactttcaagagaaactagatagaaatagtttggatatctgtcccctccaaatctcatgttgaaatttaatccccaatatttagatgtggcctagtgggaggtatttaggtccctcatgaatggcttggtgcctgtatgagtctgttttcacactactaataaagacatccccgaatctgggaagaaaaagaggtttaattggacttatagttccacatggctggggaggcctcagaatcatggtaggaggtgaagggcacttcttacatggcggtggtaagagaaaatgagggtgatgcaaagcagaaacccctgataaaaccatcagatctcgtgaaactttttcactaccatgagaacagtatggaggaaactgcccccaagattcaaattatctcccccttgttccttcccataacacggggagttatgggagtacaatttaagatgagatttggatagggacacagagcaaaactgtatcagtgacctccccatggtactggtcatacagagtgaattctctgttagttcataggacagctgattgtttaaaagagtatagcacctctcctcgctctctcttccgctctctctcaccatatgacatgctgcctcccattaccttcctccatgagtaaacgctttctgaggccctcaccagaagcagatggcagctccatgcttcctgtacagcctgcggaaccatgagccaaataaacctcttctctttataaattacccagcttcaagttttgcattatagcaatgcaaaacagactaacaaacatagtgtgttttgttacttaaaaagcacacactttcaaaattcctttagttatcaccattttcccccactgatattagaaagaagagagtaataaacattactgaccataatagaaaaaaaatacagtgaaattcctgttgtattattaaatttaaatgaaactaccattgaaaagaaaagttgtatgtaaacacaatgtaatttttgtattattagcctcttaggttttactaaattaagacagttttatattcctaagttatcagggaaagcttttctaattaatcacaaaaggaagctcaagcttgggtagggtctgggaacctctttgttttccatatgggatcagtggtaagacattccttgagctctgtgaagcacaattgaaaaaaataggattatgtggttactttctcaggtctgtaattgagcagtcacattcaaattccggctttttgaactcacaatctataatgtgtcagtatggttgtctacctcagagattctgaaggttgttgaagattagttcatggtcatgtatgttttgagtatgacgctgggcattggatctaattctagtatataaacatccaagggtggagactgtttcttaattaaatagaccattccccttggccttttgtttcctttaatatcctggataagattttcctatgtaacagtttttacttgatgattaagtttctgatttttttttcatagcacaggacttttcagttagtcctgctcccctaccttgaaaccgaaatgaatactgaacaaataaatcgttaacgtattaggcaagatatgtttattttcatcccgtttcacaatcattaaggccatagttagttcaggcaaagatcatctatggacactaaaaccactgggtgggtgaaaggtttttgactagtagaatactcacagtgccccaaaatatcacctcacagattatttttaatttaaaaatcatgcagtcatgcttaaaatggtgaaatctggtacacactaccttaatcgagtcatcaaactcagcatcaccaagcatgggccaaactgacccttgagcttcctgatgggatgcagcagaagggatgtggcctcacgcatgtgatattcctgcctgacttatttaatctgaatccagtcatcaagaaaaaccagattggttggactttttataagacacctgaccagaattattttaaaagttggctttataaaaatcaaaaatcagctaggagcctgttctaaattaaaagagaataaaaagacatatcattttatgatgtgatccttggatttggggtgaaaattaacagtagataaaagaacactactggcaccactagtgaaatgtgagtatgggtgatattagataatactgtttctatgttaaatttctccagtgtgagaatggttttgaaaaaattagaaattcttaggagatgcaaactgaggtgcatatgggggatgtcggggggtggttttgcaacatcttacagatggttcaattgcaacagcaaatctaatttatgtagacagaaagctagtgtgatgaaatggtggccactgatgaatctgggtgaaggatgggtgagtggagtttattttaatagttgttcaacttctctgtgaatttaaattttttggatataaagaatgaaaaagtaaataaatacaaatgaatgctctttcataaccaattgctggtactcctcgtctatcacctgtagttagtgggttagtgatagttggcctgaaatatgacccattcaaaatcagactcttgataatggcctaagttcatttcattcacacgctgtacattttggttctgggctatttattggactgtctttatgtacttacagtgggggagtcatcatcctataattctgctggcagcacttattatgatttgtcaagtcataataagtcccaactgtggtttggtgagctttttatcacatatgtattcagataatgcataaaaataaatataaaaataacatgttcgaatggtttattcataggatttttgtggtccttggtaaagggacgctgtcagtagacacctttggtgccccacctcgcatcttcccctcccaccttcgtgtaccagcagctgctacagcgatcagctctgcacaggtgtgacctggtagcacttggcttcaactgcaacacctttcactcactttctgtgccgggccttctctgcaaccatttaacttctgagacttgtgagacttattcacaaccaggagaacagtataggggaaaatgcccccgtgattcaattatctcccacacggtcctgcccacaacacatggggattatgagaactacaattcaagatgaaatttgggtggagactcagccaaaccatatctccttccttctctgcttaactccttctagtccctcagtactgtttctcagaattgattcccaaaataaatggccaacatgcgagcttttctcacaggcattgtttttcttggcagaacacagactaagacgatgtaatctttgaaatctctctagtgatggttaaagagtgtggggattgttataattacattaactactttataaaagtttgtggtggtaactagaaaaagcattagtcaggagaatcttccttgttgctggcattgggaaggtcatttaccagtcaggtaactagcacagctacaaagatagggagttaggagaaagacatgttggtaagtctataggattctgttgcttggttataggactttggatcctggtatctactataagggattgagagtagcaagatcccctaaatcgaaaggtaaatgaatatctacagattcgtggcaggacttgggcaggacaacagttatttgaactgagatataaaattgagactcaagagtgaaaaaaaggcctattctaattcataatggaattgaaatgtaggagtaaagctactatagtatttgcacaatcttctcccctctcaccccacgctcccctgttatccagtttttgtgcaaaatcacacagcattagactggaacttgtgataaattgcatcaacctaatttgagaaactgaaaatagggagcagtctgaacttagagggtagggagaataaggaccctggaaactaattgatgtcttacaagcacagactggttgcatatcataattacttgttttattgtgtagttcagggtaattctgtgacttgttgagtctcagtggttagatattgcagtgacttcaggcatagtcagttgatgtactttctgcttcagtaaagtacagatgtagaagacctgattaaatcctgtctctttactaataccccaagggaacacttaatgaatgatgcttccctcaagaagaagaataattaacaatagctatattattcatattaatttatagttactggttgctataattaatgctatttaggaaaatcatcataattatagcactttacaacttacagagtattttcccatccattttcttatctaaatcttataacatcaccctggcttagatagaacatgtgatattctcttcattttatagatgagaaaactatggcccagggaaagatttaagcagacaacactctaccacccttgccaatatattggactatctaagagtatgtggaaatacacttaccaaatttatgtctactataatattttatatctgcgcacaagaggatcaactttactcagtttttagttgcattccaaaacaataatgtcctgtctttccttgtaccaggacccccattacccagaatgttcacatgaattttaaatgttaaatggaatttttcttaataataccacagtgtttcatagttattactgccctttgatataaacatgaaatctcctctgatagagggattagcaccttgaaaacatctgtttccagtatacagacctgctggccttaaacagtttaatcagactggaaattcagactcagaaaagtctaaatttcaaccaacctgtcatgtcactctttttctatttttggctatgacaagagagttgaagaaaatctatcaatttcacaaggctagccttcaaatctgggccgtccagcttgatgatacacacatagttaccagtgtgagcgtgtgtgtgcacacacagatggacactgaacctctttggttccgtttttatatcaaattctagagtatccactgcttattgttgtacttctaactgtgtttacccaaaagatagtgctatgagaaaggttactgcctgtgtcacagtctgtcattattcactgatttatttattcaaaaatacttactgaacacttatttgggctaggtcttgaaagagagtccaaggaaacaggaacaaaacagacaaagcttctcatgaagcttatatgttctaggggagagactgaaaataaacagaaaaatacacatggtggcagatattatttaaaaatggatttaaaagggtaggggaataacatgacgtgatgtagaggggtcataataatacatccagaaggagaaaatcataaggtggctgttttagataatgtgataatatgaaatatatatatatatatatatatatatatatatatatgtgtatgtgtgtgtgtatgtgtgtgtacgtgtgtgtatgtgtgtatatatatatgtttgagacatatatatgtgtgtgtgtgtatatatacatatatgtatgtatgtttgagacagagtctcgctctgtcatgtaggctggagtgcagtggtacgatcttggctcactgcaacctccgcctctagggctcaagctattctcctgcctcagcctcccaagtatctgggattacaggggcctgccaccacacccagctaatttttgtatttttagtggagacgggtttcaccatgttggccaggctggtcttgaactcctggcctcagataatccacccgccttggcctcgaaacctgctgagattacaggcatgagccaccgcgcccgtcctgaaatccatgtttaaagagggctcacaaacaaggaagccaactgcctcttgaagtaggtttggctccaaggacctgggccacaacttcatagacagttgatgttactgtgcttgagagagatcaggcccaggaaggattaactcaagctgactaagttcccaaaagaatgaccaaaacaccagatccctttatgtttcttttacacagatagttaaataagctccaagactcaggtaaggtggtttggtgagtaagctactagggcatacggaactagtggtcttcacaggccattaccctttacgcttgcttcaacatattcactaaaacgacagattgacttcaagggttataagatttagtgctagcctgtcatggcacgctacttgttgttgttactgaagatattctagtttcttggttggttaatgctttttctaaactcttttgcagacactagatactctcttgatattttacgtccttagacaagtccagtagaattgattagattattgtaactttccactattgtattgccattgagtcttgctgaagatacactttggtctcttaatgaagttttaagagcttcttccatattcatatatgatcattattaaattgtcactttaaaaggttatttttttacttcaccctgcctccaaatactagggtcatctcactttataatccagacagattctttgcttctttttcccaaacctgatcataattcctggaaacaccctgtgtcgatgttgttgtcctctactctcctgttgattctgactgcaggtaatacgaggttctgacataggaaatccggagatcctgacttcattgtccatgctcactgccacatgcttcccctgcagccccttggcagaaccctaagaggtctctttccagttcatgttctaggtgcatctcttgggtcttgccatctctcgcacacatgcatacctaataccccctggacctgagacttccaagcactggcatgctccaatgtcttcaagtgctgattcctctttctggaatgtccgtgttccttccctgctccttgctactccaataaatattattctaggcagtggtgtctaaacaccaagtgcttgtgagctctcttcagctggttctgttctttaggtgcaggaatggagacatttattttcctttacttgtatacttattttaaacaacaacaacgacaaaactgctaaataagtgtgtgacctgagaaaaatcatcttttatttttcagttttcatatctgtcataaagtgataattctatctcagcctacctcactgagattttatgaaagcttaattaaaaaaaaaagaggtgcagaaaaacttggacaaagccacattataacttgagaaatttgaacttataatgatatcaagggaaatttcctttgttaacatgtctgtgttgcttccaacaggggaatcccggaggcaagacacttgaggagaggcgctccagcctggacgctgagattgactccttgaccagcatcttggctgaccttgagtgcagctccccctataagcctcggcctccacaggttagtgcagcccacaatcatctccacacagccattcccagatattctactcttatcagaaagaacatgctgcacctgagagcttatttccccttccttccttccgtccgtccttccttccttccttccttccttacttccttccttccttccttccttcctctctctctcttctttctttctctttttttttttttttgatggagtcttgctctgttgcccaggccggagtgcaatggcacaatcttgtctcactgcaacctccgcctcccgggttcaagcaattctcctgcatcagcctcctgagtagctgggattacaggcgcctgccaccacacctggctaatttttgtatttttagtagagaccgggtttcaccatgttggtcaggctggtctcgaactcctgacctcatgatctgcctgcctcagcctcccaaagtgctgggattacaggcctgagccaccatgcccggcccttttattctttcttgatcttcttagagtcaatgatttaagttgcctttttatttaatatcaacatgtattagtcaactggcagaaatttcttaaattgactctttgagtactttctttaaaaataacacaacatcatacaaaaatgttatataaaaaagtaaatctcttattccattgccttgctcttcttacagctttgtctatatggatattttgttacatgttgttatagttttcacaaatatgacttagcttggctatgtaaggttaaggtgaagggctgtgtcttttgcaaggaaattagttttgttggatattaaggtgattttcattatttttgtcatggttttaaataatgctacaggggacatatttgtgtatattttctttggggttatttcctggcctcagatttctaggagtggggttgctacattgatgaatgagaccactttatttacttttctttcctaaggttgtgaatagttgatactggtaccaccagttagtttgaatatatcagtttctcctcaagttcactagaatgtgatggttgcaattaatctgtgttttgtaagtgcaaatggtgccttgttagtttttctttgctttttaatttttttatttttgcctactttggagcttggctatttttcagcatcttcacttaatatctgcattccagaagctgatcttccactgctagtgatcattccctgcctctctaaagtcttgaaagggttgtggcaaatctgtttcagggcttccaattcctcagaagacagccatcagaattgtagttgcaaacgctagagaagcagtattgtcactgtgctgtttgactcttgcgtgacatttgtttgactaagtgagagtgcatagagcctctgagcctcactccagttcttgagtggcagcttctgtatttacagtggttcctttcttaaattaagaaccagtcttgtttctctgctgtcagttatttcaatacttaactgctcataaggtggcagcactttcttcttcttcttttttttttcttttatgagatggagtctctctctgttgccaaggctggaatgcagtggcgcaatctcagctcactgaaacctccacctcctgagttcaagcaattctgcctcagcctcccgagtagctgggattccaggtgcctgccaccacgcccagctaatttttgtattttagtagagatggagtttcaccatgttggccaggcttgtctggaactcctgacctcaagcgatctgcccgccttggcctcccaaagtactgggattacaggtgtgagccactgtgcgtagctgctgtcttctttagatacattccctgtaccttttcttaacatataatggaattgttagccatgtgggattcatggcaaaatatactaccacttagctcttcctcactgaccctgctcttggctctatccatcctgtgagcagtaaaaatatactttgtccctgtaaatgtgtactgaactcatctgtagaaggcactgtggtcttttgggggaaccgatgaggcaaaaaaagtggatagttgagaggaagagaaataggactccgttgtaatcttctaatagcctgtaatgttatatgtgaggatatggcctatactgcaggagcacaaagaagatagtgatatattcttctgaaggtgacacagtctgataattcttatcaaaagacttgcattttcatctggaggggtgagtggaattgtatcgttcgagacagcagcagggagtagcctgagccacagggctgcaagcaagcaccaaggctgcatttagagatctgtaagcaaccagatggctgcagatgaagcctttgaaggcttgtagtagaatataggtctgggaccagcctggccaacatggtgaaaccccatctctactaaaaatacaaaaaatagctgtgcgtggtggcgcccgcctgtaatcccagctattcgggaagctgaggcaggagaatcgtttgaacccgggaggcggaggtttcagtgagccaggatcacgccactgtgctccagcctggggacagagggagactcccattctgaaaaaaaaaaaaaaaaaaaagagagaatataagtctggtagtttcctacagacagcgtgtagacacgtttaaatgccagattatgattttaatctgtcttttgtagataatgggattatttgaaggttctcaatcagggaaatctaaaattcattctgaaaaaggaacataggaaataagaccaactctagaatgatgcaggaaatgagcccaggtcagaaaaatgttctccagcaagccactcttcatactttctgaccattgcttgatgttcagcaattttttttgattccacccaagcaaatgccccaaatctcatctcatatctgaagacaggaaggccactgactttgccactggactcagcagtatcatgcccaaatgcttttttgtgctccctttccttttttttttttgtaatgggttttcactctgtcacccaggctggagtgcagtggtgggatctcggctcactgcaacctccgcctcctgggttcaagccattctcctgcctcagcctcccaaatttagggaggatagcaacagtgtttctggctgcagtaaatttggggtaatgactttagcttacatctactttataaaaaatcctccatgacactgcatggatttatgcaattgaactaccttaatatttgaaactaaaatttctaaacattttaaaagtgtttgtcagggagtagttttagaataacagatgagaaaagttcagacatattcctgtagtgaattgcagataaaatgtgagcatagagtatcagagctttagtgggccttccaggtcatttagccaaacttacaggtgtgtgccaccatgcccagctaattttttgtatttttagtagagatggggtttcactatgttggcaaggatggtctcaatctcctgacctcgtgactgacccacttcggccttccaaagtgctggggttacaggcatgagccaccgtgccctgcccctccccgccccccagctttttttttaaacggagctttcatttaaatcttttttttcctcccctaaatccttataacctaatagacactgaggagatcatgctttgaggtctattgtttaatacaacctttattcttgaaggctgtgtctatacatgcctctcataaaccattgcattttaataggtttattctgcagctacgttttgtttgaggaatctttctgagcacacaaattcatcatcactgatatttggacagtactgattgtgaagcactttcacatatattctcacttgagtgagatatagatatctcagttctgagatgtgcgtgatgtgctcctttcagggatgatgaaactaagactcaccaagaagattaatggtttctccttggccatatgtttgagcaccgcgtgagcacaactggactttgaattttggcttgtgcttgattttaagttctaaacaccagattgagggtgtcaggttttgtctttgtttttgtaatgattttaccatcgatgaaagctggcatcagtcatctgagtgacactgtcccttgaatgttgctttcccataaaaagaaaaacattcagaaggtcaaaaaaaattaattgtaatagccattaagtagaataagttcatgattatggtaaaatacactttcgatgtgcctgttccattcagaaattaaaggatgatccattctaatttttttctattactatgatttaacaaagcaagagttaattgggagatatatctcatccttttgaattatcttccctctggtggaactgaattagatgtgttaatatttattggttaacataattataggctgtgagaacaataatcacacacttaaaatattaaaagtatgtgccaagagaagatgatgtctatagtagacggtgttgtgttataattgaaaggtacttgaaaagtcctagaaatgtagaccgttaatgcccaacattgatgtttctatttttgttcaaagcaaatttcaaaacctatagaatcacctgactacttaaaataggctagtaggtctgtgatttctcattagtcaaacatgtgttgtaagcttttttgaatccatgtctctatcatctttggaaggctgctttgactcatggtctaggaaaaatgatatatatgtggaatgtttatatggtaagaggttccaaggagctccattctcaaaacaagtctgaaaaatgtgagctcttgaaaataggttttgctaaagcattttcttccttttattctagggagtattttccgctcccaaattttctgactttagttatgttcacttactaatccctatattgattttggaaatttggcttaattccacatattcattgattcattgattcattcacctaacatttgatgagatcctcctctggatcagtcattggagatttaaaggttagtatcaacaggtctttcctttagagtgatatttaatcttacagaagagataagcccgtaagtaacccaaagggacacaggagaagggcttcaatgtgctacttaaattgtcacgtaaatcaccacgtgtcaaaattattgggagataaaatacaggaataccaacattgtaccttatacctttcagtgtcagagaggactgcgtagagcaggcagtatttgagctaacttggcttaaagtgttacgggaagggcatgggattcaaggtgcaagaataacaagagtgagaaagtcaaggaacgtggaaagtgaatattatttgaagaataagtttgtctaatggggtatgtaaagtgtaaatgggattactgctgaaaaactcaaacttacttagcagtacctaagtagcccttttgatgcccaagggctttcattgttagaaagagaaatttacagggggatagcaacagtgttactggctgcagtgattttggagtaatgactttagcttacagctactttataaaaaaatcctccatgacgctgcatggatttatgcaattaaattacattagtgtttgaaaccaaaatttctaaacattttaaatgtgtttgtcagggagtagttttagaagaacagatgtgaaaagttcagaggtgatcctggagtgaattgcagacaaaatgtgatcatagaatatcagagctttagtgggccttccagctcacttagccaaactcttattctacagatggaaagcttttgcccagagagggaaagaacacactcaaggaggctcatttagagacagtttcagtgattctttgtattttccccgaactatgacacaaaggcccagcttgatgataaccacgaccaggggagagtttggtttcctttagtatcacaattggtttattccaaaaagtctttcttttatggcgtcttctttaaaataagtctcaaacacataacaaagaattaggcatatcaaagacgtacttcaatggtaaacagaaaacttatgacgttgtaacatctttaagctagtatatatctaaacccaacccattaggtaggcatgatttgttagtataagtacagcttagcctctagaagctatgcaggggttggaacgaaattctgtctatttcttagaagacaagagatcaatcatgaactaatgacttttgtgttccttcttttatcagagttagggtacagtattcatcttctagtttctagtacagggctgtctttttttccccaagtaagtttggtaggattggagctgatgactgagtgacttggaacacttttcaaataaactgtcttacgttaatatttcatggtagctggagatttagtaatttgtgaatcaagttgcttttgaattgattaaatgggctttcactatcctcatttagactagtgtgatactgtgaaataataagaaataatatataaatatatttttctactccagtttctgaatcagtgtttgtaaatccttataatttcctaggtgataggggtgctggtagcatcttttgttctaacattattttgttattgaccttggttcctgactcagagctactgaattctgtggaatttcctgagtgatggaaatatctattgttttgatgaggcaactcttggtgggctcctggattttggctggttaccagaatgaccaagcaatgatttgaagcttggaagtttaatcttcacctctcatcctctggggatgagaaaggggctagagattgaatgaataacaaatcatgcctatgttttgaatgttttgaagtctgtataaaaatccctgaagtacagagaggtttcagattgttaagcacatctttatgccaggagggtggcataccccaactctatggtaacagaagctcctatacccaggacccttttggatctagccctgtgcacttcatcatctgcctgtccatctttatcctttatcgtatcctctataataaactagtaaatgtaagtaagcatttccctgagtttcatgagtaattctagcatattatcaaacttgggaaggggataatggcaaaccccaatttgtagtcaaatcagacagaagtctgggtaactggtgaccacccctactctgccccaccaccgcagcttgtgattgacatatgaagtggaaacagtcttgtgggacttgaacccttaacctgtgggatctgtaatagtaactccaggtagattgtgtcagaactgaattgagtcataaaacacccatctgataccatagaatcagttgatgtatgaaaaaaaccctcacatttagtgccagaagtaaagtgttctgtccaggcatggtatctcacacctggaatcccagcactttgggaggctgaggcaggttgattgcttgaggtcaggagtttgagaccagcctggtaaacatggcgaaaccccagctctactaaaaacaaacaaacaaacaaacaaacaaaacttagctgggggtggtggcatgcacctgtagtcccagcaactcgagaggctgaggcaggagaattgcttgaacctaggagacagaggttgcagtgagccgagattgtgccactgcactccagcctgggcaacagagcaaaactctgtctcaatcaatcaatcaatcaatcaatcaatagaagtgaagtgttctgtgagtagcatagaggaaagaggtgagtttttcttcttcaactaatatgaaaaatttggagatattttgaaaataagaatagggtggggcatagtttgatagcctcgtctccaagtttgccaacgggaagagcattggcttcttgattccctgaggtcccctctctgaaaggagctccatttatgtgaacctgtccacgttaccagtttgtgcttccttttggttatttcaaaaatgggcagggtaactacactccattcccccttttcaaaagatagaatagtattctcaagctacaagaaataagatgatggctcaaagcaacagctcacacagtcattcccatttcattttgggattgttagcttgtgtctggagtttgttttaaaacttcaggcctttgaaggttgggggctggtcctttctgaatgctgttcatcctataaacgatatatttaattcctcactttaaaaactattctaacttcttagtctatttggaaactgagtactgaaatgctgtgtggtcatatggacacatcgttagctgcagtcccagcactcccacactgggttcctttcatagagcaataatgtatgaggcaacctgagaaattatttcaggtatatgtgtgttgtatttagagctttttataagaattcatgtggtctgagggcttgggtgcagtgtaatcagggtggagtcttgtggtgccctggatcttcccttctcatgtgttctgtgttctagcttgcaaacgccatgaggagctgcaggggagattaattagtaattaaaatgtttaatgcttcatattattcaatgcaagtcaaacatgtaggctactgggagatgaaaactacaacatgctgatactgtgtgatgagacatagactgtccctacagactagaaactttgctgtttctggcaaggctgcttgggacttgagataggaactgggtaataaatactctgttgaaaaagaaaataggtgtggatagtggcatcttcctcctcctatattctcttaggaaaaatttaggagcttttcatgatttgctgagaaatagatttgtctatgtattggcattgtctgcttaataataactttctttgagagctatggtaaaagttgaaaccttgtagaaacctctggtatgtgatgttaagtggaatacagtaaaataaaatttgcaaaacaccattttaaaagagaaagggatcttattcttcacaatgcccatgttttacttagaggatctgtgttgttttgaattagcctgtacccgccagaaaacttcaacagttaaataacaatgatttgggggtggaggagtggttagctgactcagagttgcatgccatgacttttatgacaggcaattaatttttagatggtatataattgcatttcaataacatttatacctcatcatttttttagaagatgatgtgtttgtgtcatgcgtaataagcataatcaacgttagctttaaataaattttgttttgagtgccatgaaaatgtaacattttcagagtggaaatttagcctaaaaatctaccttgcattgcacctctacaaagcttttgcccaaaaatattcatttcatttgtcccagtgtaagagctggctctgaatgtatcttagctcctagtggggataggggagggcagctgagcagatagctgctgagtgccatggggtgttcattcagctaaagcatgggagggggttgtcttctgtggttctctagccatggtccttgtggtagcctttaactgtgatttgtttgtttgaccttgatgagtccttggctccgagatgattatgttacattacactgaatcactcaatccaacattggtttgaaaagaaacgaacaaagctgcctgttgagtttctctattttacaacagtatctcagtggaaataattagtcctatgtctatgcagaagcacacatcacatttgcaaaattaaagagtgttcttgttaggactggtttctctgtttctttcttcctctcccactgtttaaatatctattttggtggtagtgttagtatgaaaccccatagttcctttcttttcttttctgatttaaaaagcaaataaacaagaaaacacaagtctagctatgttttttaactcaagatgactagatataaccacagcaaatatgtaggattgttgtgttttaagagaaaaagccgtgtctcagataatttgtagtcattgttttgtccattttgacatctacttctttatatactttatagccaaactagagtatagtgataataaggatgatctctagacagaaggttggaggtggttaataactcatcctacatatcacaatttttcatggtgagtaactggtttgccctccacacaaaatatcacattggaatgtaactgctaaggttcttcacactatggaaaaattaccagtaaagttaaacactgcctttcagtgggtatattaattataaagacaaaactatagtttatgttgcataatttgaacatacatatttccttatgaatctgtaagctggaactattgaaatgaaatatacaaagtgagcacgtgttgctgttgagccagcagttacagttttcatttacaaatgcggacagaaccatttgctcattttggtctctctgctttgggtcctgcactcacactccaatatgcacctaagttatggggtcatgttgaggttccagactgcagaaggggatcgaattatgtttcattgtattgagtcacaaatatttcaatgtaaagtaaaaattttggaagttttacgtaacagaatataccttacaggaacaatagataggtataaaatgacttcggtttgcataacaaagaaataattgtgatgagtaccagactgtgaagtccctgaggcaaggttatcatttgttttctggcacatgagaggcatacaaatttatttttgctgaataaataaatattgtcttcaaatctttacatttccattctagaaatatgctaaaaaagctaatctgtaatagatatagagttagcacatgacaaagttatagctgctttgtgatttttttaaaataaagaacatgtatttgcattaagaaaaataagtgtggccgaagtgaatatttttttataagagcaacctaatggtaaccaatgtttcatccaaaattttcagctatactcttatattgccttatatcacttgatgacaatgtattttgttaagaagatgatgttatcatgaggtataattcaatattatatcaattctgttactgttgagataacataagaaagaaatatcaactctttttctatattctccacagaactgaggaaaacagaggactattatgttattatttcctaaataaagaccaatatgataaattccttatattcagtgagaggaaagaagttgcttaccgaatgtactgatatatgcttccttttttcagaaaacaacaacatcaaccaaaacacctgtataattattacatgaattttttttttttttttttttgatacggagtttcgctcttgttgcccaggctggagtgcaatggcatgatctcatctcaccgcaaccactgcctcccgggttcaagcaattctcccacctcagcctcctgagtaactgggattacagggatgtgccaccacgcctggctaatttttgtgtttttagtagagacaggttttctccatgttggtcagggtggcctcgaactcccgacctcaggtgatctgcccgcctcggcctcccaaagtgctgggattacaggcgtgagccactgcacccggccatattacaagatttttttttttgcgtttactgccaggaagctctgcttcattaaaagaagcctctaagattcacctcttccttcctttaccaatttatttctgatacttcttgacccagtatttcaaatgtgataaatatatgccaattataaagcatttcaaaaccaattaattgtctaaatctaagtcatgctttttaagtggaaataaactttgtgtccatacacatatatttgcctataaacatcttaaaaatatatctaaacttcggacaattttaaaaagagagtattgaattttaaatggattctttgcttatattgatggtaaacagtggatccattaaagtagcatattctgctggtgtaaataaaatataagatttaaagtgggttaaaaagatataatatttacttgttccttttaagaaacaagttgaagaaacaataaagcttgaagcctgtatagtcagatatatgaacccataaagtaaatcatttgtgaagtgtcttgaactctttctaatttcatcttgatgttgtactgcttatatgaaaatgctgaaaaatgttacttcttagatactgctagaggtgctaagcttcttaccattcaggaatcttcttcttggctctctccgtcacccagccaacacagagttatgttttatttcccaaatggccaacttatgttaacttgatgcttaccaaggcagtccaagccaggaaacaatttttataaacagcatcctggatgacttaatattctatgtaatattaattttagagctttttctcccatcatctagtctagcatagctaaaattatgatgtttaactttgttgatctacagtcacttgtgaatgagatctcccaaccaggaaggaaggaaagataggaaaatcagagtggtctgtttgcagctgtgctagcacatgtttccttgagtgccttctgaaggaagagtggatagagatgtatctttcagggccattgcctttctagcattattgatcgtatcacatgggcaaaagaaaaagaaacaatagattttatgacaaaagttatgtaaaaaggggctgaaatcagtattttgaaagttgtgactaattaacagtggctttctgagaagtgagatgggattcaagacagtggccattgtgtatgtatttctaagagccatctggatgctcctttttatttgtgtttttggcttattcactcatttattcctttattcactgattactaattgaatacaaagtctctgtcgatttgttcaaagatattaaagaagccctaaatctatggaaagacatcttctgttgattagttgcaagatgtaatattgttaagtgggatactccccaatttgatatatagatgcaaagcaatccctatcagaatctaagctggcttctttgtaagaattgacaaacatccttaaattcacggatgttcaagagacccagaattgccaaaatcatcttgaaaaagatgaggaagtttccgacacacacttcctagtttcaaaactttctttcaaatgacagcaatcaagcagtgtgatattggcctaagatatacataaagatcaatggagtagaattgagagtccagaaataaaccattatgtttatggacaattgattttcaacagggtgttgtgacgttcaaacagggaaaaaatagttttctcaacaaatgatgctggaaccaccagatatctacaaagagtaaagctggactccctacctcatagtgtaagacacaaatgtaaaggataaaactatacaacttgtagaagaaaatatagaagtgaggttcatgaaattgggttagtcagtggtttcttaaacatgacatcaaagcacaaacaactgaagaaaaaatagatgagttggacttcctcagaattaaccaaatttgtgcttcaaatgacaccatcaagaaagtgaacaaacaatccgtggaatttgcaaatcatgtatctgttaaggggcttatatctggaatatattaagattcttacaactcattaagaaaaagacagcccaattaagtaagaaacaaagtatctgaatagacatttccctaaggatatacaagtggataatatgcctaggaaaagatgctggacatatttattgatcaaggaaatgcaagtcaaaccacaacgagatatcacttcacgctcactaaggtggctataataaaaaaagacaacatgtgttggcaatgtggtagagaaattgaaaacatcatacgttgctggtggattgtaaaatggcatagcccttttggaagcaatctgtcaattcttcaaaattggtcatagttaccacatgaccaagcaattatatttctatttatgtatccaagggaattaaaatatatgaccacacaaagacctgtatagagatgttcatagcaacatgattcataacagcctaaaagtgggaacaacctaaatatctatcagttggtgaatggataaacaaaatgtggtgtatccatacaattgaatattactcagccataaaaaggaacgaagctctgcaacatgctacgatatggatgaacctgggaaacattatgctatacgaaagaaaccagacaaaagcgaccacagtttatgattccatttatatgaatgggcaaatccagagacccagaaagatgagtggttgccagtggccagggggaggggacaatacagagtggctactaatgggtacaggatttcttttggaaaggtgattaaagtattctggaatttgctgcacaattctttgaatatactaagaatcactaaattgtgcatttttaaagggcatattttatggtatgtgaatcatgtcttaactaaaaaatttgttttaaaaggctctgtattgaataatttgcctagaatacacacatggcattgggagtggcctccactctgaataagcttacaatctcttggggaaaaatgcaatctaacagttatagtacttaagcgtacatggtaagaaagaagcacatggagggtgcttattgaatgggaaaaggaagaaatctacctggatgatcacagaaggtgtttggtggatagggagtatttgcaagaagaatccgactctcgtgtagcttgagaaagcagaatgaaaacccgtatctaggaactgaggaaggcagtcagcaatgtaaggtcaatatttttctaaaagtaatggcagctgaagtacaacttaggctgcctgagaagagagcaagttttccttcattggagcatttgaaatgacactctggtatttacaaggtgaattattcacactctttaaatctcagtgttctgagttgataacacatttcagagttgacatgaggaccacaaggaataataagtgtgtgtttaatgtgaaaatacaatatcttgtacataataaacagttattactgttggtctcaccaccaacatcattatcaaatgaatcttggcagtaattctgggaaaggaatttaggcaacagatgggagctcatttgaatgatgctaggatttcatggtactcccattgttggttacagaactccaagaactctcattcttggagtcttctgtttcctcatataaaacttggaaggaagaacagaagaccttcattctgttccaggcccttaaattgattatttctgtgcctaaagcaaactgctcagcctcaatcatgactttgcacaatttgctgtgatacctggtatagatgtttcatttgttaaagttgttactgacaagaacctccaatgaccttggaacatgacctggcccctgtgggtatcagtagaattttggtgaacactgagaagtctctgagtttctttcaatctgggcttctttcagttggtttgcaaactggacttgtggaattagatgatctctcatgcccattctatctttgagttggtattatttttgccccgtattaaagaaaaactatattgatatttctttctttgcttttgttatttcactatagaaaattttgttttaacattcggttggagttgatgatatacaacccaattatatggatttgttatatgcaaacataaggaagtattcacaaatttaaagaccaagttcatgttgttcaagataatgtgaacccaaattcattgtgctcaggataatttggaactaatttcatagagtttaagatatattatagtaattaaaatcatggattttgggagcacactcccctgactctaaatatgtggcctgggatgtcacttaaacattttgtgcctcagttcttttatctctataatgaagaccattatagtatctatctcccaggattgtaatgaggactaaatgagtttccatgtataaagcacttgaaacagtgtttgacatatttagcaccatatgcattagaagatcttattgttagctgcgtgcttattcttaaattgtctgagttactgcttttatataagaagattgacttataaatttggcccatgatgtcccatccaactctctgaaatagattatctacctcttttcagctgggcatcttacttatgatatctgaggacatctctctgttcttgtgctttgcccagccccctttggtttctaatgcatggagccaaaagctacagctagagccataatggtcttgtcctaccatctgaaagacatgttgattgctagaatgtttctgtggttaacaagataattcctctgataagtgaacaaccttcacttaaatgcaaaaattatgactcatagattattaatttgtcacaatttactaaccctatcattggcctattgatgtaagttattcttgtcacgcttcacctacccagacgctaaagcatgtaaagcaatagttaagtttattgttcatctgattgacctggagggcttgttaaatgccattactgggctctaccttatgttttcaattcagtagggctggagtgaggctcaataatttgtatttcaagtgttgctctggtgtggaccacactttgtgaaccctttaaagcttcttgtcagtcacatgtttgtaagcagcactgtcttcctctgttctcttatttctatagctgcacacccttaaggcttgccctagtgtcaaaagtggatgctagttttatgtcttttttctagaggaggaaaaaccataacctagagaagtatctttccctgcatacatagtacattgacagaatctggaagatgccctttaaaaaaaaaaaaagtaaagatttgtacctgccattctgtctttcagaattgtaaatttatgtttattgatattaaatatgcctgtaatcccagcactttgggaagctgggaagggcggatcacctgaggtcaggagtccaagaccagactggccaacatgttgaaattctctttctaataaaaatacaaaaattagctgtgcatggtggcgggcacctgtaatcccagctacttaggaggctgaggcaggagaattgcttgaactcaggaggtggatgttgcagtgagccgagattgcacccctgcactctagcctaggtgacaagagcgaaactccatcacacacacaaaaaaacaaaaacaaaacaaataaaaattgtatagatttatggtgtagaacatgatgtttgatatatgtatacattgtgaaatggctaaatcaaactaataaaaatttgcattacctcccatatttattttttgtggtgagaaaacttaaaatctcccaacaaatttataatacacttgcatctgcaattcttgaaagaactattaggtttggaaaactagaattccgaattcagttctgccatacctagaaacgtgaatgtcaactgtttgatctctctgaacctcattttctttgtccatgatattaatacctcctctgcttatcatatatgatattgtgagaagtaaatgacacattgtacattaaagtgctttgtgaactataaagcgctatacaaagattattttgcattctcatcccagttgtcacacacaatatcttgttaaacatcatctgttttatgataggcacatccttctctctctcagctagggtaaatattgacttttctaactgttttcaggaaggaaatagtgcactgtgaactacttgccttgtgcacagaatccttttatttccctcctgtgattattttttcttttctagtctcttgctttttaaagtaaacaattaagaagcttgtcatttagccatttatgcatctaaacacttttgtatatgtgagatgtggtcacaaacataaacatatattatgaatttttctcataacatccttttatgcaagacatcctacacaccacatgtattaagaatgaagtgagttgctgttttgcctgaaatgcattattttttgtttttgtttttgacgtttgacttggaaaagggagttgagttgagccaagagcaatgggtcctcttcccagttgtgtaaccagcaggttgtgttaggtaagtcagctcctttcttgaagcctcaggtacatttgtacatagatcgaaatctagtcttttctcatgccttccactctcaatgtctgtgttctcagtgttaaaaggaagtttcagaagatgaccttcaccttgatgaagaagtccgaacagagtatccccatttatctatctctattctgctaagatacttttcttttcatgcctcaggtctgactgctctttgcaattcagcctgttgcagtgaagctctgacatgtctttcctttaggatgtgactggtcttcactaggactctcaatttcttagggcttacgtttctgttagtatgatcggaaatagaagaggccatgtcctgcctttaatcccctgggatagagatgttggtggattgggggattgaggggtggagaggcttttatatttttagtgagtctttccctttagtgattttcagagcatctccctattagtgcacagtaagaagtatttgttctttttgccatgcaacaaattgcttaaaaaccaagcagctgaaaacgcgtattttctctttgttcttggtgagacaggaatctgtatatagcttagctggaccaccaacttcttggtctttcacaaggctgcaatcaaggttttgactcagtctgcacttgtatctgaaggttcaacgggagaacgatcagcttccttgcttaggtggtttttaatttttttatatggttcgatttcttccaggcagttgcataaagtgctttagtttatatctggttgttggctggagtctatcctcagttatttgtcatgggagcctctccatgtggcatctcactacatcaaagcatggaagctgagcaagcaataggtagagtttgattacaagatggaagccataatcatttgaaacctaaatgtggaggggacagcccatcacacttaccatagtctgtttgtttgaagtaagtgactaggattagcccacactaagaaagatggcattgtaaaagaatgtgaagcccaggaattaagaatactagggggaatcttataaacctgccgatcacaaaagagagtgaggttagacttactgtccacagggatttagtgcaaatgtaagtttatttgtagaatctgtcaagtcagaaagcagaggaggcatgtggggtatcatgagaagaatagaatctggaaggagtaacaggtaatgaaaggtactaacagatgtaggaagaactccagaatttaagaaagttatacctgaatgtggtttaggaggtcttttgatctaaccacctccatttctcaaggagtccaaagcatatagagggccttactcaggccagaagttgtggctgaacaatgagttggaacaaagtccacaaactcctgacttagtacagattttcagcttgatgtaatgaatatagctctggatttggagtgaaaagatacacatgttcaacttttgatttgcctctgagtggctgtgtcaccctgagcaagtgataagtaaaggaagcttgatatatggttacccagtttataacatgaagctatcattatcatgtatattcatttatgtctgatgaacatattaacttttctttatgaaaattctttgtaagctgacatgaacagacacttctcaaaagaagacatttatgcagccaaaaaacacatgaaaaaatgctcatcatcactggccatcagagaaatgcaaatcaaaaccactatgagatatcatctcacaccagttagaatggcaatcattaaaaagtcaggaaacaacaggtgctggagaggatgtggagaaataggaacacttttacactgttggtgggactgtaaactagttcaaccattgtggaagtcagtgtggcgattcctcagggatctagaactagaaataccatttgacccagccatcccattactgggtatatacccaaatgactataaatcatgctgctatatagacacatgcacacgtatgtttattgcggcactattcacaatagcaaagacttggaaccaacccaaatgtccaacaatgatagactggattaagaaaatgtggcacatatacaccatggaatactatgcagccataaaaaatgatgagttcatgtcctttgtagggacatggatgaaattggaaaccatcattctcagtaaactatcgcaagaacaaaaaaccaaacaccgcatattctcactcataggtgggaattgaacaatgagatcacatggacacaggaaggggaatatcacactctggggactgtggtggggtcgggggaggggggagggatagcattgggagatatacctaatgctagatgacacgttagtgggtgcagcgtaccagcatggcacatgtatacatatgtaactaacctgcacaatgtgcacatgtaccctaaaacttaaagtataattaaaaaaaaaaacattaaaaaaaaaaaagaaaattctttgtaagctataaaagcctttagaaaaaaaagtaagctttgtttaaattattaatgtgtaggttgaggcaaaacaagcactcccttttgacagaagggataagtactggttcatataaatacaattttatctccatctgtatctgtatcagccatttatttctgcttgataaattatcccaaagcttagtaatgtctaccttactcacatatctgcaattttgatagtactccatgaaaatagcttaactctgttctgtgaaatgagcccatgtgcctcgatttgggtgcagaggattcactttcaagatgctttactcatggctggcagtttggtgttagaagtgcgactagagttgtgtgtcaggaccttagtttctcttaatgtgagttcctctacaggctcctagggctttcttacagcatggtggatgagttccaaggccaagtatcacaagagagaaaggtagaaatgccagcattgttatgacttagttttagaacttacacagagtgtcctttctactatacactgttgattgaggtccacctgggctcaaagacagggggttagtctccacctttgttgttggggttgtagtaaggctccagacaagtttgtgggcaagagacactgtcgtgaccatctgtgtacagtacagcctgccattatattgtattttattgcattgtatcacattttactacatcatattttaatgttttatgttgtatttgtttccatttgtggaggacttaatatctgccagacatgtatattctgtattaaagttgacttaattctcacaacaaccctgtgatgacgtggtccttctcattttcaccaacgagaaaaccaagttataaagatggtaagtaacttgcctaaggtcaaaccagctcataagtggcagagttcaggttcaaaaccaggcaatctagttctggatcccatacttttcaccactctgccagattatttctatgttgttatctgtttttatgtcttaaataatatttatgccatgctgttactaatcaccatttccatccctgtctctgtatctcagttagagaaagtgggtagataaggactggatatcagactggatagggaggaaacacatgcaggagtatcattacctttgagagaggtgggtctgagcttgtccctaagtgctcctggaccagttctaggagatctcaagaaaagaagcaacgtaacatttcactagttccatacagagtttatattggccttaatgattttgcctttaatttaataagacatatgggagtctacggaatctagggaaggcagctgagtaagtaacgatatttttaaaaaaattggaaataggggccaatatttgaagactaatgaaattcaggggcatctattctcgttccacaaaagtttagctatctggtattccatctggtgatctattcaatcaattaactcttccatattgggatgtttgtcagagtccagcttacaaattgaggaaatccacagtcacttgtgagctagtttgtatcagttattaaaatttacttatttattgtaaacttcatcaaaccaacaattgttaagcccctactgaatgcaggacactgcagattacaatcaaggggaacacagtttataccctttctcacaccacaagggacttctactgtaagaaaaagatgtgtaaagccataacgacaagaatatgtgataaatatgataatgaatctatgaacaaggctgtatggatgcctagcggaaggtgctccaatattctcctggagaggtcagagggggcttttcagagcatttaagcatatatattacaggaactggaaatgttcagcccagttggagcttagaaaatgtagggcaagtgataagcctggaaaggaaggcacgtagatatgtttctgcaaatgcattccctccttctgtcttcctgtctgccttatatacacaatgatgactcagtaccaggaatctcaggaaacaaacaacacacatgcacaatataaattcctctacaatccctctatttatcctcagtgcaaaacctcaattaactaatagctcatctgaaaactgtcagggctagaaagtcccataacccctcaggataaaatcacaccaaccgtaagttacttaggctctccaaggtcagcctccttttatctagcttccctctttttataaagctgcgggcctgtctctaacaggatcatgtggtaacattcatgatttgcaagagctttactgctacaaagcacatttgcaatacactgtctcttttttttacttggcatttgcgaattaattgttaacccacctgatatatagtgaaattgtggcccagaaatgtgaaatgactgctcttaatttttacaaaaataaaacaaaataatctaatccttaaagtcgtgtcttcttttgcaaaatcctagtacatttttagtacatcagttgtgttccgtagctggggactctgttcaagtgaaccttaataagaagtgtgatgtataaaatggcagagtttgaggtgttctgactgaaataaggagtctgggctctggagcgtggctgagcatcttcttgctcactccagaaacggccctgaggcttcttcatgtctagtgttgtgaaaaccactcaactgcagtgtgcttattacctatgtctaaccttggagcactcagaaaagacctaatgcttattttactgtctgaagtgggaagacagccattgttaacgtgggatctcccctagcattctccttctgatcctagcgtaaattcctgtggatcaaagcccagcccctgagaccgtaacagagagaataaaagaacaagaagatggtgaaggcgatatggtgtggtagatggagcatgtgaattctcctagttctgcttctaactcactttttgatttttagcaggcaagctatttcacttctcttgtgccacggtttccattcataaactagggaactggacttcttgtctcctcaccgtctgattaaaaacattccgtggtgattccttttcttggtaagacacatagcttagtccacctcaggtcccaaaaggaggatcaaccttagtgttttacgctctctaatatgacctcttgcggtcgatgttttagaggtatctatcatattgcatggattgagggagtttgacctgttgagctgggcgagttatcaccatgcagcacttcaggtgcttactctctttttatccatgcattggttcattggattcaaacatttcattagacttcctgtcttcttttggggggatattttgaatttggggataataaatttagaaatctttgggatgaagaagaggaaagagaaggcagaaaaggagggccatgactataacatttatcagcaactgtgcctcttccagaagaatcaggatggactggatttgaatataaaaagtaggaagagaggcaaggcagaaactgggagaggccgcagatggtagtgattgcagatcctttataaaatgctgcatgtttcaactttcctctgcccaacactatcaagtgagatggatccttggaggtctttgggtccagtcctcaaggaatcaaaattacatctaggtagtaggaataggttctagtgttctataccacgtgggataactatagttagcaataatgtgtgatgtagtttcaaataactagaaggcagatagttaatgttttcaacacaaaggaaatgataaatatttgagatgatgaatgtgctaattaccctgatttgatcaatatacattatatgtatggaatttcactgtgtaccacatgaataggtataattatttttaatttaaaaaaagcagtttctcatgtaagctggatgttgctggatagtttaacagaagtctgtatagccttgttgtattttaatcattttatctttttttttggcctggaaaatattaagttagaatggctgtgctggaatacatcatccccacctgtatattaaagctctgtgttatttaaaaatttgtctaagaaacctataaattgatggagcctcactgtggtggttctacttctctattttgtgtgtttgtttgtttgtttgttttttggtctggtgccattgagccactgtctataggaataaaaggatgttagcatgactgatagttcagtgacctgtaagtagcgattttaaagaaaaattttataggtctttgttagttccaaatctgactacctgttaattctgctttatagtcatgctctgactttaccatgaaggctgtagcattgtgctttatctccttgtctccagagtacaagatcttggtaagagaaaagagtgataaacccaaaaaatacaaactcagtttacctgagactgagtagcacagaggtctccactaccactcatttccctcttcacatggcaatggaacttttcattaaaaataaattgtatttactcatgtatattcttatgctaaactgataccctttttcacaatggataaaacaacaataaatgtttgcagcctcgcacatcaattctcgaaccctgttctgcaatttctggcaataaaaggccttgcttagtgtgcattaaaatcttggttctaaagtcagtgtctactttcatagaaagtatagtttgtgacctctgttactatattttcaccagcaatttgcacacttgtcatgaggctttctctttgtatgggtcttagataatgcagtatcttgacatggtacttctatggtaagacaaagaggatgctgtttttgtattaatgcgaccaaaatatttcaaagccaatcttacagaatccccctattggacatcccccataaattttttaatggaacaaaacccctctgtgagaaataacaatttgtatacgatttcaaaggcataattcaaactatagctgaataagaaaaataatacaggatctaacaaggcaacacttaatgaaaaatcaagggccaggtgcagtggctcgtgcctgtaatcccagcactttgggaggccgaggcgggtggatcacaaggtcaggagatcgagaccatcctggctaacatggtgaaaccccgtctctactaaaaatacaaaaatttagttgggtgtggtggcatgtacctgtagtcacagctgctggggaggctgaggcaggagaatcgcttgaacctgagaggcggaggttgcggtgagccgagatcacgccactgcactccagcctgggtgacagagcaagactccatctcaaaaaaaaaaaaaaaaaaaaaaatcgaacaagtctttggatattaaccatagtgatcatgccctaagtatgtatttactttaggtaaatcttagtaaagcaggaattagctggttagctgcacttactggctttaggttgctggttagttaactggaaaggctgttagtttagaggtgatacgacacatagattatggtttaaaaaggttgcagcccttatttctagaatgtattcaatggtatctgtgctgcctaacccatagggttatgttttaaacgatatgatataaatgtgttatactacattttgaaacgttagttggtgtcactatatcttttggcaaagagtctccttatgaacttcagggagcttgtttctacagaaggagtttggttcataagatgttttccataagaattatataaatttttatataaaaaagtagtgcccaaactattaactcatggagagagatcaaattctggtctttttaaaattaagctctattagtccattttcacaccgctgataaggacataccagagactgggaagaaaaggatattttattggacttacagttccacatggctggggaggactcagagtcatggcgggaggcgaaaggcacttcttacatggcagtggtgagagaaaatgaggacgatgcaaaagcagaaacccctgataaaaccatcagatctcataagacttattgactaccacgagaacagtatgggggaaactgcccccatgattcaaattatctcccactgggtctctccctcaacatgtgggaattatggggtaaaagtcaagatgagatttgggtggggacagagccaagccatatcacaagcttagtgagaaacctaattgcttatatactatctattattttcaaattcattttaatattttggattcttatccaactaagagatatagggaacaaatgctgtaataatcacccatctgtaaaatatggaccttctcatagggaacttacgttttagtagggaaaatataacatatacactaatagagattacagagtaggaggtcctttacagagtaaaaggagaatggagatgtacagtttggtgtgtactgtgggttgaggaagattgtgtgttgcggaagatggtgacagctactgacgagtcactttctgccatagagatcaattttccattggtcaattgtggacattcactaatgtaggttggagtgatgcttcaggagcagacatggcataaactatttcaggaaaccataaacagcttagctttatcttcagagtagggtatgaaaagggagagaccaatggtaaaaatccaaattagaatgatgtgatgccatcttggaggcccttgtaagtcaagcaaaggagtttgtgcaaaaagtttgaacattaacaacaacaaacaaacaaacaaacagaaaacagaaaaaaatattgcattgtatctgtgggaccttcccatccttaggttttaattttcccctctgtcaaatgagagattttacttgataatctccaaaattgtgaccagctctaatgttttacaattcccagaattattacatcttaacttctccctgagaattatttactgatcacatagtagaactgaagtgatttctacagtagctctatagctagcaacccagcattggataaactcaaggaatgaaaaatctagtgtgtgctggggttgggagggtagtcatatattactgatttaactgtcatctggaaaactttatgggaactaagtagaggatgccataaggaccattaactgctcctaagatatgatgagcaaagactggagaataggagtgggcctagtctacagattagttttctattattgctgtaacaagataccacgaaattggtgtcttaaaacatcacaaatttcttatcttacagtgctgtaggtcagaattctagtccaggactcactgggttaagatgaaggtgtcagcagagcttcgttcctttctggaggctctagtcatagtcattacctttcccagcttctagaggctgcccatatttcttggctctcggactctgtctttctagtgacattgcatttctctgaccactctttcatagtcatgtctctctgaccacagctgggaaagattctttgcttttaagaactcatgtgattagatgaggctcacctggataattcaggctaatctccctgtctcaaaatctttaaccttaatcacatctgcaaagtctttgtaatcaacatgttcacaagttcgaggaattagagtgtgtacattcttggcggggtggggagggctgttcttatgcttatcacagtctgtttttaggaaagtagataagttcacaacgttaatgcatggaggctgagattgtgagaagaaatgaagcagccagtcataaagtgtgtttcgtgctaatgtaaagagttctgaagttattctgatggccatagagagctattcaattctacctagtagaggaatatttaatctataatgatgtcaaacaattgaagtgggtagcttgtggtacccaaccatccttcgcattttaaacatgggaaaatgaagactattttttgactcagtatacttgggacacatattagtgccatgtacctatcattattttcccatatcatgtgtttttctaccctttcctcctacttgtttttcctctagcctgtgagaatgccattcatgatttataatgttctgggtaaaaagttcaggtagacctacattaagcaaaggtaactcagatttggaagactgaagcttggtagcagggagggggttacttaggacagagagatgccttggaatggccgcacattgagctcgtgcatgttggagctggcattacccatgtgaggaggtggatgacctgtctatatattcaacactagcttttctttgagatccccacaaaacagatctaggaaatctaatgaaagaattatccctgctacaccgtgtttttaacataggaacggacagttaacttgtgtgtttgttcaagaatgattcataatgcagaagatgaactggtgaatagaagaagcctagtaaattggaagattctcttgatgaaacagagaaattgagatttattattcagtcacttccaattacactgttgtgttgcagaggaaagcagctaaacaggatgttggctggtaacaccagcaaagtggaatcaacctcaaaggagatggtgtcagagtggtgttcaatgcctgagcttctaccgagtgagtcacttgtgtgaaaatgtcttgacacagatagaattgaggtgcccacactatatctgatcacagaaatgttaatgcagaatagcaaactggctttcatcttcatgggattgcaggctgggggataaaagggggtgcatttttaaaggtcatctctattgcttatgagaaaacaatgtatcacatcccatgcatctgtgagactgtatatcaagaatcagaaataaatacatttgaaggaaaactgcaagttgtttctcacgtgtgaatttgatgctttttttttaaaaaaagaaagattttctggaagaatttagcctcctgaaaacttgtttcttctgtgttgtagttgataatatctaccacccactgtggtgcatggagaggaaaaaccttctatcccctactttatgtgttattgatgtgacataatttttcagaatagccacacaatttcaaatgtgacttcttttctaacttgcaaatagagctgacaacagcaagatatgtcctgtaaacaaaccccaaaagaatatttttgaacaagttgtagttcaatttataccagattatggaacactagagatttacagtgatgcgttcttttatttagatggaataggagaacccatagagttgaagctgtttgtctgaaggtttgcagcagatcagtggctctgccaagcctgcaactatcatcacctgactccaagttactctctttctagtccagcacagctgcctcccaagtttaatagtctatgactcacaatccaaatctatggtgacatataatattttactttgattccaaatcaacaagccagttttagaagtgcttacactgctgcattactttttatactattgggttcttcaagttgagtcttatttctagaactccaataagaataaccagaggagtcatttattttgttattatgacatatttattgaagacttattgggtggcaagctgtcttatagagggtgagggtacagctatgcataaaacaatgtgtattttcttaaaagagtttatattactgtgggagaggcatagtaaacatgttaggttctatagagaaaaataaagcaagataaaagtgaaagagtgctttgggttgagtggagccatagttgctattctgcacaaagtggttaagaaaagccttaagaggaagagatatttgaggagagatctcaaggaggtgaggaagtgagctctgcagatatttgggataagcatgttatagacagagggaagcacaagcgtgaaaagtctgagaagatcatggctggcatctggcatttttaagaaagagtgaagtagccaagggtgcctgaagccaagtgatcccaaggaagtgaggaaaaataaggttagggaggtagcaggggccctcatgatcacatagaacctcataggacctcttattcttagtttaagtgagatggagagcatttggagtcacattatcaggcttatgttaaggatcactcaggcagctttctgtaggctatgtggtaatccaaaccagaagtgacaacacaaactagaaattacaatcaaactcaaaatgatagttggttggacttggtaggtatagttggtgttggggaggggataagaagtagtgggattctggatatatttccattgcagcctcaacaactattgtgagcagatcagatgtggaatataagagtaatagaagagtcaagaatggctcctaggtttttaccctgagcaaggagaagaatggaattgctatttagtgagatttctggagacaggaagattaattttgcttctgtttttgttgtttagaagagaaaggagaaaggatgatcagccatttggctttgaatatgttatatttgagctatcttttagagattcgagtattggttgagtagacagctgtatatttgagtctggggtacaagggcaggctcttgacttgatataggtgtaggtgtcagcagatatacatttagagctttgagcctggatcatatcacctaaggtaatggaggaagccatgaatattttgatgtcatggagaaaatagaggaactattaaagaatgcttgggacaagaaacactgaggtgggaggaaatgcaaaggacagtggtgtccagaaatgaagtgaaaaatgtgcttcaagagtgagtgtgtgatcaaggtatccacaccattggatcaaatgccatgaggattaaaagttggaccaatggatctagatcttagttgaggattgccttgataagaacagttatcgttactcttctgagctatttgctcacacttgccttactttttgtcaaagtcgaggcccctctaaataatggttaaatacaagggctctggagttgccctgtctgaggtcaaatcctagtttcatatttactagttgtttgagcttggaaagtttaattaacccttctgtgtgcttcagttttttttgtttgtttgttttacttttgaaaggaaagaaatgatatgttttgtctcataggtttattgggaagattgcaaaaattaaacatataccatagtgtctgtcatatagtaaattaccaataattgttagctctagtgattaagaataaaatgatcactaacatctataaaattacacctgacttatatttccttcttaccctgaaaatcatacaaactctttctagagttgtgcttgagtcggttgcactattttctgcctttttgtttttttggtttgattttttttcagtttttttaatcattacatgaattaacctcattatgatctaattacttccacatagttctccagattgtgaatgctctgcgaaaccatagcttgttcatatcttagaaccttatgcaagggttggcacttttggcacttcaggcttgaaatccaggtttctgaatgccctggtgattgattgacatttcaccttcaaggtcattccaatacttaatgtagaagtgatagggtaaactcttaattactggaattacctataaataaataaatgacttaaatttcctaaaataatagttaatgtcttgttaatctgagttccttttctctgtaaattatttcacaggcatgaccctctgtaattttctcaccttttaaagtgatcctgaggtatatcatgcaggatagttgacctttgggattggtgttcttgccctacggtagatagctttgtgaagtcttccctccctttctatttctgggacctagaacttaaaatggcctcttatgttgaattcttctcattcatatttctataaactcaaataatggtgcctttaacatcttcagacgtgccttcatgcgttacaaaaaaaaagatggtttgatatttgtttcctttatcttctttgaaatgcatgaataaaggtaactatttacaaacctgaaataaagcaaaactgtgtttattagattcttgaaaagcggttttgcaaatctaaatcaagcaccgggctaggaggactacattaagcaacaacaccagcaatgagtggtatattttaggaactgtgtccatggacagaatgagatatcatgagcaaatatctgttgcaattcctgtgccaattcataaatggcaacagctgattcttgccttgctcacatagttgtagtctggatggtaaaaggtaatattttcaactccttggtttactttgtcaggagtaataagtttctaataaagaagctatatttatacttctcacctagcctctctctctctgtgtagtccatgccacaaacactgtacattggctaacatatttgtctgagtaagggtgagagacaagaagaacatgagggaaactagaggttgtacaagtaaattctattgttgctaatgccataatttattccagatattatctagtcccagaatgtgcatatgaatgttctggcgctctcttttctgtacttgtaataaacaagacatcagaagacacaagagttgagagggcccagtttcagtacctcttgttataaatcatcaagcaggtaaagagaagatccctgatgttatcagtacttttgagcagaaagcatggatgttatcagtatttttgaccagaaagagaatggatgttatcagtatttttgagcagaaagcatgcgtgtttgtacaccttcttgtttactccacataggcactccgacaaaatagtatctctacctcaaccagtaagttccttatctgtctctgagttcttttgtccttctacagaaacaagagtgtttctcttaaactaactccctcattctggataaactgatataataaaaacaccagaacgaaaacgcatgtattcataccatactttcccacctcactgtgctgtactctgtagagttcatatcctctcttcttttacacctcttcagtgagctctataattttctagctcttggttgtttctctgttcgtatcatctacctgcaatgccattcatcacttcctacctgccactctcacccttcattttttacctgaggagctgcctcctaccccgtatgagttgctgtacacgtttcttttgacacttgtcacatatataccctgttatggttgtggtcagctgtgtagattcaacttccttgacaaggctggaaaattgtgaattgtaggaagtgtgtttgagtgtgcttccgtttctgggattcccactgtgtctaaccctgtggtatctggcatgggttaggcaatcaacaaatgtttgctgaacaaatgaaaacaaatgggtaaaaaactcaaacctttaatattcattttttaagaaaaatagtaaatagcattaccatgactgacagaccacagttaatttgccatttctacctcccacttgctgttctcaaaaaaagtggaataaaaccacagatttgccaatggtcaaaagatgaatctaaagggcaatgatgttacaacttattattaacttatttcatttctgcctaccaagaaatgtgtatgactcagcttttgtccaagcagcactgcttttgttctattttgaattcgtggtggaaaggatgagtttttgataaagatcttgacttttttgtatcaaatagaggataggacggtattatagagattaggtaatgaaatgcatgggttctaatgcctgcactgcctctacccctgtctagctatatgaccttgaacatttccttgcctctgtctaggccttagtctccccagatgtaacatgagggagctgatgtagttaattgtcagtggctcttgcagccaagcatcctagactggaattctaggtgggattcagagtaattccttgtgatgacatatgactcaaccttcagctgttaactggctcaccatcgtgacaacaggcaccagattattcacacatttttgaatatttgaattgcataaggctgctcaatgatggtgaaaattgggtcctaaatgttctatcagatatatatgtagtgtaacctgttcaggatctcgtgtgagtgtaaaatgatgtgtgaaatatgcaccaagcaagaaacactttgcacattatgataaggcagtaatacaatttgatttttatgagttaaagatgatggtactataagagctctagttatatgaagcctggaactatagtatgtcttagtctttatagaaaggaaaacaattaaaaatgttgtttctcactcttgtatttccgtgttcgtagagtcaatagtttcactcaaggcaggaagacaagacctgatgttagcccctctgtccgagtcattcaacacctcaccccctccagttatatttatatttatacatattttattattcttttactatgccagtaccacaatgggaaatatgtttacttttaaaaagctacccagaatcctccaatttctcgtccgagaatataaaaacacttacctcacataaactcacttaagaaaatgtgaatgtaacactgttcccccaaaccgctttcttctttgaatgccagcttttcacatagcagctttcctgacctcctacttccaggacctcagacccctctgtctgtgggctggcacttggaatgtggctgtccacttggcaaagtggaaagagcttctgttctcactgtggcatctggggcctcaattctggttccaccactcagcagctctttgaatgctaggaggatatttcacttctccagatcctaatctcttcactggtaagagaggaataattatatttactttttgacatggctagaataattacagagaatgcatagagagcatctaacacagagactgacaggtagtaggtgcaggtttacttccccttctgtagatggtccagggtctctgacgcatctctgcttcttcactggtttatctctgtgctatgctaccaccaaggagtcgtctatgcacagataaagagggaaaatggtctgcagtcatcacttgggattctatgcaattcagtgaggtctcaaatcactactcaacaaccattcagcagcaatgcgatgtcaatgtccttatctgtttctcatgctactactgtttcatatctcctacgtaatgtagtttaggagaaagagtcatgaagtgggttccagtagtcctggcttccagttccgattctcagataaacctactctttgacccatgccaagtcatatccttccacatatttaaatgacaatcctataccttagttctctccagagatacatagattgttcaggctgatgcacttatgctttgatttactggatattcaagtaatgaagcctatctttttctatgttttcttctttttctggaattcaaagtctatgtgttcttgccattgcccctgaagtagtaacatttctgagcctggctgatctagaacctctacaaaggctgtccttccttcttgataataagtcagtgcatttacctaatatctgggagtttacaaagtatcttcatttattcattagtattgaagtctcagtagtaactcctgaagatggggattcttacccacattttagagatgaggaaacaggatgggagatgaaaggatgttctcaggagtcccacagtaggtgttagttacatagcttggatttcaagcagcatccttctcccaatcccaggtcctggcctgaatgtaaatgtgatttccaatccaagtttgaatgtctgtgcactcattagtccctagacaaatctggtttttcttgcatgagaatgaaattgaactttcaaacattttcttaagcctgtaggatctacattctcttcattttctaatatacttgtaactttaaattccttattaagcccgaaggatatttcacttcattgtagaaatttaccattgccattggcttctgcaaaacttggcagtgaactttttttaaaaaacgtggccattgagagtggtccccttgatacttgagtgtgtattgtcccaaacattgcctcaataggtagttactgtagaagaaaatgccgtagttttaatggcagccttgaattttctcctctctcctttaatggaaatccattctatacttattaatccactgagcttgtcagtacacatccctgtcatttctcaaaaatgtaaggaaacagcatgtatagaacaagcactggactaaaagtcggaggagcagattttagaccttccttttctaccaattatttggaatgtggcaaatcgctttacttctgtgaacatctagttcatgttttataaagcattgaagtagatcatttctaaggttcttttccaccctatttggtaaattgtctagcatgttctacttcccacttgattaaattactctgcttcattttttttaattttgcaaggaaatactcattacatataaggataggagacttcacttatttccacagatatttattgagcactgactatgtgaaacataattaaagtgtaatgggcatttggaggagggagacattccagaagaggaaactgttatgagtaaagataaagcagtttgaaagtgcactttctaatgagaacctggagattcatggagaatttgcagcgcatggacttgtgagcagttggcgttaaggttgagaagagggcagtgtggactgaatgtggaggcttctacagtgtgtactatttataatcacgcacacacagacacacacagacaaacacacacatacaaacacacacactcatcccttttcagggtctcctgacgacctatactgcctgttgctctttttacctcagccagcaaagagataaattgtcaagattaagtagatctgaacatttgagaaggagttccataaaaaagacaatgaaaatcaagtgtaccagcatctttgattcatacaaggatcattttcagtttaacagtttatctccgttgttggttgtgacttcctgcaggacgtgacttttgatatattcattcttgaacttccaccaagcacagtttcaccatagttgatgctcagtaatagatccttatttgttggactgaattgctgcctactgaagtcaatcctagaaaggagagaagatagcttttttacatagaataactaggaggggttttcttcttttgaatgagctaccaataacaaaataaaactgcaatgaaagaattgacagcctggatctgtaatctgcctgacctgataattgtaaaaactgattactgtgtcagcctgccagatggatcttctccttgaaatgtaacgtgcggcacttctgaatgtgattcaagtgcaagcttccttttctctccccttcatgtttgttagtttgggaaagaagcagttttatttgaactgaacccactcattttaagtgtgtttaatgacagcagtatgtgacagataaaataaaatcctacggcctcgtttgatgtttagtttcagaccttagtgaaaggaaataggataaaacaatgttgttcaaagggagaagttgaaaacaaatgatttgttattacacacttagccatatctctccagggaaatttgggaagtcaaataatataaacggtaataatagtagtacttgagatttgtggagtgcctagcagtttgtcgagtggctttatgttcattatcacatcaagtctaggaggttgcctggccagaaatcatcatcccactattacacacacggttgagtgagttacgctaaatactacttctaaaatggtagaactgagcctcactcttggtcctgttgattttgaatggaatagttcctctaattctctgtgctggctcaccaaccaaacatgtgtgcagtacattggaccacgttgtggaaccagcctgttccttaactttactgaagcatatatatgctggcaatatacaaataaattatcacaacggatttcagcagtgagaagtatatgaagttgaacataacagccctccctcagtacccattcattttctcccctgccaaccccaactctttttccaaagagtaatcaccattgtctttttgttgtgcatctttccaagcatgtatctatacatttatgtatacatttacatatatgtgtgtgtgtgtgtgtgtgtgtgtgtttgtgtgtgtgtggtatattatctattttttttcagttcttttcctctggatcttttcatgtcagtaaaaaggatttgccatactatttttaattctgtatagtgctccatagtgtaagggttcatcactgagtctcttttatagtggagagcttcagcttttctttattacaaacaatgttaagatgagcttccttgcatatgtatctttgtgtacatgtgaatccagaattggaattgcttgttttttttttgtttttttttttgtttttttgagattatcaaaattcagtgtgggccatcatcgcaaatgttagaatcctcatcttagctcatgttatcgacctgggtttccacttagttgcttggggatgtgttgttcagaccaagccagacacttctctaaacagacacttgtggccaagagagtaaatgttggggaagttattttccatggcactgtggtttgaatacaggcactcaccatggaagaagagtagggtattcttgtaacagtcttgtttacttaaaacagccacgactcttcgctgagatagaataaggtacttaacgcaataaaaatatctaccataatttaaaaatgcaaatgtagcaatgcactaaaaaatacctttagcttattttttgttaagaaacaagtgttttgcataatcaggctttaaaaaatataattgaattctctatactgattctatgataggaaggtccagagtcaggtccaccttccatgccatactccttctttccaccattcgcagctggtcctactgagggtaattagtaggggataatatctgaaaatgtaggtatgtaagagaatagagctaatctgcctagcttttatgatattacagatcgcagaggagcatcctcacggataattcccaaatcacagataatgtgttgttgtgctttataagcagagagacacaaaataaactctctcccctatccttctcttttatttatttattttccttctgttaatagatttagtcattttttaaaaccataatataccaggatgagccagaattatgtgtgtctaagttcttttaaaataaagaaatcgtttcttgggtctgttttagttaggtcctttcaggttgcaggaaccaagatgtgcttaaagttacctcagatgactttagatgatgggaatttatggtaatatacagggagaaggaaggaagtccaaaaacccatgtcagcaactagacaaccaagcctcatggagacttggaatatcattgaggacacaacagcagctgattttgtcattcctcagaaataaacatccagtgtttccttgtccggtgggtctttgttggacaaggacttagctttcttcaattttccttctgttttctgtggcagctcctgttagtgattctgtttagtcttcttctgaacactaggatgttcgttatatgatgtcctgctgcctcatggcctcctcatcctacgccgtgtgtctctggcttttgctccattccatctctgctcccagcttttctttttctgtatccttacactgaaaagcctgaaccaacaggaccattattttagctggttcttctccagtacacatggaggaggaattcttcctccaacacagctcctgggtatctagtctggtttgggttcaatgtctgatccaactagctgtggccagagtgcagaattacctgttacaaaactgtggcaatgtagttattaaaacaagcaactttttgagggttttgcttaaacagagtggttggtgtggtagagacaacattgtatgtacttctctatcacagagagaaatttataaagtcaaggcaaaccaaatatctgaggctgggacttcaccccagatgtttgcaagtaaacaagttgtggaccttagagatccgctcctctcactttctgactgcctcttgctttggtctgtagaccaatgttccactagtatttagttttcattctggttttaaaacggtttatctgtaaacctgtaatttaaacttctgataagcaaaactaacatagtaatgagcccattagaaagcaatcgtgagatactattagactttgataactttcaagaagctttattctatttttgcccattcaaagctaacatttttggcagttttaaaactgaatggggtttttgttttttcctaaatatgtttgtctgatgtatattatatcttattatggcaaagaaacttaaagtaccaaatagaatgaagacatatttgatattaaaataatgaaaaacattcaatatttgataacttcagagagactttgactaagcttcaaggttatttttataaacatgtactactggacaatgtatagaagtttcttagctcacagattttcactttggtagatgaggactaatgtgtttgccagaatgtgcacctcttctctatttaccgtaaagagaggtgtgggtaggagattgcacagtgtcacttagggcttagaggtgagggattttggaatagcttttagtttaacctgcgtgtgagaaaagaaggtttcatcgtgtggttaataggaattttcatatgataggaaaaggattaacaagatttaactttatattctcaataacttcccaattaaccagtgtctttgatgaggaaaaatttgaaaattatacagttgtgtttcttttcaatcttcccttgcacgattacaagacgatggaaaagtgcttacactttgattgctgttcctaataaccatgttagaatttcacaggtgatctggaatatcatatcttgactttcatatgtgggagcaagagtcagcaaacaacctttctgtgcttagagatgattttatacataaaataatattgttttgaaaatgaacattgatgggaactgtgtcatattttctgtatcatatttcatgttagctttattagttagctctcattacctcaccaaataactcagatttaaaaatatgtatcttaactgtgatcagcctaaggactctattcgatgatcaagtcatagtcaaatcacagtctcatctcttaatgtgttcctttgatcctcctcccaactctccctccaacattcataccaaatccttggatgtttctgcttagttcaaaaagccatgttctctcactatgtaaattataccaagaataccactaatcatatacgagaagctaacaatctatgcttgagttgtgtgttttttaatatcatgctttgggatatgatgccaaattggatctccaatttgcctttaattagtcagcaacacttatttaatgcccactaagctcagagcaaggcttggagggtggagaaggggagtaaggagatcgaaaaacaaatacactatcatttccagaatagttacagtatctttatgcatacagaaaacagataaatgaaaggatttagaaaacttaaaagcaaaatccaaatgagtgcaaattggtctgatacaaactgagctatataaatgcaaagaggatgcaaattataaaaacttgaagagtttaaaattgctatctttctacttttattttcataatactttgccatgagaattcttagatctcaggacaccatacccttcagtgaggaaagtttactggttcaattgtatgatttagagaaacaaacctaattcttagcattttatgggcttctgagagatgacgctgtaaaactttttgagtctctgttaaacttttctcgtcattaaagcttttatgtaaccttgaacaagttccttaacctctctgcgcctcaacttccacatcattaaaatggggatgataataggacccatctcataggattgttaggactattaaatgtattatactctattacttgtatcctataaaatatctttctcacagtttaatttcttgaaaattgaaacacatcctatgattgatgtggtaagaaaccattgtaacacatattaagtgacacctgttggttctttgttagtaggttagtagggaaaaaaaaagatgcagtttatagtcaaagccgtgtgtaaagtgtgtctaaagtgcttaaaacaaagcctgtcatacagttggtcttatagaatgatgctgttatcatcattgcctgaataccatatttgtggtatgtaaaatatttgtctccaatttcactggcttctgtcctatgaagcagatatacttatagttcctggtctttgagtaaatagagcctagaaggattatcagatattacacaactgccaaataatgacttacatcaaaccaagagtttattcctcttctcatgcatatcaacacctgtttaatctgatcatgttttcaaaaacccactagtgatctatttatttctagctatagctttcatcacctgtatttggtgatttgttgctggcagagtccatactcataacactaaatctgactactgtgattacaacagtctttctaagttagataccactaatgatattgattagggagaaggcattctttgtgatcctatttgcacgatctcgggtaattcacttactggacccaattgttagttgtgaaatgtgaatgttgaaagcagtgaatcttccagctgcttgatttgtgatatcactatcaatttacctactgaggagcttcatataaattggtcatttgtagaaagtagttcagtggctgagaatctggcataatattttatttttatgaaatttcagtaaacattattgagcaacttgtaggtttcaggctccacgatagggatgcaagcatgtaagacctctgtccagcaactgagaggtaaaactacaatgagaaagatagactggtaattcagatttatttttaaataatagctttttgagatataatatacttacccttcaatccactgactctggttttaaaggagatgattaatacattcactcaaccgatattgagcatctgatatgtgccagagacttcctatgtgctagggttatggagattgacaatagttatacaaaactgagcctgtcacaaaatgtgtatcgacagacagtcttccatttggtgctatagaccagtactcagggtcagcagagggtactctggaagcatattcagggacaaagcaaacctagtcttggaagatctgaggaagtttcctatgatcatgtctgtctcctgccataacaccctgaatgcatccgatctgaactaaactgaggtctgacaaacttgtaggagtttgcgaggtgagtggcttggggaaagtagagaggaagaagtttttctggaagagaaaagaaaatatgctgtggctctgaggtgaatcacatataatgcacaatagcttagtattgtgataacatttgggactgtgtgggcagacagtggctgcagggcctgaagggtggagagggggaacttacgcttcagtaggggtgtatatgtcttattatgaggtcacaatgaagattgaggtcagctagaggatgtgacattcgagttgggtcacaaaggatgtacaggagtttttcaaggctgaccacagtctaggcagaagaaattgcaattgtgaaaggaagatttgcgtgaaagaatggtgtttttggctgagtgaggaatttgaagtatctggaaaatggagtaagtggcacagagaaagaaaacagccaaataataataataataataaattggtgagggttcggagagccgcttacaattggattcggtgcaatgcaatgactttatatgttctgtaccttgtccttgtaggcagttgcaggcactagggacaggagtctggggggaagacaggagcattgaaagtttgaggaaaaaatgagaagcatgctttagaaagataatctgaatatacttgaattggaggggccctggattgtgaatgaaaattagaagtatgtcatctgtattgtgtaggatagtgcttatctacaaagaattttatgtagaattccccatcagattaaccctttgcagcaatagccaattatttctgatattaaaaattataattaaataaaagatatggattggtaactaaacatttattgagaagttactgtatcacttccacaaatcaattcacttatttttcttagtaatccaatgatgtagcctgtcatttctcccatttttcagcagaggaaattgtggcccagaaggttgtatgtaactcatcgaggcactaagtggcagaggtcatgtttcagcctcggccatctggctccaaagcctaaatgtatgaattggccactaaaggcacaactgaaaatactaacagtccctgtgttagtgaagagggatatttggcaaaaagtttttattttgcttttttacaattcagtgatttgtaatttatttacagagtcatgcaatcattacctcaatttaattttagaacatttaaaaagtccatgctcatttgcttcccattctcactctaaccctagataacctcaaatctactttagtggtagtcagtttgtatgaatggcaacttcagtttaatggcttttttttttttttgagtagtcacaatctgatagccttaatcactaattcaggagaataacattgtttgaccatatcatttctaacttctgcatgcaattagtgtactctattcataatttgatgcagagaagggtaaaagtgacaggccttgtggcagtcattggtcaaaggcatatgagtaagactgcctgagaccctaccctggagttctgtcttgcaggtaaggcacatagacaaactattaagcaatattggagaaagaaattattgtagaaatcctgatgtttttggtgaatggcttatgttaaacttctctctcctggaagtcattgaattgtttttaaaaacttagtatgtatgaagcatttggaatgcttggcattttgagaataaaatccacatcaatttaaaataaaataaaactccccatccagaatagagtagtaattgcaaggcataaaatagcccagctgtggagtggcttaaaggacaattggtctcaggcagagagtaccagataggacacgctacacaaaggactgtaatgtctcaattagtgtacctattgggtagcacatatatctgaaatggcttaaaataaaaattgcaaatgcaccagatttaatcaatcttagtatttccttctcttatgctctcagtccttagttaaaaataaaatttgcctgcctcattctcctgtgtgctagctagtaggattaactggagttctcaacaggaaagcaatagatctagtagacgacattgtatggtgggtgaaagcccgctagagataattatacagtcactcccactatattacccttcaaagaaactgagcctaatattctcctcctaagcaatttaaccaacttctaaaaaaaagtataagatattatttagagaatgaaatagctactgtatataatcaggaggaagaattatagcaaattatactcatttgataagtgtataaagagctacgctcaaagctttgtattgtacctcccaagtaattgttcagttgtgctaactgtccttaaaaaaggagaagagataaagaactgctaaagaaaaaaaaatcaatcattatacttgttcaggaagattttccttctgggcaaagattaagtcttatttcatgctccatgaggatcaagcacacatttggccctcccatgtttagtagtggtgatttctttgcctttctcacattcatgttcatgtataaacatagacaccaatataaaactaaatgcaataaaagtgtgttttaagatctaccacatgtatgtcctagtaggtatagatagatgttatatatctgtgttcactgcacttacatcccaatattttcagaagataggactgtatgcaaatgtttccaatatctctttctaggatcacaaaaaaaaaagagcccctgaggtctttctacttgtttcaaaaatgagctggtagtaatattagagccaatttccttttggtttgctttaaacaaaataaacagcccattatgtaaactgtataagacttaagtgtttgagcacttcccttagagtttgtaagtcttatgcccccaccatcaaaaagtaaacaaataaataataaaaagccaatctaattgttattatgagaagtcatacagcgtatttgctaagagcagctcctctaaagatgtcagactgccttagatggaacactctgtatcctccgcttgccagctgggtaacattcaacaggaagcttaatctctccatgcctcaattcctgacttcaaaattattgtagtaatacaatgcctacttcatacagttgcggagacatcagttaggcgctgttcctctcacatatgtcatcaattctgagaccgattcacatgcttaatatttctgactaattactgttacgtggtaatcatgacatagcggccattgtctgtacttgtacatcaaaatctgctgtctatggagattagtgacttggaagaaaatcctggagtcaatagtggaccccttttttattaagactcttgatggcccagaggtcagtataatgaggaaaacatagaacttccatgattttgacttgaaaagtaattcaaagggttgaaatttaaacgtaaagaaatttttggaatgctttcatttgttgcacttatattttgctttttatgtatgtagaggggtgacatatgataaaaaaactatggataattttaagccatttatttcaacaaacatgtaatatatattctaacgacaaagccctatgttataatttaaatggtagtaatttttgtttccggttttgtaatagctaatggtgtattttataatcagtagcatctttgatttgatggggtagtgtagtaagaactcaataaatgttagactcctcattaggatttgggtagaggttaatgtcggtagatacattattagagttaagggtcctaaggctttttaatgtgagcagagtgcaatgaaagaatattttggattgaccaaaagtctagagaacctgatttgtaactgtatcattatgacttactgaatttcattcagtaaatattgcatgaaattgagctgaaattcatgtctgctaaatatgtgtactctgcccttttctcttcattatgaggattaaattgaatgataggggtgtaagcactttgtaaatccaagtaagaattattagttaggatagttcaggtagtgctgtagtaacaaatacttaccaaatctcggtactgaaaacaagggtttatttcttacttatgctacttgttcatcataggacagaaggagttctttgcagactaatagttgtcatttccaacacttttgacctccatgccagagtaaaagagctctgagggtctcaaactggcaattccacactttgacctggatgtaatacatgtcacttcttatatagctccttagccaaaactattcacatggccctacctagccatagggttgccacagagcagagagctggaaatatgtggagaacagtgtcaataagtttgtaatagtaataatggttgacaatcattgtgtgcttcttagtaccaggcactgttgtaagtgctttagatgggtagagtcctttagtactcatcaagtgggtatgatcatgattcccattgtacagatgacaacccaaggcacaaaagggtagaccaacctgcacagaagagacagagcagggattttgcttgtgtgacattgatgtgtgtctcaaactataatggatttgaatgcattttttaaaatgtaaaaggaagatacaaatatagttgagaatcttctgttctgaaaaataagagatgaggtttggtgatccccaagcctccctaaaatttcacctggatcagccccaaatgacctacacttacaatgactgctgtgttcttttggcgcctcatcttcagaaaccaggggccctctcctggccactgacttacgtcgtagcttagcagaggggcattgtcccagcgtttcggtagatacttcctcctttgacttatttaacctttctattttgggagttttctaacgtgtagaagaacagtagagtggccacagtctactccattatcaatgatcaatacacaattaccaatacattctcaatcttgcttaatttcactttgcaagttaatctggctgcttgtcaagctgagctgtgaacacaaactgtgttcttggggttgcggggtatagagctcctaaaacaggaagccagtgaccaggggagggccagagaggacatgtggaggacagaattgaagggcttcaactggaaaagagggcgtctctaatcaatagtttagacaagtttgcaagtggaagataaatgatatgacaatatttaatcattcataggacattcttgtaatgtaagggggaaaaggagaaatatgttgttaatagggagccagaattattacctttctccgtagctccaactgtaatcttgcctgctattgaggtagttaataaaccaaagcctgtgagctctgttcaatgggacagcaaccagagaggcttctttccaagccctcccaccaggccaagaagcagctgagctggatagaaagcatgccttcagcaccctgggtttcctcttcagtggcatccagaggaccctgggtcacttcacctctctgtctctttctgaaaaacgtatataataaccgtctgggtgactcacaaatctattatagcatttaattaacaaatgttcctcaagtgctttgagctccctgtttggatagatgtgactgaaatgtaaaatacctttcactgccttatttattgctccagcgaacacgctatatgctggcaccatttatcttcattttaattttatctcccacaaatataggcattaatttaaatcacatacagaacataacagtttttatagaggcaaacttattccagtgtgctgcattttaatatcgcactttaccatcttttctcacttgattcaagaatagtatctcttcctgcctcagcatttaatcttaggacaacagaaacttttttgtgtgtgcatgttcttgctctcaaactttgtttctcactgctttgctgcttgttgcctgaaagttgttctgtcagtgtgagcacaggtgtaagtaattccatttctcttttgccagcttaatttcctgtgtgtgtgtgtgttgtgggggctaaggggggtgtgtaacatgatggattttacagctgaagcttatactcattcatcttcagatatcttttctaatagaaataaagacaataaaagtgataccctcctcctgaaatttacacattaaagaccccttcaaactgctcactttttttctgtcttttttttcattcagaggcaaaatttccccctttttttcatcactgttacgtttgcggcagatgagtctcttccttgaggggaatcgtggtaaatgggcctgctgtatttacagctatgaaacattccagttggctgtcacaccctaagcaaggaaggtttccccatccttaatttgcggcctgaaaagctgtggctctcctcaattaagactttccaaattgcctctgacatggcagcatattcccaggagtcaggtcctgggaggcagtaataacatgagcactgctgtataacaacgtagttttacaagccattttgtgctcttttcagaagctttcaggatgctttttctctgaagttgcaaattaaaaagaaaacaaaacttattttgattttttgtttttagttttcctagtctctgaatgtctaggtttagggacatctgtcatagtcttatttatttattttacgtttagtctggatttaaaatgtacaaattaatgtttaagttctctgttttattcctgtaacaatcctacaagaacaggttccattattgtgttcatcttgcagatgaggaaacaaggcctagagaagttaaatatttttttctgaaatggtacagctagtacgtggcagggctcagattttggatccggtccaccttaactaaatatgcttttgatgtagctctcttcaggctgaattcttgacctctcatttgatgctgactcttctcaaacccttagtctttgtgctactaggtagattttatctgtggcaagaacacggttaccctggaaacccactagctagaatggcaagccaattatagcaccaccgctttttttaaattaaattagcgctgctgatgacgtggacttcttgattgaagcatgctgagaaatgggttctcaccagttgttcctgcctcttaggatcatgtgggatcattctcatctattctatcaagccaaacaagaaaatgcctctatgtgattgactggatttgaggaataaaatgtgatgatcttttaggaccctgagctttcagtagtgagtagacatgcatggaaatgtttggaaagaagccctattggagaagaagcctgtcatctggatactttccacccccaagcacacaaggtccactgatttaaagccctgctcttaactactgaggctaatgttctctattttagtatttcttattttatttaaggccattggtttaaatccagacttgattcaggaaaggttgtagccctttgatattctttggtctttgcacacttctaatagggcaggaatttgctttagttcaaaccaattggtgcatttcctttaagtacacagaatttaaacaattgaattgatatggccactgttgaactgagtggtaccaggttggaggaaaggacattcattatatgttagtgggttgtgggctcactctctgagatggtaaacggtaggctggtagaatgttgagtagttcattctgcataacacacatggcgccaggcacattacctagtacctctatgattttcatccgctttattttctgttttgtagagtaggtaaaggtaaggagacgggcttgctcatttgcaaggctattctgtgatgcagggttctgagtacaggattccttatttgcagtccagtgctcttcactttataccaccaagtcaccagagtctcagggcctgtcttctgtatcgcagaaaacaaatcaaggattagcaacactgaatcttaattcttgaagttctaacaggaaaattatgttagtcttgctacatatcgtaggcatattttgtccaaaatgagagtaatcagggaggagaagaggctgcatcttactgtgtcctgatgggtgatacttccgtgactatctccatcaccagtgagcagatttccagaagtcatagttcaaaacgatgaagagaattacacattttcagaaaacattgtacattctttgttaacttttccacttgtaaaataatttgttttcagacatccaggtcctttctccatgatttactgcgttggtgacattaatcagcgtggttatcttggagcctcatttccccttgggtaaaatggaaggataacattggcaatcatacagacgtgttgtgtagaaaggagtaagaagcattttggaagtggcaaagtggcaataatcccctgtaagacagtagctgtttttaagatcactgagctctcaaacactggctttttctgcctcacactttctagatttgtaagacttaatctgaaaatatctttgctattcattatgtataattgtagggctttggatttaaaaaatcctaattctgttatttccctgacaatagcaaattattctcatctaattttctcttatgtgaaataagacatacaccctagttacttccatgcctaatatgattgacaaatctatatgttatctgaattgtgaatatattttcatacatatagaagtacatgtgtgtatttcttgaaatctaatggtcaatatacactaaccagttatttctgggattttgggaacaggcttctttctatacttctctacttatctttaaattttctctaatgagcctactttgcttttgttttacatacagtaattaatatatttataaatgtatgtatactatatattttaataaatttatataagtatatgtatgtatatacatatgttttgcaagtaaaaaaactttagtaataaatatctacaaaggcaatgagagctcgtccaaannnnnnnnnnnnnnnnnnnnttgtgttgtgttgggggggagggggcgcgggggggcagcgcgcgaggggcggagcgaggacgcgaggaggcggacacaggtgacgccggaacgagacacggagcgaggcgccggcagcaagcgcccatcccccgcccaaggcgcttgcgcggtaagaaaaaggggtgctatgcaaaacgcccaacaaaacgggaaaaatacgaaaaagaggccacgcagcaggcggtatgcatcccgaagtaaaggagttccaaaatgtaggtggagaagacagagggggaattcagagcagttaaggcatgtatatacaagggctggcaaggaaaagaccccgtagtagttaagatcacggaaggcaagtaataagctagtacagtttatctccctcccttcctttcgactgattccctcctctcctctctttggttgccatccttccattgctcattcgtaccctcgatcagtcataccagcgataagaaaatgccttgcctccctccctccttcctcccctcccctccccttccttcttctttcttgccctttctctctctctcttttcctcacccccttctgtcttcctctccccacctccatctccctctctctctcctccctccctgccgccttccttctttccagaaagtcactaaccagaatctttcacagaataaactgtgaaacctagatcttaaatgtactacagtagaaaaagagatgagatttttgaaagatgatggcttgtccttgtctctgtacttgaatctatctcaaaacaaagatataactattgtttttaataataatttcaatatagagtgaccatccttgcctactaccctgaagagagagagcatttacacataagactggtggttgcagtaaacccctttcaagtggagtggccactatggtccttcctcttcccttccttcctttcattcccttgccctttccccactttccttctcttcctttccttttttcttttaaggttcataaaatcttgattggcctccttcctagcagccaggagtttgggtccctaatagctaaagcttatatactttattttcttctttctccagatggctgtggctatgaattttactccccatcccaggactacccctgctatactgacactaattttcattttataatactgtcttcatcagtccatgctatgctactagttttagttattataatattaacttaatccacaatgaaggcgacaggtttttttgtgtgtcttactttttaaaggggaaatattatctctcactttaaggaaactaactttagcaactcattccctcactttttttttttctttcaacttgatttgttcaactaaggagaccacatttagtacttgctagctgagacttctgttctacaattctgagttagttcctcatccgtccgaccctctctccccgtggtgcactgagtcacaatgtgatcaccagctgcatgtgctgctattacacacaacacattggctagcagaggagccaggattcagccttggaagtactttcaggcaaaggtgaagaccctttccccactctaagcatctttcagtagtttagtgtagctgatattaatgttataaatggtcattcctaatcctgtctcagttccagcccagatggagttttgattttagaaaatcattcagtgaaatgtatttcctgtgcctggtagtcattgatcacttaccaaaaaaaaagggggtagtgggagactaaaaataaacttatgataattcacatacacttaacctttactgactaataccaaaaagggaatgaagcaggctctgctgaccagcacttgcagatggattccaggaacgtggctagagctgccaaagccatcgctgaatcctgccaaaagcatcccaggggattttactaagggtggggagagcagggaacatggaggtgtgtgtgtgaatttgttttaaaactctcttactcaacactgagcagtgggaagaacactgggaaaaaaggtcggaaagtgacattctagactgggttccacccaatctctatgacactggaaaagtaatgtgtcctctttggaacttcaggtatcatgtgaacaataagggtgtcatattaaggtcttaacatgttgaaatgttaaaaacattctgtaattacttaaattatttcaaaacagaaagatcatacatgttcatcatgtttctgtgttaactggacaaaactacactaaaattaaagagcaataaaagcaatcgtgttaaaattttatttttaaatatagtacttctagtaactgaatatctaactttattaacaattctaaatctcgctttttttttttttaaaccccagtgaggctgggcaccgtggctcacacctgtaatctgagctctttgggatgctgaggcggtatgatcccatgagcacaggagtttgagaccagcctgggcaacatagtcagatcctgtctctacaaaaagttttttaaatagccaggattagccaggcatgatggcatgcacttgttgtgtcagccactctcattgggggttgggggggttgggggtgggctgaggtaggaggcttgcttgagcccaggaggtaggaggtcaaggctacagtgagccatgactgtatcactgcactccagcctgagcgacagagcaagaccctgcctctaattaaataagcaaatacacacacacaacacacatatataaaataaaataaaaaccccaatgtgttaagatctcaggtttaaacctcggcttatacaaaccatagtactaccgtgcaataactgaattgacaaggtaccaacacctattttaaccagaaaaataacataattgtgttatattttccatgagagtcatactcttgaaattaagtattttctcaatagaattgtttctcaattaaaaaaaaaaacttactcaaaacatttagtatttaattataattataggcagataaaatttataaaagattatcagtaagatcaagaacctctgcctctttaatcatgtttttctctaccttttgctggtctcttcctgattttgatgacctcattgtctatacgagtattaagacatttggggtagctttttatgttgtgtactttctttccttctccttatgagatggctgacaccttctaaaggattcagagagtttccatcttattgaaaggtccttatgaaaattcactggtagtgttctcagcttatactaggaaggcatgtttcttcagaagcagtatttgttgtatttagggtgggaatcattatgtagcaagagtggtctacatattggtcttgcagcaacatcagcaccccttatgaatggtttgtttcccaccaaaagtcaaagattagcctatatgatggatgatggctacagaaaatagtgccagaaaaacagaatcagtagaagatatatattaagacattaattgggaaggagtagcttgcatgattttgtgggctggctaggcaatctaacatctacagattaggcaattaggaagggcaggctgtaactccgtggcatgagatgaagctactcgccacaatgagaattccttcttctttaaggaatcctcagctctacttccaagacctttcaactgattgaatcaggctcaaccaggttatctagtgtactcttcattacttaaaaatcaactgattagaggctttaatcacatgtacaaaacaccttcccagccacatctagattggagtttgattgaataaatggagactttagcctgaaaaaattaacacacaaatggaccatcacaggagggtagtctttttctacagaatttaaatctgtggtagagaagcaacagatacctcagggcaaaaaaagtccaggaagagcataaaggttcaagcagaaccatgagaatgccagcattgtcgttggagatggtgactggaagtgatgataggtctagggaacagtaaatgtggacagactggcattttacctcgggcacacttggacctggataggctccaccagtctgccctggaaacagaaccacagtgggtcagacagtcttttgtattagttttaaatacagagttgattgtctctcttgcattcttaacttgcaatttagtactgtttatattctgcttgaaggttagagacattcgactaaatggtcttttctccacattgctgtcattcattaatgtcctggtcctggactttactcattgaccacaggacaagtggctcaactctctcctgccactacccaggctgttagtcctgttgggaggctcagggcccaactcactcatctgtaactctcatctccattcagctgcagcctctacagcccctggttataccctggatcttatcattgcttcgctctattttacctcctaaatcgtaaaaattaaaaccagcctcggaacacaacccctcattcttccagcactctctctcattcaggtaactcctattctacttttcttcagcatatttaccttctattacctttctttttcctcaccagtctcttatatttcctttattatccaacttacagtctgtggttcaatacttcagccgactcttccaacacatgaccttctttcggtaggcttttttcagagtttcccttttgtacttgcccttatgtaaatctgtggcacagtcaggccatcttgccaacttttcacagttattgcacaccacactctgttggttttcttcctaccattctgaacaatttcacttcagggctctccttagtggctcttcgtctccctctccttgaatgtcgttttacctttttctttttcttttttttttttttttttttttttgagacagactctcattctgtcacccaggctggagtgcagtggcgcaatttcagctcactgcaacctctgcctaccaggttcaaacgattctcttgcctcagcctcccgagtagctgtgtctacaggtgtgcaccatgcctggctaatttttttttcttttttcttttttctgttttctttttattagagatggggtttcaccacgttggccagtcttgtctcgaactcctgacctcaactgatccacccacctcggcctcccaaagtgctgggattacaggcatgagccaccgtgcctgggcttgaatgttgttttcctttggtggggcttggggaggggtgtctttcctagggcctgctcttgtttcacttcccacatttggttaagagagcctttaactactatggcctcaactatcagctctacaatatgatataaatttgtttcagtaaacttgctcttcagattcaattgtttctaactgcttatcgctcaggtgcatttggatgtattgcagaaatctcagcctcaatgttttcaaaataaactcatccacttctctcaggaattttttccactccaatgttgttcggtatgtggcatcaccatctaaccagtttcctaagccagaagtttaggtattatttctaagccctctctttcccttattatcaattttacctcctaaatatttcacaatctttctacttctcctcatttctgctgcggtacgtgatttcagatcagcatcatctttcatggaccattggtgatatccccctaacgggtttccttgtatccatttccccaccatcgccccaatctatccaccaaggctttcctaaaatgcaagtctgactgtattactttcctgtctaatatgttatctccttattcctgtagtataagacagtgattaggaaaacaggctctgaagtcaaatagaaatgagtttgaatctcatataactatgtgatcttggacaaaataaccttttttggtttgttttccacgtgcgaaataggaacagtaattgaacttttctttttagatgttgcatacctctctggtatacatgaagaagatgtgtagtatctcattcccaccccgcttatgcaccatgctatagtcacacactgcctttgctctgatccccagagacattgagccaccactggagagtcacatgatattgtttttagcctggaacattgttcactacctcagtcttttattgccttgtctcaacatagacgccatttcccttaagacattttcagcacactcctctggtataatttagtttaaatgtccttgctgtgttctcctgtgtttttctccttgaacttcctaatccttacaccttccaccctgcaaatgatcattatctcactgcctctcccaaatgataacctctttccacccattttaagttccatgaggacgatgaccattgacccggaccgcgttgttaaacttcttagtctcagctgccaagagcttagcacagtgtctagcagagatcggacactcagtaaatatttgatgaatgtttatagtgtgactgtctcgccagtgcacatacaacaaagtgatcccatctttccttctgtatcataaaatagaattttcttacctctgtaatttctccctaggaaccagactgcttctagagagcttcttcacaaaatcaaattaattggtattttacaaggagggaaagccccaggacaagtcccttctcttgaccacaaagttctgtgtttctcatctttcctcttgatgtcttggtttcagcaaagcaacatttctatccctgccccctgctcccccataatcctacaaatgtactatagatatgtgtaagtactacatccccaatcaagtacagcgtttggcctcgggtgggagtcaaacagcaagctgatttttaacattacttggaagaaattttctaggtatataactgacaaacattcatggagagctacttcatttttctgtcaagcttttgggggattttttttaatagttctgcactttgaaagaaagttcacaatttttaaaaggaaatgtggcccttttcattagctccttttacctcatgctgagtcatggatgagagagaatttgtaggcgggtgagctgcaggaaaagtaatactgtcatttacacttgcaggctgttatgctttccagaaaactttttccgtaggttgcgaaagtgattaatctgctgttaaaactgacaaagaaggttctctgataagagaaagaattaaatgaggaatttttctttaaaaagtaagcgcttctttcccattttagattagaaaaataagtttaaatgtttcttttaattttagtcgtgtgtgtgtgtgtgtgtgtgtgtgtgtgtgtgtgtgaagttggccatgacttaatacaatctcaagccattttctatttaaattatgtttttttacttattggcatggcttattcctcatgctgtatatctaaattattcatttctacatcctgttcccttgcttgtctctctttcttcttctttttttttcctttcattttctttatttgggtcttttcaatactttcaacatcatcttacttcggagccccagatctcttcttttctaccaaccttttttgaaacattaaaactggtgaagatggcctgagttctctctgtgatataaatttatccctccctgaaaaattccattcatgtaacatttttataacactttttaaaacttggatgaaagttttttcatgtagttgaaatgaagcatcactgcctaaagcgtttagaaatttttttactgttggttttaagaaattactctaggatttccactgaggactggcaagtattggtgaagtttgatctctcagagctcatgtttcagatggcaacttaaagggacaaataaataagtcaatcacacggcataatctaactttaatatgattctgcagagaaccagtgactcatttagagaaatcagagtcctcagaaaggtggaaaacatgttagaacttattaagcttgttgcctttagcatgtcaatgccttgtttttataagaagattcaatgggttgttaaaatgcactgtcttaaccctctcccctttgtatttttctactcttaagatgcatcattttatgttgggatctatcagtttattttacttgtttttccttcttcctctccttattttgaaggctgacttctgagcttgagccatatccttggcaactgaatgaattcatggggagtatagtagaaaagattttctcacaactctgacagcactgccccctagtaaaaaagggaagagacaaagagaaatggtcccttctgcaactgaagggaccagcacaggggacttggcattcttcttttagtcctaaagcttagacatacatactgctttcgcccctgggctacaaatacatgttttaaaattctgaagttgaaaacgtcaaaaccatttacaattaaaaacctgctattactgtatatttatacaggtatttcataagggaaaaagtagaaaacatgtaaatgtatttgttttatgtctgaagttccaagattatttctgtttctttactgaatgtgtttgaaatatatgcaaacacacatgtaaacatacctgtatatttatgtacagatataagtctacatggagaccagcatttttagataacactgttttacaggctgtgcatccatctttaaggtgctatagcataaggtctatgactgcattttgtaataaaagatggcaggctttctggaaagggtctctttggggcaggaagaggtgtgaagatcttttgcattctacttttaaagtacaacaagttaaattgctaccagatacattagctttatggaggtttgtttccatttttatagcaaaatcaaataacttttaaatcagaggaaaaaaatattcttttgttgtttttatttttgttgttgagattgcctgttttacgttgagtgcagtgtttttcaggtggaaacatattggtttgacattttaagaggaaaatgttctatatgtaatatgaaagagtctttttcttaactaaatgccagcaacaaaatttaaaccaaaaaatgtagtaatgaaacaatggtaatgagatatgattatggtttagtgagagaaaaaagccctgcagggaacagtacaagcacagtaaattatgaattgctactaaataggcctcattagtccactgtggaccatgtttaattgatattagaaaggagtctggaaaactttggaaagtacatgtaagacaacttgctgttaaactaataaaagtcgttagagtgtctgtttcaaaaattagtaattattaattgtgtgtgagggtcctcaggcagcacccattttactaaaacatgcttagagaaaagatatttctatgagaaatgaaactgcagaatgctgagcagtgcaatatgtgacagttccctgggagtttctcccctcctcgtaggtatttttagcaaaatagtccttaaacattgttttttttttttttttaagttggagtctcgctctgtcgccaggctggagtgcagtggcccgatcttggctcactgcaacctccacctcctgggttccagcaattctcctgcctcagcctcccgagtagctgggactacaggcacgcaccatcaggcccagctaatttttgtattttttagtagagacgggggtttccaccatattggccaggctggtcttgaacacctgacctcgtgatcctcccacctctgcctcccaaagtgttgggattacagacgtgagccaccgcgcttgccccttaagtgttgttttaaagaaagttggcgctctactgaagactggagcccaagaagacatttatagggattgtttattttcatgttgttactacactccatggtctgcaaaaccagagtgccagatgttaaattctatcagcataatgcatctttaattaaatattatatacgccatacaattaataatgtggtctgtttccaaaactttattaagaaattaccataattttgtataataggctaataaaaaggcactgtactttgaaacagcctttcgtaaagtggttatatgatttgtatctgttgaatttggaatttagattaagagattgtgggccagaattatctgatgcaatgtactcaggactttaaataagttgcgaatcttgtagggtctactattatttggcttcctttaaaataaaataggtttcttatttgtcgatgagctcactctttaagaggtttagggaataacttacctactcgctttgtgtcccccaaccctactttgtaaaaacctcaaacaatacaaaacatgataattccaaatatacagtacattgggctatgatatttcttaatgaatggaaagtcatgcatctggttctgtggtcatcattgatgttttaattttcacaatgtgttaacctgatacttaaattcccctagttgtcctgtgaagaaagaattttaaattcacatttcacatgcagacaaactctgatatttaaaaataatagttatcttttaaactgagatcctatgtggatatggaatagcgtatacagctctgacaatagggcttcagtaaaataacattttgcaagctgtgtttttcaagacaaaatgtcaccctcagctaaacagaagtaatttgcatcagaggtgtgtgtgtccttactcttaatgaaaaaacggtcccctctcttcagaaagtatttgctatctctacaatgtattattttcatcactgtgtccctcccctgcccttcttatgccctaatatttgtcccttaattctattaaattagttgtcaactaaaattaaaggtagatgttatccttcacaatctgtcctggtctaatttttcagtcttgattcgtcttctttactttatggagtgtagaggtggctaacagaacaactctggagccacaatgtgtagattcagataccaacagtagcttatgctgaaacctgggtcaaattacttaagctcacatacctcagtttcctcatctacaaaatgaggataataataggttcttcctcacttatatgtaaagcatttaaataaggactagtagatcgtatgtactagctgttattaaattctgccacatttgtttgttctccatacacaccttagccttttgtctatgtctctgttcacattgtttgctggaaacaggatccacccttctcctccaaggccagtgtatgtgtgtccacaaacacacagccatccatgtgttgtgattccacgcacctccgaagatacggctcagagagccaccctctgcttgccagattgagcatagttcatctggaactttcatacacttctctgtcttacttagcatttgcaactatactttatagttattttcaagtttattttgcctcttttgctggtgtgtgaacttcttgagtccatggacttcctgtgataaatttctccctactacaaaaagctcagtgccttgtgctgagctgctgtgcttagtaatagataggggagagggtgtttttttatatctatatacatatatatgtacatatatatgtacacataatttgatatacttttgagtgtacatgatgtggttccttatttttgcattaagcctatcacttccgggcattggcaaagatctgaaaattaaaaggaacacaaataagaaatgcatttagtccatttaagcaacatgtgagttcctcttactgagtttcttccctaatttagatctcaagttttgcaaaagaatgacaaattcctttatttaaagaaaaatgaaagcagatctgttaccttctgtcctatgaatgccaattctctatcctggataattagataaataagatatttataagcgtatggtttatgcacatagacatgaagctctcaatgcctgcatgattttcctgtcatgctcatgtgggttaaagcccaatagatgtattttgaaaactcgaatgccagtatgtctttaaaaagattatatcctgaaataaagttttaacatcctgtatcctatgataaaagttattttgcatttttttctttaccactgaaaacttgcgaggctcaaagtagtttaatttttatatattgaagctactcatttgccatattttaaaaacaaatcataaaacatggtaattggtaatttcacaaattttatcagggaatattttattattacatttttaaaataaaacctgtagatttatttaaaaagcatattttgaactaaagacctgaaatgtgtagcttgtgtagctccatttgaaaagatgaaggttttgctattgtttgcaacagttttgcctgatttttgttttccccttttgctctgtttttgtagttcagtttgttgcagcattgttgtcatgtctaatttttgtttacgttgcactgcacagcactctttcgtatacttaagtaacctttcttgttctgcactgctgaatgacagctcatttattctagggtggtaattgcagtgtagcagacccaggtgagcaatgtaaaaagttgaagcagataaaatgtatgatttcttttataatggtattgtgtgctgtgttctcctcatatagatgctttttgtttacatagagaatatctaggaacaatctacatgttcttcaagatcttttaaaataaatactctttcatttttaaaaaagatgtattcttggccaggcgctgtggctcatgcctgtaatcccagtactttgggaggccgaggcgggtggatcacttgaggtcaggagtttgcgaccagcctggccaacatggtgaaaccctgcctctactaaaaaatacaaaaattagccgggcatagtggcacatgtttgtaatcccaggtactcaggaggttgaggcaggagaatcgcttgaacctggcaagcagaggttgcagcgagctgagatcgcgtcactgcaatccatcctagacaacacagcaaggctgtgtttaaaaaaataaaaagacataattgcaaaagaagtatttcacttcaccctttattataggacagaccacagtgcaagcaagaagataaatggttaacttacaactgacctctgattggagaatactagagagtggtgaagactgtggcaagcaggagggctcaccaacctcccagatttaacccaggctgcatgtaggaatgcagacccagtgttgctaggtctctggaattaagttatatttaactagcctgtgatctctaaggccttcaattatgaggttcagcaccactggaaaactgagtcagtttagtgctttatttcacaaaggcaaattgatggtcctttctgaccctaaattcccagttttacttaaactatttagacaaatctaagaagtgtgtgaaataaatacagtggagcttgaggatttttgttgttgatttctggtccttttatatttcctccttccctctgagggttcacataggagcctccacagccagaggattactttcagaatggaggcaagattatttcttggaattttggtctgaggaaaaattatttaggtcacttggacacttatgttgtgctttcccacaaaattgtctagcattttctttaagacatatgcatgaccactgcccaaacgaaataaatcaccctttctcttaaaggatccagactattaaatatgaagaacatcaactaatttgactagcagaatgtaggccttcagtgttaacatagcctttttctgttattgcatttatctgcctttgttctgaagccccagtctagtacctttcttaatgcagatctctttgagcataatgtttccattaaaccagccagtggatctcatttgctccatacatattcatattaggaaatattattgtacaaagtaaaagatgctagtaaaagatatgctggaacaacatttctgacagtatttgttctgtagttaatgctctgggagcctttttccttcaaactctctattcctagttagggcctcatcatttcttgcctggattattgcagtagcttccaggctggcttcctttatgcccttcataagcatatggctgccagattaatatttttttcaacacagccctgatcctgtcattctacaattgagttcctcacagtctacctgatacagagacagaaggaatgtgataatacaaataataatggtactcacaacaacaataaatgactggtctttgatatttaatctctaatatcaattgtcttgagacaacaaggctttttgaattcaatatcagagggtttaactgtgaggtacttggcatgggtctgaattgcatgtatattgtatgactgattgaaagaagattatctgatacacatgagaagtgtggaggtgggagctgacattttgttagaagtgcatgcctggcattttgatatactattgcacctcctcaaatctttttaacagaaacaaactactttgtgatgatagaatagcataatacaggacagcggaaaaatcttagtgctttttgttctggttttgattttgcaactaaatatgtatgataaataggaaattagtgcattggagcatatgcatctgttaaagcagattgactgcttggttatcacactataaacaacatttttgaagaattttaaaatttataatctctgatataatgttaaatgaaaaataagatacaaagccacacataaagagggttcacatttaagcaccatcacctatacaaaacacacacgcacacagtcacacacacacacatacacacagtcacacacacacttacacacagatacaagtatacatagaaatacaaaccatgaaaataaagttaccaaaacagttgttatcactaaagttttgaatgagtgttttttatttctttattaaccttgttattacttctcatattttctacaatgagtatcactgtttttagttttgtttttgttttttaaatggagtctcactctttctcccaggctggagtgcagtggggctatcttagctcactgcaacctccacctctcgggttcaagcaattctgcctcagcctcctgagtagctgggatgacaggtgcccaccaccacgcctggctaatttttatatttttagtagagacagggtttcactatgttggccaggctgatcttgaactcctaaccaggtgatctgcctgccttggcctcccaaagcgctggtattacaggtgtcagccactgtacccggcgtatcattgttttaatgaatacactgtcttacacgagggcttgcctagctctctcaaaagtctaagaaacaatgaataatattattttatttaaacattatttaaaaacatgaaaacagtgaatacaaagttgaactctcctcttacaataataaaaattcttcttgaataattctgtatcctaccattccatgaattgtatccatggaaaagtgtatgtttttctgattcatttatttatttgcttctaggttattggatgaagaaatctaggaatagaatgaataactgtatagattacacctctgatgcctggtgtgtgtgtgtgtgtgtgtgtgtgtgtgtgtgtttcttcccttgtgattttctctccttttcctgcctaataatgatgtagctgatctgcttatcatgttcctttatttctataattccaattgttgtagatcccatagaggtgttcactcttgctctctctctctcttctctctccctctcacacacacacagattaaatagagaaaattaagtaaagagaggaaaatgaggaataatttcatactttaatatattcattcattcattgctctttgataatttttttcttttttaattttatttttccctaagttattggggtataggtggtatttggttacattagtaagttctttaacggacatttgtgagatcctggtgcacccatcacctgagcagtatacactgcaccatatttgttgtcttttttcccatgctcccctcccactctttccctcaagtccccaaactccattgtatcattcttatgcctttgcgtcctcatagcttagctcccacatatcagtgagaacatacgatgttcggtttcccattcctgagttacttcacttagaataatagtctctaatctcatccaggtcattgcaaatgctgttaattcattcatttttatggctgagcagtattccactgtatatgtatacaccgtagtttctttatccactcattgattgatgggcatttgggttggttccacgatttgctactgtgaattgtgctgctataaacacacgtgtgcaagtatcattttcgaataatgacttcttttcctctgggtagatacccagtagtgggattgctggatcaaatggtaagtagagctctatgatgttttgatactcttctatggcatagacttagtgctcccatgttctaagtgttatgaaaggctgaagataggaatattagaacatggcccccttcctgagttatatagcttagaacaatggtactcaaacttaagaatgtgtaagaattacctaggccatagcacttacacatggaatatcaagagggagaacagactaggagaagacgtttgaattcagctgcccatgtaaagtataaagaattatttttacccagaatcttgaaggggaaggaactgagtcacacagacaagaatgtgcctaaagcaattcagcagttcagagtggaatgaaaaggaccctggttccctgctcttaagccagtgttctttagctggctagaactcagctctctgtttaaaaaatgaatgggttgcagtggagcgctgtgttccaagtaggatttgtaagacttctggaattctgaaaaaattctactggttttctgcctgtttctctgtctatacttgaattcactgaggccaaaaatggtaactttttacccagtagctggcaacattcctggtaattagaaagtgatcagtaaatgctcaatgactatctgaatgattgcatttttcaaaaagaaatctgaagtctaaattttgagccaactaaacatcatatttctttggttttgggtggtttgggaaaaatccaatgtgttctctgaaaggaaaacatatttggagatatgattatttttttctgtaaataaagttactttgttgtaaatataaatatacatgctcattttataaaagaaaatgaaaggagaaaaaagagcaaaatatctgtattgacaccactcataattaccactcataatttttgttttgtttttcttattcacatataggacttttatcatgatatatgtatgaatttatatcctgttatttttctgaaacattatagcataacaggattaagtatcctattacctctacagttcctgatatttataaagataaattatgaaaataatgtttgaatgagaaggtttttctgtttatatgctgttccaaagaaccttaggtatcagaatttatctgagcccaaaaacgtcccttaggtaccttaagctacccaaattctttgaattctttcaatcaaatcccctaattttataaagaggaaattgaaacccaagaaacaatataagtgaatttgtttgaacccaggaatttcagtacttgttgtcctaatttaaaattgtgtcccaaagaatatttatctttgaatttgttgatgtttgctcttttaaaaaggaaagaagaataataaactaattcctcgttttacctttaaaaggaagtttcactggaggaataagacccaaatgaatgaacccccatcagtcattcgtatcccccagctgatgaggatttcagcagttgtgctgacaccttgatcttgggctagccaccctccccttgctctgccatggagcttggtcaccttgtaccatggtcaaaataatggtgctctctttcaaaagccatccttagatttccagctaatagtgtgtagaaaagagaaaacataattttttagtaccccaaattctaggttatctactgcactgaatgatctaaaatatcaagtaggcgctttcagcaaagctgttagaaatataaatagaaaaaataggaaagattatttgtgggaccattcaaactaagactgttgttgttctcattattattgttgtttttaaaggacactgtccatatattgcaagacatgttgcccactgcccttcacctatgggattatataaacgcaatcctattttttaaatagttgtgcagaaaatcgagaagggagctaccttaactgtgtattcagttcttgagtgacaaagacaggcgtgagagagagagtcccttgcttccaaatcacccctcctttgcctcacccttttcaggacaaaccgactaccagaaatgaatctaacccatgtggtcactacaggatttatctgggcatttgctgaacctgctcgcaatttatttttatttcttccgatagacatggatttggcacaggggagtgaattctttttgaagcagcagatgtgcctggtacacccgtttgctgtaaccatttgtgctgtggttgaaaaaaatttttttaagagtgcagaattgttgaagggggagggttaaaaaaccagagccattttagtgattatgcaaagttagaatgtgagtaattttgctgcagttagtcattatgtgctttcatagcttgttttacagggataaagggatgtgtacaggtttggtgaatagagctcttatttgttcctaatagtcactcttcatgaaaacattttctacccttcctcctactctgtggcaaaagtgctctctccttggaaattatacctttctgggatccattccttttatccatctacaatcagtggacagacaactccattttgaagaacaaatacgttagaagaagaatttttttctcctatacaatctacagtgtaactgatacacattcaaatcatcgtaatacagtgatcattataaaatgagagtgttttctgcaaagaggaaaaaaaaaactgagcaaacatctagtgactttgttaggagcttaatgtgctctaaatatgatgtccttcaaatattttatttgaaatatttgataggtcttagaaaattttgctcatggaattctctgagaactgtaacacaccacctattcctttttcgctttgctttcggtcacccaaatttttttagaaatatgtgaacgagggtctgtttgtttccactgaagcaaatatagccacttgctcacactggtggcttcttttactgaagtccgtgaatatgttagaaactcttgtatgaaaatacagcaacccaatttgtccctattgagcctactttgtgatttccatgccctgctgcctggtgtgtatacactgagatccactttgttaaagaacaaaactgggtttgttacttttttgtaggcttattattaagtctgagcattctggtgtgaggttaggaacgctggtttcagactctggaaaacagagttctaatcctgaccctctgaagaccttctcactttgggcaaatctttcctgagccttgtttccttgaggaaaatgtagagatgtgtgatattcacatttcttacgccctacagttatgtgaggaatactgtatgtttcagttatgcacagataaattagttatttcttctcaaagaatcctctgttaaaaattattccccaaatagctctttttcgacacttgtctcaaggtggtcacattttaatttctgccactgatacacaaatttcagtgataagaaacccctgaatgacttgagagtttcctgagagatgggatcccacctattttattatcttttgtctttttatggcttccgagtagcagtaaaagataggaatggttggttctattacagtagttgattataaccaaaaactagtgaaccacactctccaaatgtcctgctacctacagctaagaaacccaatgtttataaactaactcagaacttttaaaattagattgaactacagaaccctctatcatacttaaatcttcttagatgaatggtgcacaaaactgatgggggatgggaagtgtgggcaattctgttaccgaactatttcccttattgtttcatttgattaaacacttctctcttgtatggaatttgccaataatacattattgaaaaaactgatttcaataatatgttattgaaaaaactaatttattgaataaaaacatatggaaaaatctctttgctagaccctaaggatggaaagcccaaatttctacccacatggagtttagagaggaaaggaacactaaataagtaattgcaaaacaagacgtaagggttatcataaggataatgcaaactattaaagagacattaatggtgggcaccttgtctaattttggaggttccagattggcttcctaaaggaggcatcatttcgtttgaaatctgaaggatgaataaccagttagaagttgcgagatggaagcaggttggaaagtgttcaaatcagggcaaccacaggatagctggagtgttgactcctgtgtagaggaaagtaagagaggaggctaagaagataaacagtagttctatcaggaaagaatttggacttcatggtaagagcaatgagaactcttgagagattttaatacaggaaggcaatgatcatatttgagttcttaaaatttgattttagaatagagtacgtactagaggacaataagcagtcagtttctttaaaaatacacatatacgtgtgtatgtgtttgttgcagtaagctaggtcactaatcatagtggactggactagggcaccaataagttaatagaagtagaaacattgacggtaactagtagagagaattaacaagctttactgcatcaagaggagaaaaaaaattgtgatcacgtttataacatataatcacattgctaaaatctttaaaatatctgttaaccttgaaacataactgatttatatagtttttgtcaatatacatatgaaccattatcttacttttcttttaaactggtatttcgaattaatgttttctggctttccagctgcataccattccattagctcaatgttctaggattttctcaaccatcctctgatttttcctttaatataaacaagtaaaatcacttatgtgcgttttaatagctcttcattgcaagtttgtccaccaaaagaatcatttcaattttcagtgctaccagtcatataaaaacgcacctgtaatattcccactgggattgagttttattatttcttgcctaattggttgaactcacagtatttttcactaaacccctggcctgattggagaaaagtgtctggtcccttgaggagatgcttcagcaaacgaggtcgcttgttatggaaataggctcttctctcactacatttctagatgatagaacacactcagattgatttcaccttcatcacaatggcattttatccagtgctggacacatgcatgctaagaactgagtgtactgtatgggtatttataatacccatattcattctaggaaataattatacatggctgggtatttacataaacaggagccttggagacctctcaagttcaaaaccgatggcattctatctcatttgaaagtcattggggtgggagaggacactccttaaaatattggatttcttagttttaatctgatgatatgctagctttatgaagatgtgagtgcaggccctcacctggatcgttgcttctctttttaataggaactagaaaatgaagattttcaaggtagcatctgggtgctcctaattgacttgattttatgtttgagaaaactaccttgacataccaacattggggtctctagaagtccagggagatgtttttcttcacagtgtcatataccctatcataagtgttgtgaggattaaatggaaaagcttctgggacaaaaactgctctgaagtgccacaccagactatactgttttaactatttctggctctgaagctattaagaataacccgtcactagcagagcacaaggctgtgaaatgaataagtgctgatacatttcaaagaagtaagatatttatgtgtgcatctctctggcaaaaactatcggggactcgttaggggtgtgtgtgtgtgtgtgtgtgtgtgtgtgtgtgtgtgtggtgtgtgctttatgtgttcattgaggactaaaaattagtattagtagtatattggcagcaatgttttgaactcggtggcaccaactaaaattgtgtgatttttatttcgtgcataatatttgagattattttaactcatcaccagatttcagctactatttatcctcatttataaggttactttttttctttaatgtggaaaataaacaaaaacataaaatggagaacaaaattttctcttaactgcctcacctagtgtaaaactgtaaccttttaaaatacattgaaaccatttttaattttctgctatgcttcttcctttttttgtatgtacatacacatggacattggaataccacaatattttagagtgtgtttgcttggtttttaaaataatgtatatatttctgatatatattatgttaaatatatatttatttttatacatttatatataagaaatgtataatatatactatgcctatataatatatatttcttcctttgagtgaaaaagtaatatgtggtagacacttagcaaaataggaaaagtatatagaatagccaaaaataacccctttaaaataaccaatgttatcagttgggaatagatccttctagccatatatgtatgcatatgtatatatgagatatagatagatgcattacttatcaacaggtataaaacaatattttctaactgaattttaaaacaaagaaaaattttgatacatattattatttttattatatagtggtaaaatatacataatacagaatttcacattctaaccaattttaagcgtataattcactggcactaagtacatttacattgttgtgcaaccatcaccagcagaactgtatctattcaaactgaaatgacatatccattaaacaataatgcactagctacattcttccttctcccatcccatggcaatcaccattctgctttctagctttataaatttgactcttctaggggcctcctatatgtagaaccatatggtatttgttttttgttttttgtttttgtaactggcttgtttcttcaagcttcaagcttaatctcttcaagcttcatctatgttgtagcatgtatcagaattttcttattacattgtgtgtgtgtatatatatgtatagatatatagatagatatagatgtgtgtgtgtatatatatatatcacattttatttatccattcatccatcagtggacacttgaattgcttcttcctttggctattgtgaataatactgctatgaacatattaccatgattgtacaaatagctgcattcctgcttttagttattttaggtatctacccagaagttgaattgccagattattgatatattttgaaatatttttatggcattgttttaatgactgtgtagtattctattatatgactatactgtaatgtatataaacaatcctcatgtattgattatttaaattttccattatcttttagttttataaagtacactattaacacggagcttcttgaaactaaacatttatgctctctggtcatttccataggctaaattttaagaaatgaaactatgggtttaaaaagtataaactttattagggcttttgttacatatcaccaaattacaccactgatttcccataaaaattttatagaaacaaacattaacttcgtccctaaatctaaattatataatcagttttccttctaagacaagtggagtcacaccattatgtcactcatagcccctaactccaagtgggatttcctgttcggctttagcaacagtatctaaaagtagttttgaactctggttttaactgacaatcacctgccccttcccttttgaatttccagatttcactctgttgagtgggtttatctacaataacttgcatttaaaaagccctaaatgattctgttgtgcagtcagatttaagaaatgcttttctaaatgtgtggtattatgtttatatatcgcactcttggccaggtgtggtggctcacgcctgtaatcccaacattttgggaggccaaggcagatggatcacttgaggtcaggagttccagaccagcctggacaacacagtgaaaaccccatctttactaaaaacacaaaatgagctggcgtggtggtgggtgcctataatcccagctatttgagaggctttgacacaagaattccttgaacacgcgaggcagaggttgcagtgagctgagatagtgccactgcactccagcctgggtgacagagcaagactctatctcaaatatatatatatatatatacacacacatatacatatacacacacacacatatatatagcattcttaatctcatatatatataatatatataaaatatatatatataatatatatatatgacattcttaatctgttaggttgttttccaactcatggggtcatctatcaagtggatagtgtaagtggcctggttggatgaggaatggagatatgggtacttaccctgaattatggaagataattagtgagatgactcaagaaagcaaatttagttattcttctagtcatggttaggataaaatgatgatgtaatttttgcatagagccaaaagaagcagcaaattagggatttcattataactgaaataggttagctgtgtttccatttttgctcattgtacaaactcagaaaccaattatatttatttatccagccattatttattaagtgcctacctgatatgaatccctaataatgagaccaagctcttcttgggcaataaaactctgaatattgcacatttactcttggaatcactggatttttgagagtcagagtatcttcttttataggtacctcgaccccagtgaagctctttttttttctcctgagtgatatagaaatatttttttatttgaagagaaagattatttattaaaaaaaaaaaaaaggagaagagtaacttagcatttcccctcctttgttgttcagatgaagagtcagtctagagaagtcacgtgactttcccaatgtcactaaattctaaacagtggtaaagctggcactttttttctcggtctcccaagttccagtgcacaactcttcaattgcatgcttcctagtgatacttacatttgccagtatccataacttcaactgggaattgtaaagtgcacctcatgcactacaggtgacctgcagaaattgttttatttctcttccttgtgtttgaaataataataataataataataataataataataataataataatgaacacagctttaaagtcagaagagtaatattggatttatattccacatgtcagcagtgagctggcatgggatagcagctgcctttttaacagagtaaactcttcagctttatagttcacatcactttgttgtttcctagacactggcattctcattttctgttcattctccaatttattcaatttttcttctaggagagagaaagattttccagtgtctacattttgatcacttatctcttaaaaataggaaaactacggatagactgataaagaattttgtggttttttttttttaacatgtcaactattatatttcactgttttattacctgagagaggtggatggtttttaaaaccccaaactatgcagccagatgacccaggcttgaaccttcgatctgccacctactagtgatgtgtccttgggcagttacttaatctctcgtcaatatcttcttctggaaaatgaggattggtttccgtctcaggagtaactgtgaggattatatataaattatgttcaacacaaaatgtttgcaccaggtaatttctatataaatgtttgctattattacacatttttggggttaccaataggtattttagcttgtgttttctgccacagggatgtccagacaaagtagataactgaaagtgaaaagcacttgaggtattcttcaaataactcaaataattgtcatgaaaatataattgaaatggaaatattcatcatcttaatcttctagcaagtcaaccatcccccttttgatattttgtatattccttggccatatgaaaatatcattctctatggcctcaattgtattgtacaaatgaattcacatcatgtgtttttcatttaaaatttacatttaaatcttaagcagtttcccatgtcatgtagctgaaattaaaatgtaataaaatgattttgaatttcgtgctgctgtttaaacgttgaccttttgctactgtctattttctccttctgttacattggaaaattttctaagtagaaatcacttttactcatcacactaaattttgccccaaatattctgtaactaagaactttctgagtgcaatgagtgtgactttctttgtctcatagtgaatctagtaagcagctcaatgcctgttacatagtagactttcaataaatttctattgaataaataatttggattgaatttctgggatttgtggtattgtgtttacttggcagtaaattcagaatgtactttgttttagtacatgttgttaaatactatttttaaatgcattcgtctctttcctttcttagtaagtttatttaaaaattgccctttatttccagaggggatttgagtcagcatcaagtaaaacttacacatatagtatggccataaaaatgaaaacaagtacctcaaagtcttcctggaaaaataatagtatcaatacattccaaattaaaatcattaaactatttagaggtggaggggcactaatgagatgactgtaattaggcacacattacatattttacagaatttcttgattgtcaagtcaataaggaaaataagatagttcatattttttcatggtcagttataatctgaccaaagaaatgcatttttcttgggatattaaccttcattcattcatcaaatatttgttaaatgccagcttatgggctatgatatgatgaagcataatgaggaagcagcagggaataaaaaggacagtctctactagtatagaagcagacatatgcacatgtgatatgtacagggagggagaagtaaagagcacccactgtgctggaggattcaggcaaagtttcacggaggaacctgacattcagcttgagatgtaagacattcctaggaatcagctagataattcaaagacaatggagaagtgcattggtgtaggtatcattgttgagatgtgagagagcttggcacaatagacatgaaagaaggtcaatgtatctcaaagagaggtagaagaggtggatttgcatccatcattcccctaacctgttgaagatttttgagcaggaaagcaatatgattagatttgcatttgcaataaatcactctggctaccaaatgaaggactcattgaaaaacagtcgtggacattgggagaccagtttggatgtttttagagaattcataatgaaaaatggtggaatcttggcatgggattgtagtagtggaaatggtaaaatgtggacatatttgtgagttatggaattccctatttagagagtaggagcaacaggatttagttcttgaatggaaagtaggcagtctcagaaatgattcccagtgttctcctttgagcaacaactgggtggatgagaaaaccaaatgaaaagcagatcagggtggatgatgaaatctgtttttaatatattgagtctgaaaagcatatgagacattcaagcagacacatgaaatagacagttgaggatttgggcttagtattcagaatacagatgaattctggagacagaaattctaaagtcttcataacatagaaggtatatcacgttgtggccatggtcctggagacaatcgagagacaaaagcagagatctggtgtcaaataaagggaatcattattcagcggctattgagcaatatattgggtattgtcattagtaacaatttcacagaaagatttaagaagcattttatttttcgtaagataatattccatttgatgcagatagatagctttctggtaaactaggttgatccagagataaagattaaaaaattcccagggacatttggttaacattttacttccaatggttctcaactagagaggaaaccacctcctgatggggagtttggaaatgaatgggcacatttttataaactgtcacaatgactggaggacactgttatcatttatcgggtagggagcaaaatacattactgtcaaactcaagaagaccatagtactctgttgagagacactgataaactcttgtgccacatatgtttctctggcttgctgattgtgaagttccgagctgactgtcaagaacggtcacagaccttctctagattttcacctccacagtactctctttgtcctgaacctagaggagatgacggctctgcctctgctagttccatattatttccctgtccttcgtgactcctctgcaattacatggggccatgtacataatacctgtgtaaatcagatccttgagaagacctagttggtgtgtgctgtcatttttatttgaatcctgactcttatggctatcttttccacatatcatttgtctcaaatatagtttcctagggatctcatagttccagatttagcttcctgttaagttacaagaagctggatagagtggtatctttttgtttggttggtttttgtgttttgttttgttctgtttttttggatattcgtctttaaaagggtaaacttgtcatttacttttgtaatttaagcagcctggatattcttgtcttgttggtggaggggctttacctttctgcttgaaggtggtcccaatagtactaaatagaaacatagtttcctcattaagcaatttattaaaatatgtatgttcaagacattcctaaaaaatactcagttaagactccaacattctattacagaggacgtggaaaaggcgttttgaacctagaaaaaatttaaggtcagatttttctcgtcaataatgccagtcataaaaaagtcagcgtagatgggcattgaatgaaagagggaataaagctttgcttttctttgatgactcaagatcagcagaaacccagagttcctattttgaacactttacaaacccaactataaatggagacagtgactgagcaactgggctgatgacaggcatgctctctgctgcagctgtaaagtctgccccaagaaagcagttcaaaatttgcatagtttgaaattgaaaaccaataacattcattaacaaaaaagaatatagacctaactccttaaaagtaactttttttttataagtttcttctttcagtctctttcttggtgaagacacacacacacacacacacacacacacacacacacacacacacacacactatttaaacatcctgaagtttttgaattaaagcaacagggcacaatttcaggcagccattgctttcttctaggaaatacctcactattagagctctctttggagatgagaagatttttctcacctttattatgaatcccattgtgtatgtgtgagcacgtttctgaatattttacatattataactgtatgtttgaaaatagaagatatatatatatatatatatatatatatatatatatatatatatataatttttttttcctttgcagttttacgtgccttacatcacgggagctggaaggggtagagaataggaataattttaaagcatatttatttatgttcttcatggttaaagaaaactatgccaacattcttctggcccacatattcaattaaatacatagtgaatcttttctacttactggattatttggtgcttccaagcatttatttttggcatttcatttcgtttttgtttttgcaggaatttttgaagttttattatgatttaacatttttattttgaaaatcgagcacattttaaaaattactctgctgtagctgtagtctgcccccaaaaacagatacttcaaaattcacctattttgaaaataaaaatgcaggtatagaaatttacatatacagattacttatttatctatgatttgttatgtgtatataaatctatttatacaatcatctataaatacagatatgcaaatatgttattttttgagacttaaatgtctgtagcaatcctttttttatgtggtatttttccattagtcattttctaagcctcttcaacatgtaaagctctgtgaggttaatggggggagagtggtgtcctaggatgatgaatagtgtgtctctccctgtcccccagtctggtagagaagctgtgcacaatagattagaccaaatagatttctacattttcaatcagaattagctgtggccaggagataagaacagacaaggtgcacccctgtgtgtctgccttctctcttggagcaggccctccacttccccttttgtttaagttcagataacatgttacattgtttatgtcactattcttcatgaccaattgtcacaaaacttttcctctatgttacttcttttagaagttttagtttcaggcctttctcatctttaaatcattaacccagttttagttaatgatgtcagataagggtccaatatcattcttttgtatgtgtatttctagtttccctaacatcatctattgaagaaattttctttacctatcatctattctttgccccctcatcaaaaatcaattgactgtatacacgtggatatatttccgggctctctgttctgttctgttggtctgtatatcttgtttttcatgccagtaccatactgttttgattactatagctttgtaatatattttgaaattaggaattgtaatgcctccggctttgttcttggcttcaagattgataaggctttttgtggtcttttgtggttccatgtgagttttagaattgttttttctatgtatgtaaaacttcattttggtatttagatagggatctcactgcatctatagataactttgggtaggatatacattctaacaatatcaagtctttcaacctatgaacacagatgtttatccgtttgtttgtgtcttgtataatttctttcaccgatgtttaatagttttcagtatataatctttctcctccttagataacttttttccaagttttttatgctactgtaagtagaattttttcctttctttccttttctgctattcgtcggcagtgcacagatatacaactgatttttgtgttcatctgtgaacactttgaaggcaagattatgccttatttgtgttctacatagtaataaataataattagcagttattaatatttttcatttattcatttttattgagtttcgttggcagtaatttttgctttctttctttcttttttttcctattctttttagagctccactggttcaacagcctctcctccagtttcgaccccagtcacaggacacaagagaatggtcatcccgaaccaaccccctctaacagcaaccaagaagtctacattgaaaccacagcctgcaccccaggctggacccatccctgtggctccaatcggaacactcaaaccccagcctcagccagtcccagcctcctacaccacggcctccacttcttcaaggcctacctttaatgtgcaggtgaagtcagcccagcccagccctcattatatggctgccccttcatcaggacaaatttatggctcagggccccagggctataacactcagccagttcctgtctctgggcagtgtccacctccttcaacacggggaggcatggattatgcctacattccaccaccaggacttcagccggagcctgggtatgggtatgcccccaaccagggacgctattatgaaggctactatgcagcagggccaggctatgggggcagaaatgactctgatcctacctatggtcaacaaggtcacccaaatacctggaaacgggaaccagggtacactcctcctggagcagggaaccagaaccctcctgggatgtatccagtcactggtcccaagaagacctatatcacagatcctgtttcagccccctgtgcgccaccattgcagccaaaggtaagaaactcagtaacataaggaggagaatacaggggtgcctatcttagtctgccttccccaggaagcgaagcctaaggcaaaagtgtgtgtgttacttttatttcactgacaaatacaatcccagggaaggatgagtgaagccagagaggagagagagactacttagtatgttactaatatggccactgtttagtatcaaatggaattgcttgctcaatctcagagaatcatcttccaaagcccacagacaccatagcatctgaggacaaagtgttctgatggagaaagagaaaataatttatttttcacatccttccctatattggttaaagcttccctctgttgtgcagaaacttcctctacaccttgcatttgcttggacattaaacaggtctgtagtatctcaagcctcagcaagggtagtgatctatgggtgagacatgtggagggcaaaactgagtgaactgctgtcaggctgtggccctgtgaaggcgattataactcccgcaatgttggtaccacagcggttgctgggccagaacaagtggccaaggacccaggaaatgggtgaggccaagcaggtctaagataatgcaaatgccttggacagtttctcctttgagaaggggctgcagtataatgcagcttgtttgtgaccccttgtttattcattttactaatcctccagaaagaatcttattcttcagcctttagcactattaagcaatgtttaaaaactccttatgagtgacagttacttcttatttgatttaattgtccatatgtggaccttttaagttaacactctctgttacttcgtctgaataggtaaggtgtaatactacacatgcccactcaccacaacttggatttttcattagtactggaaccaacacgatgttgattcctcccattatgactagaggaaccaataagaataacttggaatcggtgaaaatagaggaactgagccagtttccagccacttgggttggaagagtgcccttgcttcttttcagttagaactgtgagaaatcagaaatttgagagccctcaattagctagaagttcaatggtagttttgggggatggattgggtagaagtttggactgtatttttaaaaattctttccacatttttacaagattgtccatttcaagacagatctattcacatattcaacattgtatcaaaaatttccttatagggtatttactaaactgtttttcttatatgaaagcgtctgccatattaatggtgtcctatgtgaatttcacattctataggggaatagagctcttcctgacagtggggactgtgaagagctggagaaatcctatagccttatgtgtgaccactatatgaaattggccagccatgatccctttccgatagatagattccaaattagaattttaaatgattttaaacatgactcagtttcttaagtctctctatgaaaagaaatgttattacagttttttatttctttttaaaatgaatttgtccataatagccaatctggacagccttgctctttgttaatgtcgcagtatatttgcaccagtgcctcctggcccagtcaaggggagtctattttcaaaacaaccagttcagagaaacagattattcaacttaaccacagtttttgttttcaacaattgcaacagatttacccagggaagattacagtaaaataaaattttaggtcagaacaactgctgtcaaggtttaagttcaactagacagacaatttagccctgcccaaaacagggtgactgaaaggatggctgagtgatgttcctgaaggaatgacatggtgtctgccttgttggaggattgtgttatcccacataggaaccagacatgagagaaagcaaaactatgtgtcttgatgagactcacctggtgagaggtactgagctagtcttcagatgttgttttctcactaagtcactgggcactctggccagcctctcttcagcatttggaacccatccattggtgtaggaaaaagaatcagcccccactgctagaactggatctaaagtgctgggtccagccacatccctaacatttggcctgtcctcaccaactgacacagggagatggaatgaatttttataaaccactcatcagaaaacatggaactttattttacttcttatttgagcaaggtggttattcaagatgatctattagatgattacagattttggatgtcagtagatttcatgttatttttaaaatttttgatatatttgtttttcaacagtttcatgtgttttcacatcatattcggctgtgcattgaaaaaatgaaaatcaaaccatgtacttttcactctgattattaagagtggttagaggttgatatttagccatctgtcctgtctgtgctttgggaaagggggaagaggctgatgaagttatggataaattctgggcgcgttgtgagggcattggctgatgaaagggtgggttccttcacagttggcctttgagcaaaacactactgtattctactgcacctgtgcacagaggaccttattgtccttatattgactgtttggcttaattatgtgactacgggcatgagaaatgagctccgaattcttatcccagttctttccttgacattcctcttccagtttgaggaaaacctctagacctctttatgtcatgcttcaaacctcagtaaagtagaacaccatctttactaattaattaatgattgcaaaaggcttggaaatttccaaaggctgaataattgccaagtgaagactattcagctttccactcgctttcatttatttttaattttttttagtcactgatggaaaacttaccctcatgtctgaaaacaattatactttattacattgagtgcttctggggagtttggcatttaacccattaaggaaaaagtttaaaagatgaaataaataaatctcccttatatttgagatgagctgctttagttttcctatatcaggatagtataaaaagaggaatatgatatagtaaaaaagaggagagacaggatggggaaaaggagaaaggaaagaaaaaatgaaaaggaaaaaatgaagaaaggaaagaggcagaatgagaacctgcaaggcttaggggatcatgattatgtttatgttcccataatgtgctaagcagtgaatttgcatgctacagtgggccatactgtatttcctataccatctgagcagagttccttgaaaaatagtgttataaataagtctttataaggtagaaatgttctcttctcactggaaatcctcttaaagatgcagtggaatctcttctctttgctgatttataaaagctaatgtcagctacatcttgccatgtagttcacagaactcgtgtcctgtgcattttatatatctatatctatacctatatctatatctatatctatatctatatctatatctatatctatatctatatatatcgctgtgagttgggagccacgttttctccagtatttagataaggtggctcagcttgaaagttccagtgctaggacctggaagctagtcacaactctcaagtctaaagtgaccaggcaactttagcctccaattatcataaaaactcatctccgtcagcctcagctattaaagggacaggtatttgctacataatgtgtagaagtgctggggctgtgcattccagggaagttggagaatcttgtcccaattagtgtagaggttatgttaaattctgaaaccatctactattaaaattttcttggaaaatatttcaggaagatgagaccttggaggtcaactaaccatctttcagtaaatctaaaagtttttcttttccagaattagaacagattgttgcttttcatttggatttcgagtttggggcatattttatgggtcagagaagagtgtagaggtaatgaactgttgtggtcagtgttgaaggactttaagatctgtaatttctgttaagattaaggaaacagagaatgttcatacactaccactttgaacattccagtagtatgagaatatttaaattaattttatttatttatttatttatttatttatttatttattttttgagagggagtcccattctgtcacccaggctggggtgcaatgacgtgatctcggctcactgcaacctccacctcccgggttcaagtgattctcctgcctcagcctaccaagtagctgggattacaggctccccccaccacgcctggctaactttttatatttttagtagagacagggtttcaccatgttggccaggctggtctcaaactcctgacctcacgtaatctacccatctcgacctcccaaagtgctgggattacaggtgtgatcccaccatgcccagcctgttttaatttttgaaaagagaaagttatatacattgattgcactctaaagaattgttggcatttggagagagttatccgtatggtaatccctgtgttaattatgtctcaattctaggatcagagaaacaaaatggaagagatgattagggtgggcagaggaatgaatgcagatagatccctcaagtcagtagctaacactagaatacatgtgaagatgagaatggtagatattgcttgaggccagtgactgtaatattagtaattcctctttgtacagactttttagtttccaaagcactttgtggagctcacaaaatccatgatcattaagcccaagtagaggtctttgtctttctttttctgatgagggttcaaaagcccagtgatgagagccactcacttaacgtcatatgtcaaattcatcggacagccacagctccaagtcaggtcttctaaagattgttcccatgctttgaccgtggcaagtgactgaatgttggcatgctttggatggcaggagctcctcatcagcgccagtgtacatggctccactgtgacccatgttacctgcagagattaaagtgggcttaggcagtcatcatggcctttggataaaatcagcggttggaggggaagcacccattaaatccctgcctggcacccaggcctggtgccttagagctatacttccccatccccatcagtcacataaaatttgtcccgaggttctttctaccttcactaagtacttaatatggagttcagtcatccccatttctcacttgaaccattgaaatggcctcttacttagggtttcctctggcagtcatctctgtacccatacatcctacatgtaataccagattaatctttctatggtaccttatcattaattgccttttgcaaaaaccttaataagttcccaaccagttgcagaatacattgaaatcccaaactggatttctagttttatctctccccagtatcctggattccagctgatatgttacatttttagttaattctcacctctatggctttgctcaccaagttccttcttcccagtccttccccaaataaaatctacacatctaaaagtgacccattaagatccagctacagtgttaatttctcccataaggttttctcctcttcctaaaagctagttgtgtgttatttcaccctctcttttagatgttttcactcttttactgtactggagtcatttgtgttcctgtcttctatcaacctatatccaagcatatattagactaagttttaggagaatatcctatgtttctagaaacatatgtatgtagtaactatatgcttagttatttagcagaggtttattgaacattgtgttcactttgaagaattttggtagacactctgtagggccctattagtgtttaagacattgtacagctcaggtgcattttcctttaaggatgcatttaacctgctagatgtcatctcatttttaagaccagagaaaaagagagcagcatctgttgtttcttgactttttaataatagccattctgactggtgtgagagatggtatctcattgttgttttgatttgcattcctctaatgatcagtgatgttgaactttttttcatatgtttgttgaccgcataaatgtcttattttgggaggtggctgctcataccctttgtccactttttgatgaggttgtttgtttttctcttgtaaatttgtttaagttccttgtatattctcgatattagacctgtgtcagatgggtagattgcaaaaattttctcccattctgtaggttgcctattcactctgatgatagtttcttttgcaaaagctctttagtttagttacatcccatttgtcaattttggcttttgttgcaattgcttttggcgttttcatcatgaagccgttgcccatgcctgtgtcctgaatggtactgcctaggttttctcctagggtttttatgcttgcttttgggttttacatttaagtatttaatccatcttgagttaatttttgtataaggtgtaaggaagtagtccagttttagttttctgcatacagctagccagtttttctagcaccatttattgagtaggaaatcctttccccattgcttgtttttgtcaggtttgtcgaagatcagatggttgtagatgtgtggtgtaatttctgaggtctctgttctgtttcattggtctatatgtctgtttcagtaccagtaccatgttgttttggttactgtagccttgtagtatagtttgaagtcaggtagcatgatgcctccagctttgttctttttgcttgggattgccttgtctgtacaggctctttttcatttctatgggtttttttcatttccgtatacgttttagcatcagtttgttgttgtccacaaaataggctgctatgatttggagattaccttgaatctttagatcaatttgaaaagagccgatacgttaacaatactgggtttttcaatccatgaagatggcctatctcttaatttatgtatgtcttctctaatttctctcatctacatatcatagttttgcatatattttggtaaacttgtccttaagcacttcaaatattggatgctattgtaaatggtattttaaaatttgtttataatcatttgttattagcatatagaaatagcaatagatttttatatactccctttgtatcctataacttgttaaatgtaatagttgtactagcttctttaataagacttcttaggcaattctacctgatcattttatctgaaaattgttgatgcaattgtttatttcctttatggataagcctattcatcaacattttatgtttgaaagatttgcttgctgattgaaaaagaaacagcgtgatacaactttaaaggaaataagttggaaaaaataagaacctttcctctccacttccataggctagcctacgtaaaccatcagacatagaagcgattttcagaatcataagtcttaaccccttacatttacagatgagaaaactgaggcctgaagagttacagtgactttcagagttatgtggttagtaaatgacctcatgtgaatgcaaaatgtaactcttctattctgcagttcttctctatattggttaaggatagttcaagacagaggaggtcagaagtaagtgacctttaaaaggtgtaataataactattgtcaggatgatcttatttcctatctttagaaccccatcatcagttttgtaaggccactgaataatagaaaatggttccgattctggtgctccctattctgtctcacagctgctcctgtgaaaacactcgttcatgggctctgtgtaattttgactcagtccataatctctctatcctgattttaaaagttatcatcagaatggatgtgctggtatactaagaaatgtctgtgaatattatttatttattttacttatctaatcattttcatagatttggttgtttaaaaataccccaggtctcaaatccctttggaaagttcagcaaatcattttaacaggtaattctggcaatatgtaattctttgtgtttacagagtgagagaaattctatttatcagtgttttttctttgttttgttttacttcagttctaagcaaagcagttattttgcttattgacatattgatatattcctttgggaatctcatttctttcttggccagctacaaacactcatactgtccaatttcaacaagagactatggttattctcttcttcaccaaacaaagaaatttgaaccattattgataaataatttctggtgaatattaaagctttgaaatgttttgcacacacagtgttaggaagtgtcttagagtgaaagacactatttttactactatagtatcaaaagtgccattgtcccacatacaaagatttacttgttaccttagttctttgatttttctggagtacagcaaccccaacttttagaagtactcttaacaaatgatacagtgtttgatctgtttcatctttggacttcagagaatgatcttcaaataatacagtttggtttatttcagaaggttgcttccttaaaacaaaattttgaaaatatgagataataacatttaacttctttttcaatcacttataaaatttacgaaacactctcatataagaaaaactctgtaagttgttcagaggcaacttctttagtatcctaccaatactgaatacctaagggagggtaagaactgacgtcgcctcactgccagcccagtgttctttccactctgtgaaacttgcctccatttgtagctgtctgtgtttgtatatattagctctattttgtgtagagttttccaaacataaaatattcctttggcgcagagtttagagactaaaacttctgagtagtatttccgggacataacatatatttaacattatttgaaacccaagattcagtcaacattgctattaagagttaaggagctgaaactgtgcataccctaagtctgaattcaaggtaagaggtcccttgttattcagtctttataagtgtttggtatatttatgcctcctcaaatatgacaccatctttttttaaattcacatttaaagatgattgtaaaacaagaaggataaggtgtaagtgtggtagttgttttatttatggatttatcagttagctgttacttattttttgtggttcataatgcaattttaacataagtctgaataagtttactatagatgatattagtaggttttaccagaggaaaccatgcttttttattttatttttttctttttctttgagacagagtgtcactcttgtcgcccaggctggagtgcagtggtgcaatctgggctcactgcaacctctgcctcccgggttcaagtgattctcctgcctcagcctcccaagtagctgggattacaggcatctgccaccaggcccagctaatttttgtatttttggtagagacggggttttaccatgttggctaggttggtctcaaactcctgacctcaggtgatccactcaccttggcctcccaaagtgttgggattacaggtgtgagccaccacgcctggacagaaaccatgctttataatcctgctacccaccccatccaaagcacacaaaatattagttaagtaagctactagaagacaactgaggctggtggtctctgcaggggcagaaaaatgggaactggagaggagttcaggaaggcagcccagagaatatgaagcaggacccagcacacaacagcctgtgggccacatgtcacttgccacctgattttgtaaataatgtttgcttgaaatacagccatactcgcttcattccatattatcaatggctgctctcacactataacagcagagctgagaagatgcaacagagaccgtatggcctacagatattaaaacattttctgtatatcattttacagaaaaacattgttgactgctggtcaaaaatatgggaagaacgtcatgaaatttagattcttattaaaagttcttgaacatccctgaactatttaatattatttcttgtccagcagatcctgaatcttaaattagaagttgtgacagtaagtggaaattttcagggaaggaagaacagaatatcaaaatcaaaaattaacatgctatgtgcagagtaggttctatatccctcctttttttcccaccctggtaaactcttatttaaacttcaagatctgtctctaatattaacttcttggagaagtttgaccattcttccagttcccacatattattagcttatctttcctctgattttttctcatagcattttttcattcatttactaaaatatgcactaaaatatgcacctcattcagtatttttatataataacattttaagataatttgcatacagtataattcgcccatttaaattaaatggcgattaaattaatttaatttaacacaattaaattatttttagtatattcacagtatattttactgtattcttaaatatagtatatgtgcaatcattatcacaatcaatttctttacaccaggaagaaatcctctaccaatgagcagtgacttttctttttccccaaaccctctaagtctaggtaaccatgaatttaatatctgtatctacagatttaacaattttggacatttggaataatactatatatagtcttttgttactggattcttagtataatattttcaatttccattcatgttgtagcatatgtgattgctgtattcctttttattgctgaataatattccattgtatgaatacatcacattatatttatattttcatcaattgatgaacatttgaggtttttctatcttttggctattataaataatgcttctatcaatatttgagtagacatatgttttcagttttcttgggtatacacctaaaagtgggattgctgagtcacatggtaatttaatgttcaacattttgaggaactgctgaaatgctttccaatggggctaccccattttccattcccaccagcagggtatgaggatctcattttctctgcaacctcccaccgcatttgattttattcatattatgtgtctatctctcaaatacaaatccatgttcttcaagagtggaaaccatgtctgtttcagttttgtttctgtatgcctaatatagtacattgcatgtatcaggcactcatgaataaatgaaagagtcaaccaacaagtgaaataacacctactgaattgacatggaaccacatagagttcctattatcaagagttgttgggttgatgggtgcagaaaaccaccatggcatgtgtatacctgtgttaagaaacctgcacattctgcacgtgtaccccagaacttaaattttttgaaaaaagcaattttattccaaaaaaaaaaaagagtcgtttatgtgggcttaaatagctgtgcttttataaatgttcttttttttaatttcagcttttattttagatacaggggatacgtgtgtgggattactacatgggtaattggacccaggtggtaagcatagtatccaataggtaatttttcagactgtgccctctcccttcctccccgtctggtagtctgtggtgtctgttattctcaagtttatgtccatgtgtgctcagtgtttagctcccactcataagtgagaatatgtggtatttggctttctgtccctgcatcaatttgcttaggattatggcctctagctccatctatgttgctgcaaaggacatgatttcatgattttttttgactgcacagtatttcatagtttatatgtaccacatttttttaaatctagtctaccatttccagctatgttcttcatctttctaccattcacatcctagtgcgtgtaaccgataaattagtattcatttagatggactccattttattttattttattttattttgagatggggtctcattctgtcgcccaggctggattgcagtggtgcagtcttggcttactataacctccgcctctgggttcaagtgattctcctgcctcagcctcctgagtagctgggattacaggcatgcaccaccacgcccagctactttttgtatgtttagtagagatggggtttcgcattgttagccaggctggtctcaaactcctgacctcaggtgatccacccactctggccacccgaagtgctgggattacaggctgggattacaccactattttttaatggcattttagcagttaaaaactgaatgctctaaaagtcagggatggcatgggcacaggtgaaagatgaaagttttgtctatttctatttctatgatgaaatcagttgggttaacaagagcattcttctaagcagctagagattctgttggtctcatccagccatcacccagatggcaatacaaccagtaaaaggcagataatggtatctgtttttgcagactttatgttcacaccagtgtcactcatcttaacctggactcttgtcatcagcttgatatttcctcactttcctctttctccccttttcaagttatagctgtgccttgacatgacttacccaatactctgtattctcttcgtgttcattaataggctcattttccagaactaacattggggcatttcaaggactttttacgtagcacatgagctgcttacaacgtaattctgtctagttgggacatatgtcatttagccagattgtttatggcattaccacagccaagcatatattagtttcatagtaatttctagggaaaaaaatgtggaggaaatatgtggtttttgttatacttgcaatgttactatattactgcttttttttaagttttgatttcaataaatacctagcatatattttcagatgccaaaggacatacaatgatgaacaaaaactcagctcgtcctcaaaatcgatatgtattattggtgatgctggactccacccactcatagatgtttctcattattgtgaaacattactttttggaaaaagagagctgggccaggcacagtggctcacacctgtaatcccagcactttgggagaccgaggcaggcagatcatgaggtcaggagttcgataccagcctgaccaacatggtgaaaccctgtctctactaaaaatacaaaaattagccaggcgtggtggcgcatgcctgtaattccagctactcaggaggctgaggcaggggaatcgctcgaacctgagaggtggaggctgcagtaagcccagatcacaccactgcactccagcctgggtgacagagagagactccatcttaaaaaaaaaaaaaaagagagagctaacatcttcactttttaaggaaatagacattgcccccatgattagatacgtatggatgactagatcatttaaaacaaaaattacataagggcttaaagagtggctcttaagtgtaaatgctaggaagcacccaattagttattatttcctgtatgtgttgccttcatggacattggttcatatagcctcaaaaagtctatgaagatacttttttttttttttttttgaaagagagcgtcactctatctcccaggctagggtgcagtggcacaatctcagctcacttcaacctccgcctcccaggttcaggtgattctcccgcctcagcctccagagtaggtgggattacaagcatgcgccaccataatcagctaatttttgtatttttaatagagacagggtttcactatgttggccaggcaggtctcaaactcctaacctcaagtggcccacccgccttggccccccaaagtcctgggattacaggcatgagccaccgtgcccggctgaagatactataaacatcttgattttttactgagtcagaaactgagaaagggaaaaaattatttgctgaagactgcatgcctcaagtttatacccattatactacactgcctgcttgcgaaagtatgttttaaaaaattgtcactgctgtgcagcaactcaaattgtcactgctgtgcagcaactcaactttaagtcttaaacctagttatcttttatcttgagcaggacatatatgttaagctgctgaggatgctccttaacatgaggccattgggcgggtgtgtgccagacaatcctcctagttgtttctctaatacagagcttcaggtcgtctcttcctttttcatcttctagcctgccctggccaagtacctatgaatcaaccggcaaggcgaggggtgtatttggtgggctatagagtggaattaagcagaatatcaaaaattttagccaataacattgaacctcaaagaggaaagtactgctgagttctgatagatgcaagacaagctaaagacctccttagctccattgttctgcatcagcacaatatgtcctagtgagaaggaaagacatagcaaaactaaaaatgacctgtttttcaagagcaatgtcttttcacccaaacttgtgaactgcttgccaaaagtcaggactaacattgttttgtacatttgcattaaaagaaattatatcaccgttgaagagctgatcagagaaagggtataggaaaaaggaaatgttaaaataagctgtaaaatccagcccatttatatctggagtttagaggcagtctaacaaaatgaatgttccatttactaatcacatttgccatttattcaaaacaaacacggcttgagagaggattaaataaacatccaaaaactgtcgttcttgaaacctttggatagaacattgagttgcattcctgcaggagaaatgccaagtgagtgagcctagtccaagtttgtttagaaagccatatttgggagaaccatggaagtgcgaacctgatcatgtgaaaagcccaggactgttcagccttctgtggcagttctgtgagttctagtaccagactattaatagggagtcaagtagaaatatccttccttcccctccctccctccttcccttcccttccttccttttccctttcccttcccctttccctttccctttcccttcccttctccttctccttctccttccttccttttccttccttccttccttccttccttccttccttccttccttctctctctttctctcttctttggtgtgctgagaataatctgcagacagtgactctacagataagattgcaaatattttcccttccttcattccttccttctttcctctcttccttccttctttccttcttccttttttttcttttttaaccacatgatttctatttcctttagcaagatgttatcatgtgagggaagtcttaggtttctatatccctttattcttagtgttagcatttcttattaaagacagatgtctagttttctattttaagggttatctaatttcagtcataaaaatgtcctataaattaagacataactttgtcaatactcttctagaacataatagctaccccaaaatatttgttcaatgatgggaaattcattgatatttagaccttcagagatgaaataaatatgttgcctttgcttttcaaagatgccatcttgcccattcataagaaaactaagacccacagaatgactacccaaggcctcacagtataattaggactttaacaaaaatccataaaacctctggtattgggatatttaagataatacattgatatatactttatcactgtctttgataaaataacagtaaaaccattttaatgggacacatttttataaccattgtgaatttggtcctcaaaaaagaactcactgagatgatgagataatgcatattcatcctcttttacagatgatgaaacatttcggagaaggcaagtcagttttccaatttttcatactatatagatcattgaatctttgtcccttatatacagaatcaacaatatgaaatatgtggaacttgaaatcatagtttccaacttttctgcctatagaatgcccatttccagttgcttaacatttagattgataaacatgaaattcattaaacaggaaactgaataagagacctggactaatatttaggtattacttagtattccatccaagaagtgtctgcagacagtgactccatagatgataaggttgcacatatttcagaagccaaataaatgttgtgattaaatgattcaagtctgttaaccatttggtagttatgatgtaaatggctgttaaatggaaagcatttgtaaaaatgtatgtgcaaaaagaaaggatttctaacaaaccgaatgggccttacctattttagttaatactctcaataatgagcagtgagattaatttataagtatgtgtgtgtgtgtgttaagatatattcacattttatgaaacctgaagctttgaagcttatcactgtggaaataacttctgtatgcataaaagtattatattatttcggtaggactgctataacaaaatacagtcaggccttcatattcaagtaggctgcattcagaattcaaccaactgccaatggaaagtgtttgtaaaaaataacaagtaacaataaaatattagaaaatactacaaatttcaaaatacaatataacaagtatttacctagcatttacattgtattgggtattttaactaatctagagatgatttaaactatgtaagaggatatgtgtaggttacgtgtatagcatatcatatatataagggatttgagcatccatagagtttggcatctgcatggagtcctagaactgatcccctgcagatatgaagggacaactgtaccacaaactgagtgacataaactacagatttttttttcctcacaattctagaggctagaagtctgagatcaaggtactcacaaggttgctttcctctaagagctttctccttggataaaaatggccaccttctctctgtgtcctcacatggtctttcctctgcttctctgtgtcctagtccctctttttataaggacaactccagtcgtattggattaaggtccaccctagtgctctcattttaacttaatggcctctttaaaggccctttctccaaatacagtcacaatctgatatactaggggttaggacttcaacatattaatttgaagggagacatgactcagctcataacaattatgtaggcaaatgaacatttattttaaatgacagaggaaatgcaacatgttataaattaataaaagctatgaaatacctcaaaaatcacattaataaaagctatgaaatacctcaaaaatcacaaaaatcttgaaaaataacactcttatgaattaaattcctgattactttttcttacatttttagcagcatattcattgattaactaactgtacaacctaatttcataatattttctgcagagagaatacaaagataatttcatgctgagagtttattactaccagtcctgccttacaacaggtccttaagggaatgataagcatgaaagactgttacctacttctacaaggacacctttaagtacatagcctgctaacactataaagcaactatactatcaagtctacataagaaccaggtaacaacatgatggcaagatcaaatgcttatatatcagtattaatcttgaatttatgtgggctaaatgccccacttaaaggacaccgagtgtcaaattggatgaaggagcaaggcccaactctatgctgttttccagagtcccatctcacatgcagtgacacctttaggctcagaataaagggatggagaaagctctatcaagcaaatggaaaacaaaataaagcagaggttgctattctatttcagacaaaacagactgtaaaccaacaatgattcaaaaggacaaaaaaagggcattacataatgataaagggttcaattcaacaagaagacttaacagttctaagtatgtatgcacccaataagggagcacccagatttataaaacaggttattagagaactacaatagtgggagacttgaacactccactgacatttctagagagatcactaaagcagaaaaccaacaaagatatttgggacccaacacttgaccaaatggacctatgagacatctacagaatatttcacccaacaacaacagaataaacattcttctcatctgcacatgacacatactctaagattgactacacacccattcataaagcaattctcaaagaattcaaaataactgacatcataccaaccacattctcagaccacagtgcaataaaaatataaatcaatactaagatctctcaaaaccatgcaattacatggaaattaaacaacttgttcctgaatgacttttgagtaaagaatgaaattaaggcagaaataaaaaaaatcctttgaaactaatgaaaacagatacaacataccagagaacacagctaaagcagtattaagaaaaatgtttgtagagacaaacacctacatctgtaagttagaaaaatctcaacaacctaacatcacacctagaggaactagaaaaacaagaccaaactaattccaaagttgatagaagaaaataaatagttaaaatcagagctgaactgaacaaaattctgatatgaaaaccatacaaaagatcactaaaaccaaaagctgtttttttttgcaagaataaataagattgtcagactactagctagattaataaagaacaaacaaagagaaccaaataaacacactctgaaatgacaaagggtacattaccaccaaccccacagcaatacaaaaaaccctcagcgactcttatgaacagcactgcagacatacattagaaaacctagaagaaatgaataaattcctggaaacataaaacctcacaagattgaagcaggaagacattaaaatcctgaatagaccaataatgagttccaaaattgaatcagttataaaaaacctaccaaccagtaaaagttctggatagaccagatggattcccagctgaattctaccagatgtaataagacttgctggtaccaatcgtactaaatagcttccaaaaatcgaggaggagggactcctccctcaatcattctataacgccagcatcattctgataccaaaacctgacagagatagaacaaccaaaagtgaaaacttcaggccaatatccttgatgaacatagacacaaaaatcttcaacaaaatactagcaaattgaatccagcagcacatcaaagagctaattcaacccaatcaaataggctttagccataggttgcaaaattggttcaccatacacaaatcaatgaatgtgattcatcacataaaagaactaaagacaaaaaaccacatggtcatctcaacagatgcaaaaaagggttttggtaaaattcaacatcgcttcatgttaaaaaccctcaacaacttgaaattgaaggaacatacttcaaaataataagaaccatctatgtcaaaccctcagcctgcatcatactgaacaggaaaagctggaagcactccccttgagaactggaacaagacaaggatgcccacttccaccactcctattcaacatagtactggaaattctagagctccaaatagaaagagagaaagtcaaactatttctgtttgcagatgatgtcatggtatacctagaaaaccccatagactctgcctaaaagctccttgatctgataaacaacttcagcaaagttctagacagaaaatcagtgcacaaaaatcagttgcctttctatataccaataatgtccaaactgagacccaaatcaggaacacaatcccattcacagtagccacagaaagaataagatacctaggaatacagctaaccagggaggtgaaagatctctataatgagaattataaaacacagctgaaataaatcagagatgaaacaaatatatggaaaatcatttcatgttcatagataggaaaaaaatcaatattgttaaaatttggggcagtcatactggccgaagcaatttatagattcagtgatattcctgtcaaactaccaatattatctttcacagaattagaaaaaaaaaatattgtaaaattcatatggaaccacaaagagcccaaataggcaaaacaatgctaagcagaaaggacaaagccagagtcatcacagtacctgacttcaaattaaactgcaagactgcagtaactaaaacttcatggtactgggacaaaaacagacacataaaccaatgaaagaagctagagaaacctagtaatcatgctgcacacctacaaccattgatattcaacatttgtcaactcaagatggattaaaagacttaaacgtaagacctaaatctataaaaatcttagaagaaaacctaggaaattatattctagaaatactattctaggccttggcaaaaatttcatatgaggtctccgaaagcaattgcaacaaaaacaaaaattgacaagtgagacctaattaaagagcttctgcagcacagcaaaacaaactatcaacagagtaaacagacagcctatagaaagagagaaaatatttgcaaactatgcatctgacagaagtctgatattgagaatctatatggaactcaaacaaatcagcaagcaaaaagcatccccatttaaaaatgggcaaaggacatgaacagacatttctaaaagatgtgcaattaaccaacaagcatatgaaaaaatgctcaacatcagtaatcattagacaaatgcaaatcaaaaacacaatgagattccttctgacaccactcagaatggctattattaaaaagtcaaaattaatagatgttggcaaggttgtggtgaaaagggaatgcttgtgcactcctgttgggaatgtaaattagttcagtctcactgtggaaagcagttcagggatttctcaaagaatgtaaactagaactaccatttgacctagcaatcccattactgggtatatacctaaaggaatataaattgttctattaagttggtgcaaaagtaattgtggtttctgccattaaaagtaatggcagaaacctaatgaaaagacaaatgcacttgtatgttcattgcagcactattcaaaatagcaaagacctgggatcaacctaaatgcccatcaataatagactgggtaaagaaaatatggtatgtatgcaccatggaatactgtgcagccatgaaaagagcgagatcatgtcctttgcagggacatggatggagctggaggccattattcttagcaaactaacatgaacggaaaaccaaataccacatgttttcacttgtaagtgggagctaaacactgaatacacatggtcaccaagaggggaacaatagacactaggacatacttggtgtagaggctaggagaagggtgagggtcgaaaaactatctattgggtactgtgatcactacctgggtgatgaaatagtttgtacaccaaacccctgggacacacaacttactgatgtaacaaacctgcacatgtatcccctgaaacaaaaataaaagttgaaaaagaaagaaaataatgtttatacttagaaaaaaaattatctttcttctagcctgagtgataaacattttttattattatagtttttaaaagtttggaaaactgcctttaatctgcacaacttttattagtattgttgtttgaaatttaagataatcaaatttggggacactcctattaagtttcttttatttgtgagctattacaacacccttactcttactgcagattcatagctgatgagttctattttgtgcaattagcatcaaaaagaaaaatcaagtcagccgtgcatttataattgtgttcagtgcattactaagcacattcctaaagagaaagtatctccatttgcatcatcgaaaaccaagtagtactccacatgtatacttttacacatctgactattggttgaatttccagcagactcaatttctgtctctatgcattttactcctgtttgtctcctctactagtctaatttccatgctgggtgttataggacacattaatgacacgtgacttctggtcccacaaatctgtgtcacagagctaggacagtaatgggcccaggcacattgaagcattccaggaactcattcctatacaatgacgatgggtgatgacttaagcacacaccatagtgactgcagaccatgtaaatatatcccatgacactcagctaaatgtctccctgactcaacctttcttaaccaatctcaaaggtcacatgttgattctaacatttccctacatgagcgtacacagaagacagagtagaagaaccatagtgaacatacagcttggtcccctcccaagaccttagtaggggccagtgtacatgagggcccctgaagcttcatttccttcctcgtcaaagcatgtttatttaaaagtatttattttactctggatacttcctcagaaatagttattcctttccttttttccctccctctctccttacctctgtcttttcctcaaacatttatttagtgtatactatattctagaccccatgttgaagaataagatacatatgctgatgtctacagcactgcatagaaagtaatgggtaacctaagtggttacaaataaaatctactagctatcctggtgatttaaaggccaccttcagctgaatgttcaggaaaacctttatgaggaagtagcatttgatctaacctataggaccggtaggatagggcctgggtggggagactgggagatggaaaggcattccagtgtgctggtgctgcacatggtgggacttctatcacatgtattctctatctgtaacagttaaagttttttggttacttggcctgggtaatggcaaagcaaatgtactaaaagaaactctggttttgtggccacctcagttcctttggagaatgtcctctctcagctgaagctgagaacatccagtcacatttctgttctggaaccccttaagctgtttctgtgacaacatctgaaagaattaagctttatccaagtcaccagaaaagggcttacgttaactgttttcactaagactctacgtttcaatactaacacttacggacaagtggaaggtattcttcagttgtatttggtagttcttctgtagcgccccttttgtcttcctccatttctctcttgctagccctcaactctaccccacgttcgttttcattatcttttttctcatcccccatttcctgcttatttgtttattctggtggctcttctctctctcatagacgacatagaagcatggccttctttctgaactttccttgacccagagggagaaaagtctaacatactatcttatttatgcaatctgaggaaagttgttggccagccatcacccagtgtgacctagtgacagaaccagtagggatatctgagtgttcagtctttgaatgattcttccaagtcatatagatgtgttgattacttcaatcttgaacaagatatgttgtcactatcatactgggctatgagtacttgagaacagggaactgtgtagtaaaattcaccacatatgctggtagcacacaggcatcaaccagtctaaacagaacccacccgggtcacctcccacgtcactgctaagacacagttctttacacagaccatgtaaatgctgttgtgttgttttgtcaaagcttctatcactcttcttgctgtaatttgagaagcaaaagcattaataaccagttacttacataactggtattgtaaggcttactggtggcagacagcattcctgtgagcagtattagcacacctctcgatgagaatggctgtgaactacattctttggagtaacaataagaaagactatacaaaccctggtcctctgtctacagtgaatgaacacgctcatcttttcttcccacagtgatttttttccagataacatattctaatggcatgagtatattaaaataaagtcagatagggtgaggaggggcatgctaacaaaaataatctgtcactcttgccaaatggaggtaatacagtcacaatatttacaagtaaaatggcagggatgtaattgaaagtacatctatatatcatctatatatcattcatatcattcttcaagctgttatcacagttccatctttgactgatgcctcttcaatatgttgtataatgtactatagagttattcctttttactcttttgctcatggaaataatttgaaggcttttaaccttctgatctcatttttcactttgttccagacatggcttactctctctgccatggaactatcagataaaatgcataatttgattagaccaaaactgtactaccatcagtctgtcggtcaacacaagatatattttaaggggatctacacaaaagtctgcatgaaaatattccatataaagaatagttacataaaccttaataaaaagaaaatactgggaagcacttagtgtctcagattctggaatcaaagctctctttcttttcgtttcttttctcagcgattcaaatgaccactctgatattttctttgccaaattaactttagcattggaggggcgtttatatagtatctggcttaaagctattatttttctcatttgctctgcagacatttattgatcacttactgtgtgccaggccctgtgataggaatggaggtagagaagacacaatcccttgccctcaaaggtttcagtgacagaagaaatagatgaagagaatgaggcctgaagtcatttgctcatggtcctacaggcacagagcaggggtgcccaacccccgggccatggacctctaccagtccgtgacctgttggaaccaggctgcacagcaggtggtcagtggcgggcaagtgggcgaagcttcatctgtatttacagccactccccattactcacattactgcctgaacttcacctcctgtcagattgcagcggtattggattctcataggagcgtgaaccctattgtgaactgcacatgcgagggatatattttgcgtgctccttatgagaatctaatgcctgatgatctgtcactgtctcccatcatccccagatgggaccatctagttttgggaaaacaagctcagggctcccactgattccactgatggtgagttgtataattacttcattatatattacaatgtaatagtaatagaaatagcatgaacaataaatgtaaagtacttgaatcaacctgaaactatccccatgccccaatccatggaaaaattggagaccacagaactggtccctgatgccaaaaaggttggggaccactggcatcgaggatagaatagggaccagaaagagattgtgcagccgtccttctagatctggttcttgtcaaccactccatctccctaatgtgggacatggcagaagagttacaactagagtaaaataattcttgttgtgagttgcaaactttatgggctccatgtttaaattatattattaaaatatgtattttgtgtttgatattaatctcatagacatttaggagaacgattagatttctgatgcctctaggcattcagaagtctctaactcacatgctgcattgtctgaaaggttctattttgtgatagtgcttcttgggcatcagtggggacagcttagaaagcttgtcgttgcatctaaataaatactgagagtttggatatgtttctaagttcctttcctttgaactgtggggcataaatctcacgagacagcttgttctcaagaggttaccagtacgtttggttctagtctgtccacaaatattgtgagaacaggcttattcagattattttgacatgctcagacaaggcgttccgaaccatgtgagaaatgaacgtgtgtgtgcaagggaaatacacacaatgctactgagcctctaagaggctccattcctcgtgttttgaggagtggaaattgtctcaaaaaatcagcatctcagctctcattcctaatgtatcagaatctagaagttctggttttggaatctgatatagtgagaaatcagaagatgtcctggggtgtgggagaatgatatgttctttagtcgagtttaaatgagtttattccttaacttagcacttccccagtggcacaataagcactcagtaaatgtttattgaagtgaattccaattcctgatttgaatttagtgttggagaaattccagtcaccgggctgataaaaagtggtgtcagattactggaaaaaggactatgtggagaagctgcttgcaagtaataaactctttgtgttagagtcacctgttttacccaatgcctagcctagatcgttgaaaaggaaattgaaggatggtattcagattaagaaacagatccctggattatgtttaagaatttctgggaggagccaagatggccgaataggaacagctccggtctacagctcccagcctgagcgacgcagaaggcgggtgatttctgcatttccatctgaggtaccgggttcatctcactaggcagtgccagacagtgggcgcaggtcagtgggtgcgcgcaccgtgtgcgagccgaagcagggcgaggcattgcctcactcgggaagcgcaaggggtcagggagttccctttcctaaccaaagaaaggggtgacagacggcacctggaaaatcgggtcactcccacccgaatactgcgcttttccgacgggcttaaaaaacggtgcaccacgagattatatcccgcaccttgctcggagggtcctaccccatggagtctcgctgattcctagcacagcagtctgagatcaaactgcaaggctgcagcaagactgggggaggggcgcccaccattgcccagacttgcttaggtaaacaaagcagccaggaagctcgaactggggggagcccaccacagctcaaggaagcctgcctgcctctgtaggctccagctctgggggcccagggcacagacaaacaaaaagacagcagtaacctctgcagacttaaatgtccctgtctgacagctttgaagagagcagtggttctcccagcacgcagctggagatctgagaatgggcagactgcctcctcaagtgggtccctgacccctgacccccgagcagcctaactgggaggcacccccctgcaggggcacgctgacacctcacacggcagggtattccaacagacctgcagctgagggtcctgtctgttagaaggaaaactaacaaacagaaaggacatccacaccaaaaacccatctgtacatcaccatcatcaaagaccaaaagaccaacattagacagatcaacgagacagaaagtcaacaaggatacccaggaattgaactcagctctgcaccaagtggacctaatagacatctgcagaactctccacccgaaatcaacagaatatacatttttttcagcaccacaccacacctattccaaaattgaccacatacttggaagtaaagttctcttcagcaaatgtaaaagaacagaaattataacaaactatctctcagaccacagtgcaatcaaactagaactcaggattaagaatctcactcaaaaccactcaactacatggaaactgaccaacctgctcctgaatgactactgggtatataacgaaatgaaggcagaaataaagatgttctttgaaaccaatgagaacaaaggcacaacataccagagtctctgggacgcattcaaaacagtgtgtagagggaaatttatagcactaaatgcccacaagagaaagcaggaaagatccaaaattgacaccctaacatcacaattaaaagaactagaaaagcaagagcaaacacattcaaaagctagcagaaggcaagaaataactaaaatcagagcagaactgaaggaaatagatacataaaaaacccttcaaaaaattaatgaatccaggagctggttttttgaaaggatcaacaaaattgatagaccgctagcaagactaataaagaaaaaaagagagaagaatcaaatagatgcaataaaaaatgataaaggggatatcaccaccaatcccacagaaatacaaactaccatcagagaaacctacaaacacctctacgcaaataaactagaaaatctagaagaaatggataaattccttgatacgtacatgctcccaagactaaaccaggaagaagttgaatctctgaatagaccaataacaggatctgaaattgtggcaataatcaatagcttaccaaccaaaaagagtccaggaccagatggattcacagccgaattctaccaaaggtacaaggaggaactggtaccattccttctgaaactattccaatcaatagaaaaagagggaatcctccctaactcattttatgaggccagcatcatcctgataccaaagcctggcagagacacaaccaaaaaagagaattttagaccaatatccttgatgaacattgatgcaaaaatcctcaataaaatactggcaaaacgaatccagcagcacatcaaaaaacttatccaccatgatcaagtgggcttcatccctgggatgcaaggctggttcaatatatgcaaatcaataaatgtaatccagcatataaacagagccaaagacaaaaaccacatgattatctcaatagatgcagaaaaggcctttgacaaaattcaacagcccttcatgctaaaaactctcaataaattaggtattgatgggatgtatttcaaaataataagagctatctatgacaaacccacagccaatatcatactgaatgggcaaaaactggaagcattccctttgaaaactggcacaagacagggatgccctctctcaccactcctattcaacatagtgttggaagttctggccagggcagttaggcaggagaaggaaataaagggtattcaattaggaaaagaggaagtcaaattgtccctgtttgcagatgacatgattgtatatctagaaaaccccattgcctcagcccaaaatctccttcagctgataagcaacttcagcaaagtctcaggatacaaaatcaatgtacaaaaatcacaagcattcttatacaccaacaacagacaaacagagagccaaatcatgagtgaactcccattcacaattgcttcaaagagaataaaatacctaggaatccaacttacaagggatgtgaaggacctcttcaagaagaactacaaaccactgctcaaggaaataaaagaggatacaaacaaatggaagaacattccatgctcatggataagaagaatcaatattgtgaaaatggccatactgcccaaggtaatttatagattcaatgccatccccatcaagctaccaatgcctttcttcacagaattggaaaaaactactttaaagttcatatggaaccaaaaaagagcccgcatcaccaagtcaatcctaagccaaaagaacaaagctggaggcatcacgctacctgacttcaaactatactacaaggctacggtaaccaaaacagcatggtactggtaccaaaacagtgatatagatcaatggaacagaacagagtcctcagaaataacgccgcatatctacaaccatctgatctttgacaaacctgagaaaaacaagcaatggggaaaggattccctatttaataaatggtgctgggaaaactggctagccatatgtagaaagctgaaactggatcccttccttacaccttatacaaaaatcaattcaagatggattaaagacttaaatgttagacctaaaaccataaaaaccctagaagaaaacctaggcattaccattcaagacataggcacgggcaaggacttcatgtctaaaacaccaaaagcaatggcaacaaaggacaaaattgacaaatgggatctaattaaactaaagagcttctgcacagcaaaagaaactaccatcagagtgaacaggcaacctacaaaatgggagaaaattttcgcaacctactcatctgacaaagggctaatatccagaatctacaatgaactcaaacaaatttacaagaaaaaaacaaacaaccccatcaaaaagtgggcgaaggacatgaacagacacttctcaaaagaagacatttatgcagccaaaaaaacacatgaaaaaatgctcatcattactggccatcagagaaatgcaaatcaaaactacaatgagataccatctcacaccagttggaatggcaatcattaaaaagtcaggaaactacaggtgctggagaggatgtggagaaataggaacacttttacactgttggtgggactgtaaactagttcaaccattgtggaagtcagtgtggcaatacctcagggatctagaactagaaataccatttgacccagccatcccattactgggtatatacccaaaggactacaaatcatgctgctataaagacacatgcacacgtatgtttattgcagcattattcacaatagcaaagacttggaaccaacccaaatgtccaacaatgatagactggattaagaaaatgtggcacatatacaccatggaatactatgcagccataaaaaatgatgagttcatgtcctttgtagggacatggatgaaattggaaatcatcattctcagtaagctatcgcaagaacaaaaaaccaaacaccacatattctcacttataggtgggaattgaacaatgagatcacatggacacaggaaggggaacatcacactctggggactgttgtggggtggggggaggggggagggatagcattgggagatatacctaatgctagatgacgagttagtgggtgcagcgcaccagcatggcacatgtatacgtatgtaagtaacctgcacaatgtgcacatgtaccctaaaacttaaagtataataataataataataataataaaagtttgggacgaaaaaaaaaaaagaaacagatccctcatggtatcccataaaagttaccttaatttatgaaaatccaacctgtgcaatatgggtatcttttttacaatagaagtgatttatatgggctactcttcccatagcaagagtctcattgccttaccatatagctcttttggaattttttttttttaaacttgaatatatcagaatgatagtaactggccactggagaaaaagctctgacctcaagccaaagagcaatctgtctacatgtctataccatggcagtgattattgataacacaactgattattgtaatcacaacttcccatacagaaattactatttgtattattctccaaaaaataaggccaaatgccataatgtgttttttcagaaacagtagaacatactcttagaatgatgtgagtgcacactcactctcattctagtttattctaaacgagaatctgagatgaatgttccaaatctctccaatcacaagggaggagggtacatttgcagtggatttttctcagaaggttaaatctaaagaagtaattaaggctccacatttctgatttgcaggaaactgcgttatgcatttcccttggatgaaaataagtaaagaggataaaggaagactctcaaattgcagtctgtgtgacctgtttttgaataaacataatcatattccacagtcaattatctccaaagtacagtgtgttctccagccagagcgagagagtgagaggaagaatgtcagttagaagtggttagagaagaggacacatgcatagaagtgtacatctttctattgtcctctgaaaatttttatacgatttgggaggggttagtggggaggattatacagtatttttatgtgatttcataaatgtcaaatttcagtcatcagtaagagaggcaagcacaggtaggaaaacaaaatgagatatgttatgttcagcacagtaataaggctcctaataccaaaggaaaaacaagtcagtagttacaactattgaatagaagtggtctaatcggagcagcaggatgcgtatcccattttattatggcttcattatgtgttttgcaaggctctttggcttgccattaaaataattttgtgcagcagcactgtgaggactcagaatccaggagcgtaactattattttcttttcttctttgttttctttttgaggtaaagttggcagcaaaggaaggtttcggatggaccaagtatagacacaacacttctgttaattcacatggggactaggcagcctcccacaatggctgtgacattcatcctgttctgatagaaactccctgctttctgtgtggcctgggatttgaatctggaggtctttgatccttagcctctcccgtggctggttaccggatggaacggacctgatctttcatttcccaaagaaggcctattaccatcagaagcaaaccgcatccttgcttttatagcagttgcgcttgataattattggtgatactgacatctgcccatgcttacttcatattcatgagcctgaagtggaattttttttttaagctaacatccccagttttggggaatagagtatttcctccaaagttaaaccctgaggtttatttcagaaaaccagtagtcaagtacccttcttctcactgagctaagaaatcctcataaattatttatttcccattttagacattggacagtgactcagtgtgccctggaaatattatcactgtattaattttctcatgtggctcagcataatgttagagaaatggatagttacaggtccagacactataaagatggagctaaatattcttctaaaaataggatgtttggttaacgtttagtagtcaacaactttcctgaagccacacacagtgccggactaagaaatggaataaatgtcctcatacagtatttggtgaagtctccctttaggagattaagcttttaatgttaaagattcagagtattttagctttatccctgagacttattatttgacgtgatgacatctttaactcaagaggtcaacaattgggataaaatgccatgctgtgggtgatggacgccataaaagtaacctgataatcggtcgggtgcggtggctcacacttgtaatcccagcattttgggaggccgaggcaggcagatcacctgaggtcgggagtttgagaccagcctgaccaacatagagaaaccctgtctctactaaaaatacaaaattagctgggtgtggtggcacatgcctgtaatcccagctactcgggaagctgaagcaggagaattgcttgaacccgggatgcagaggttgcggtaagctgagatcgcaccattgcactctagcctgggcaacaagagcaaaactccatctcagggaaaaaaaaaaaattaacctgataattgagttttagttataaaagtgccaaaatgctaaaagaatttacagtttctgaccactgaaatattttgctctagcctgggtacaagaagaagcgagtttgagactaggaatgaatgagaggaaacttttgattcttactacataggttccttttagaattttgaatgtttagagctagaaattgaatattcattattctagcccagacattttacagaggagaaagtcaaagtttcagagatgaaagttgtacccagggccacacagttaggttgctgcaaatattaagagaacttacttcacttaatttggtgcatttttattcttctatttatagacgagtaaaatgtgctgagaccagtgcattttaagctccaagactgtcacttcttcatttgtcttaggcttttagattcaattaaataagtaatgcacctaaagattcatcagctgggaatactgtctcaccactgaatgacttaagagagataatattgccttgctgaagacatattataaaaatctgagaatgagcatgtgtgaagctctctgatactcttacaagaagtgaagtataagtagttgtggattccttcaaatgaaacaaaatttttctggacgcctttttagatagagtatatgcaacccaggagtatagatgtgatgtctcctgtcctgtgcaggagtataaatgtgatgtctcctgtcctgtgctcaggcaggttaggattctggcagaccatgagacacccctgagccatcactttaaaatgccccgtatttcagtagcgtctatgtgctaggatttctgtttgggagtacaaaaagcaatgagattgtttttcttgagtaacctgaagtctactgggaagaacccagtggtaacccaaatagctatgacacaaggtagaaaatagtaccaaggtagatagagataaaacctttgatacttaaaggaagacagaaatactgctgactgggaattttagaggaattttcatgaacaaagatcagtaacatcatccactatccatgaaatattgaactataaggcagttttagtactgggaaagaaaaactacatcatacctaccagtaagaatctcatgatcatcatattttaataaaagatgaagaggtaagatcgcttattctgtgttccaaagaaattcctggaggagaagggatctgagctagactttcataaatagagatgatttggatagaagaacaatttagagcatcctggtttgaaagaacaaaaggatctaaggcagtagccctgggaatgtacttcacaagttcaggatcaatgagtatccagtttagctaaagaaaacaattctagtgaaagaagtaaacaaacgtttggtaggatgaaatggttccatcttatggagaagcttaaatattgatccaagaattttgaacaccctagtggacttcaggagaaccttgtgactctgagcaaagataaaaataaattgatatgggaaatgatgttcctttcagattagagaaactcctgaattaatctcaaatttggaggccgcttagtataacaaaaaagtatattttcaatattgctgatatgtaatctaagaatggttctctcttcctgtcactgaaattcatctattatttattccaagctttaaaaaaaaagtactaaaataaaattgtgtgattgagcattgcaaaagagtgggtttttataatgtggaagccaaaattttttatcagaaaagaaaagagaaaaaagaatctatgctgagaggagatggccaactactacatagatttattaactcaacaaaagggtgaccagttcttccaaacctggtatttgttggtcgtatctattacaaggtagctgtggcttggtgcagggtgcagacaagagagggaacaggaagaaagagattagtgtaaactgtgaaatcaggcaaagctagactcaaattttgtctctgttttctagtaactatgtgtgaccttgaattattgaagctctctaaacttccactttcttgtttgcaaaatggtacgatggcatctacatatagaattatagtaaagagtaaatgagaaatacatgtgaatacctagccgcttctggaaaatagtatgtactcagttactggttatttttattatcgttgtaattactatttccagtgatgtgatgcttattaccttccaaagcaagtacttttatatttgaataagtgaaagctctttcccattatttctaaacccttgtcctacttctcagttctagaactttttttttttttccttaatggaaggaaagaaataaggaagggttggagagagagagagaggaaaagcacctttgtttgtatgctttctttagatacgttgaagacaatactcacaaatctcttcagtcgtctctccatttggatggccatcctcagtgcttaagcacttcttcataaatatgattttcagaagcatctgaagcatctgtattcggggtcctgtcctcatccctgttaagaaatataaggctcaaaatcagatgttgttatgtgaggtgtggtctcgtgcatggagtacaaggtcacttttcattaggagacaaatgcgcagtaatacctacagtgtgggaacgtggatcccttctctttaatatcagttttgccagtgccctcctttgtaacccagagtagcttcagataaacctactgagcccttcttttcttgttcataggaaaatatttttaaagggatagtgcatttataagaaaatttttatatacttcttttaccctgagaggattgcaaagtttgtcatgccctgattgacaaatataagttcaaaaaaaaaaacagaaaataaattccttaaataatttatatcagacaaatggatctgaatctaagcaaaattttcaggaaaaaaaatgtttataatcattaggtaaaagtagaattctgaccttatctttatattttctttatattttaaagctttgcctacatattccaagacttggctttcagttttcctaaatctaaacagagaaataaatgaaatcatgtctaagatttcttccgattttgacattgttatatgtccttacctgtaaaatgaagaaaatattttttctttttatcagggttgttgttaggaagaaatgatattatggatattgtgtttcagcctgctagggacagatactttcatagcttcattcattcaccctagggtaaaagtatcagtgttttcttctttttccttcaggatttattccttagtcagggagtgaccaaggatggtcagccagaacctcagctggtcacctggagcataatatggtaaacagaaccatacccaaagttctgtttacggaggcagtcctggctaccagtgaatgatcaggaaccctataagctagcccctggaagaacaatgatgctgattttatctgtaaaataattctttgcatacaaagtactataaactcagttggttctccctgcatatttttgaatgattgtaggcagagtttttgttatctgttttactaatgatgcaactgaggcccgcaggagtcaggttgcctataaaggcaaggatgtgcatatagaattacccaaagcaaattggtattttgtggggcacaacctcaaaaccactgatatcttgctacatttaagtacaaaaagctcctatatgccacagaattagaacattaccagatcttaaatgttccttagaaatcacctcaactgatgccccacatttggcagaaagccaaaaagtttctcagctaggaacaaaacacaagttccctttctatcacatggtgctgaagcttagatgcataaactgaacaaatcatcaggaagctataaaaggaacaaacaaatacagtctctggaatcattgcaacctcaatacacatctcattgccacttcctggacatttgtgtctagctaggttgcttcccctgcctgagccttactgtgaatatgtgccaagcagagtgttgctgttaattgagctagataacatgccagtgtctggcctagttcttggcccataataggtattcaactaatatttacttcttttcatccactcacccttcttcttaacagttggaacccctgttttgaactgttcacttctactctggatttccctgtgtaagctcacttgcagaagagggtggaggtgaacacactgcatttcccaccatccagctctgacctgggcccaccctgtgcaggactctgctgactttgggatgccagctgtggtcctcacacagggctcactgtatccgggggcctggcttgatccggtaaagagcgtctgctgcggtgcctgatggaaagtgcccgcttaattgggagatagggcttcatgaatggatctttcattagttgaaaaaaaaaaatatttgcctgcaaggactgtaaacagaagacttgattcacttgttccttttctcctgccctctcttgggttttgtttgacttagcgtgtttatacctcaggacacagctggtactaatgcctttccaaggttaagaaagctttccctgccattccctatggtcccctttgtgtactttcaagagacaataaaggaggtgtggatgtgagacagagagtgcattcacattagtcctggctattatggggacctcagaacaagcatcacctccaccctgtctgcatggatttaagagagagcatctgagcacctgagcttacctcaaacacgttctttgaagaagagtcactgccggtcatttctgtaatgtatcacagctgtcctgacctgatccttctctgctctatcgtggctactttagcatatttttctcaaaaagtgttcctctttcataattaaaggtgagggaagactggatgaaaaaagctgtgggatatggtcagcacataaggcctgtggtcaaagatgggtcttcagttacatcgtttggtcttactaagcctcaatgttctcatttgtaaatctggaataatcattagacctttttcactctgcttgttgtgaggttcaaacatgagactcaatgaaaaagtactttttggacaatagaacactacataaataggaaaattttaatggaaccttcctcatattccattaatatgttggtgctctgcattatagtagtactttagttgacttgagcacatgatgtagttgactttagattaaactttcactaagtattacttagaaaaaacgagccatcatgtgattctacagtctttatgggctacatagggatggtgaattcttttcaccactagcaaaggctcctaaaggatcatgccttactcccactccatagatgaagaccttaggcccctgggaatccattgagctcacagaggtttacataatgccaaatcaggatgggaagttagatcctgcttagtgctcataactggcttatgaggtttccatttcagacaatgaatactcatcaaggaggattggtggggaaccatgagctgttcatgtgtactgctgcactcacgtcgtatccagacacccagatatcatctctggcccactgcagtaagatctctgtcttctgtcctgtttgtctctccttcattcattccttcatttgctctatctagccttcatacttcttgaatcactttgagtatggtacccttattttaaataaatagtaccctcatttgggtatttgtttccagtgttcctgaggctggggaatttctccagagtttaatgatgactctggtgctcaagcaccaagaaaatttccacttgagatggatctggcactggaggtttattttttcccctttctattttattgttggccagtttgggccagcatgttgctaggttgtattggtttcttagctcttgtaaccaagctaagatgcacatgtcaaaaaatattttttcttcctctctaaaaaggtttttcctcttttctgtaatgcttcaggaagggaaaagagtgtttgcttgattctaattctggcatatgaagtgtttgctacaaaatgtttttatcactgtgttatcttgtcaaagtgctatcgtcattgtcattttcagtttaatagcaggaatgttccattttcacaaaggatattccatattttaagtaaactcaacaaaggaaatttcaaatgcaaaaaaatattgatagtgagaagctaattagtttttttatttctcaaagccctacatttaaaatagctttaagtttccagtatgtcatgctctgacagtagcatttacaggtaaaggatgatgcttaactaggattatggttacattgtaaacactcaagccaaagaaaaatatatccttggacaaaggggttaggatgatttgccagagtggcctccagtgtttggatgacagctacatcactgtgatttaatgcacctttagtttcaggagttgtatccagactagtcctcatctcagcctcaccaaaagggactggacttaaccacaatagaactcagagctcctgcagtgaaacccagtccctttccatgcgggaagtgataaccgcaggtgaaactctgagctagggaaataccatcttggtagtcctgaagtgatagcacttacattcttttgccaggcatccaaaatcctttattcttcaaatagttgtgaaggttttttttattattatataaagccttgcagtgagtcatagaagaaatgcattggggtctgagacagagagagagagatgaaacaactataattcctgagtcaactatgattcctgtcttcaagagtctcatgattaagaaatggagacaaagcagaaataactaattccaacttcctaagctaaatgtcataatgaacaaggaaccaaggaagcacatagaaggcttaggtaaattcttcctgagggaattcctctgttataggtaataattattaagcttccaccttgtcttgtttctatgtctctattattatttaatatttacagctaaagctatctatctatctatccatctgtctgtctagagttcctacctaatggtatgtttcagattaggatagatttctcacttgaaacagtctgtctgatgttttgcatccatccatccattcattctacaaactgttatgccctctatatggcaagcattttgctatatccttactacagaattcacttaggcactaatacctattttaattatggagacaaaaacagctaagaaaatgttatcactccatagatgagttaaagaaaaaaaacagggagaatttcttgaaggtgatgtcaatattatcataaactcaggcagtccatgctgaaaatgatttttttgtgagccagaatcccctgtactcatcatttattccctgatttactgcgttttattctgtatcagatgatgtgctagcataaagcggggacataacatcttctgatatcatgagacattgtttctaaacctcttttcttggtgattagacctatgcttgtgcccatcagagtcaagggttgtggacacttgctccgctgcttgttttttctgctatcttctgtccttgttggttgcattctaatggacctataccaagtgctgtcagaagatgagagactacaaatcagattccacaaggatgttcacaaataataagcatttggttgcaatttaaaattggttggcagagcaatagggcatttgattattaggattttacattatctgagtgacttggaaatagaaaagaagggacttgtattatatgtccagaaaaaaagtccagcaaactataatccataggcaaaatccagtgcactgctgtgtttgtaaataaagttttattggaattcagtcacgcccatttgcttatgtgttgtctatgtctgatttctgtctacttggtggcattgactagttttgagaaaccaaatgacccacaaactttgcaatatttaccgtctctttattgaaaaggcttgaccctctataaaaacgaattaatcctgaaggagaagaaaaaataaatagggaccctaatcatatttttaaatttatacagcatgcagttttgaaacactcagtcaatgatgtagaacaattaaaaagaaaaaataaaacctgggctaagatgatagacaaattccctttcaacttcaaccagtttgttctgaggatattgtgtgcttcaggaatttctgccatatgctgggatattcagacatatataacgcagtctgccttccaggaacccttagtctgttagtggagatggacatagaaagcagcaaatactcctttgtgtaactcatgctgtatatgagataagataatgaggcagagaagagttggagagtagagatggcctggcttttgggaatttggggaagatatcataaaacagtagaaacttaaactatgtttgaaagcatgaactcatgatagacgggcaagggtagaaacaatcgttttatttctagaagcttcaactctatcttgaaatagtttgttgtgtatattagtccgttttcacgctgctgataaagacatacctgagactggacaatttacaaaataaagaagtttcaatggacttatggttccacatggctggggaggtctcacagtcatggcagaaggtgaaaagcacatctcacatggcaacagacaagagaagagagcttgtgcaggaaaactcccattttcaaaaccatgggatctcacgagacttatttactatcatgagaacagcacgggaaaggcctgcccccatgattcagttacctcccaccaagtccttcccacaacacatgggaattaaagatgagatttggatggggacacagccaaaccttatcagtgtgtttataatggcaccacagtttctaaagtattatccattatctttttggtctttataacagaggttggttgtaatcattatctccattttattagtatttcttaaaaggcttcatcaaagcagttaaatgactttttcagggtttcactgcttataagtggtaaaagttacctgaccctacctctgactctaaagccacaggactgtccccttaaatcaaactttctggcctaagtctacaggtattccccagaatttctaattgacatgaaatgcaagagaaaagagtctttgaattttcctgcactggagcaacctgccttattccagacattgccaagaaattgtttttgccactgacattattgcgcatgctgccagtggaagtaatagtgatctggacttcatatgctttcaccgaacatgcatatggctcttcttattagactgtcatagggctcccttactttcaactttccttggaggtttctctattttctgtcctcttttcctttccttgtttctgataccagcctatagaccctctgtcaccagttgggtttcttcatcacatggttttctccttctcaggtggagttttggccagagggaggagaatctgttcaattaaacagattctgtacaacagattctgtataatgcaaaacagaaccgattctgtaaaatgcaaaaaaaacccttttctcttgcatttcagatcaattctaaattctggggaatatctgtagacttaggccagaaagtttgacttgaggggacagccctgtggctttagagtcagaagtagggtcaggtaagttttaccatttataagcagtgaaaccttgaacaagtcatttaactgccttgatgaagcctttaagaaataataattaaacatcccctggtatttgagaaaagaggtatcccaagtcccaccgtttaccaggtcctattactcacaatgctggtaaccataggtctccatcccttatgctcactcctcttaccacgccctgtctaggagctacttctacatttatgtgctcagtcttctatccagaaccctacccccaaatgtctaagctcctcacacctcagttctctgtcttgggccatggaacctctaacactggtttggaagtgtgtgtctttttcctcaggcagctggagcagagactgattccactgccaattcttgcctcaagaagagttgtcttgagacaataggttgaagctttcactacatgttcttttagcaaaaaattataaagcatagaggttgagatgggctctggaatcagactacaaagattctgatcttaatgcttcagttataagctctggatgttgagcacctctcctaatctccccaagcatcatctactgaaagggggcatcacaggacttccctcattgagctgttgtaaggattaaatgagcacatgttaagtttctggctgtgtaagtttttgttattacttttcttttgtacttgaacttgtcataccatgtttctattttgggttcagaaaatatggttaacataattataggtgtaatagaaattttggattagcctgtgaacataacacacaattatagcactgttttttttaatgagagaatgaattcctgagttctaaacagatgagttacaaagaaactcttggactgaagtcatccatatataatagatggtccagtttggagtagaagactgactgtgaaagataattgaaagtctgcaaaaatattttttactaaatgcactgtctttttgagcttgcattcataggcacatctaacgcacctgccccaatgtaaccaatcaacatcacatacagccctcagttactaagtttatgaggtaaatttattttccttcttggtttttgtttctttgcattttgatctttttatgtctttgtttattaaataagaaattagaatctctgatcagtagattggctaggatctgcttatgagtcttagatgcaaaactgacaaatctttaattggttgtgccatcgtatctgtcctcaggcttgttagctaaagctcagttagtgatttgccaccactgccattgcttggtggtagaatagggtaaaggattatcatgccagcatcccttgtccgctgtgaccttagtcttagtgaacaaattttcttgtgtgctttctaaaatgcccatgacccttatttcatacttaggaaatagaagtcacaaagatttcctgaggacctcatcattatgtggagctaggaaaagtactgtggtttatagctctgtggtttacacaaagggaaatccaattgatttgcacaaatacacaaaacaaaatatatttaagtgccatgaagagaaacgatgttctttaggaattaagaggaggttcagaaggaaaatggtgttgattgaatctggccaactgagcttggacaatcagtgacctcagggaaaggagtgttaggaaagagacattcctgacagaggaaataacataagtagacagggagatagaacattctggaaattgaatctgtgttaaaatgccttaaaaatggtgcatcatacgaatttagcgacatttcacttcaagattcttacataccttagggtgaaaatcaacaaagaccttaaaatgcagacaattaactctttttctctgtgttgtgtgtgtgtgtgtgtgtatgcgtacacacatatactccacatatctccacaaatcaatgacaatatcaaatggagcaattttccacaattttctccaagaaactgcatgcttaagcactgcactcagcaaaatgttgtaagtccatcaatatttctcagtcttgctgagtttctgcatgacccccaatagcttacccagtctcttcctctataagtaatgatcgcagattctacatctgcaagtacaagaatcctttcacaaataaattccagaggactccaacctgcagtgtctttagtgagtcagaaattaggaagatagcttcaatttggttatacccagcaggaaggaaacaatcctaatcatactaataccaatggaatattgtagtccaggagtttgatggagtttgaccagcatcctttagaaaggaaaactgcataaattaaataatttatatggaacaaacatatgtgtaatatgcatgtaaaataaaatggcaccagttattaatcaggtgaatgcatatatatcatagagaagtcaactatgaccagaagatacaaaatgaactgttctttaggctcatgttttgttttgcaatacagggcaggatattctctcttcctttagccttaactgatctgcttccatgttctagtcacttgaacattgatatgcatgtaaaataggcccctgttcttccattaactagaaaataaaaaagtgcccagaagggaagtttccatttctagcagcacgtagaaaagtgccagagtttgatcaggaagtggtatcagggtcaagatgagggaaaggacatcagaaaaaaaagtagaattatcctgttcacttcaaggaagacacacagcataaggcgggttttagaaaaggattaagagaaaattggcagacagaattagggagattgcttaatcaatatcacaatataacgatgctgggtagaagatgcatggaagaagcatggattatctcaatgactattttattttgaagatagtgtgattatcacccctggggatgctggaacattacactggggatttagtcaccaactgaagcagatctctgggttgaatagatcaccatgaaggttgtttccaaccttaagttttcttaaatttcagaagttcaatgagttcttctccaaggatcaaggaggatatctactagaaatctactatagaatagagagaattggtctatacacaagtttatttaaattaaataatcctgataccattttgaacttttcagtcaaaacctaccatatgcacctcttaccagtgacttcagtgcttccttatacaaggtgcaagcggttctaatctcacattaaaaaaacactttgggccagttgcggtggctcacaactgtaatcccagcactttgggaggccaaggtgggtggattacctgaggtcaggagtttgagaccagcctgaccaacacggtgaaaccccgtctctactaataatacaaaaaaaatagccaggcatggtggtgcatgcctgtaatcccagctactcaggaggctgagacaggagaattgcttgaacccaggaggtggaggttgcagtgagccgaggtcacgccattccactccagcctgggcaacaatagcgaaactcagtctccaaaaggaaaaaaaaaaaaaaaacactttgattttagaaagaaggtctgtgcccaggcgctcccaggtgctgccaggcctcagaggaagggttctgaagacaaacctgactgcctccttccacatgctatgtctgcaaatattggctgccttcaagctcacagcctgtgacagcaagttggtttcatttcttaaagttgatcttcaaagccgtgaagcaatcgcaaactgtttgagatcccaaatcaaagaacagattgtgtagactcaaaaaaagcaaacaaacaattacatttaaaaacaaagtgttggaaaaaaccagcaacaacctttctgctcacctgccaaggccttgtggctaagcttctgtttttgccaaattgtagcaaatcacatcagacagtgtccttcttgtactactgacaggtgacccatttcctggtggttaaatctggagggatttgggagttcttgctcttaacatgactttcccactgactggatttgtgattgtaagcacatcacactcatttcctccatttgaaatgcaggttctctgaagccttctggcttgaaggaataatagtgagtaatacctaacattggtattgcacagcatgccactgagggctgcccaatagctctgtgaaagagatgaggaaacaggattagagaagggaccagctcacagtcacaggactagtaaattatgaagtgagaattcaagctttccaatatcccttgttcttcctactacatgataccacttctagctaaccactcattcagtagctcttgaaaaggatattctgttacctcctttgaagataatatttgatccctactttctcacagggctttccaaatagagtccacattggcccatttccatggaacattttgctggtctttaggtattttattaattgctgaattgtttaggggttttaagttgtctaaggagactatatctgaattcaattatttttttcctctttcccctcgagcatgcacattctttgtaatactgtagtgatgtataagttttcaagagctgtcaaggtgtatatatatatatatatatatatttccaaaagcagatagtatagtacatttactacagttgtttcactttgatatggataaaaaatgtataaaaaaggcaaagaattctgtgagtgtcattacaactttaatttcaaaatttttgcccttatgttatttgctatacttggctttcctcgacattataaatcattgatcacaggctggtataaatttagcattaccagtggattctgcgtatttgatatgctctttttattttggttttgtcagtttgctactcgtgagtttatctttgaacagcttcccatggctatgggattaggtctgtactccagagcctgatatctatgggcctttttttcttagcctttctagtctttttaccccatatttcttcatgatatccatagtttgtccaacctaaacaaagagctagtccccaagcacactaacccgttacattcatccctctgcttttaatacaattgtttctctatagagaatacctttaaaaatatatataagttggctaagctcaaaaacaccacttctatgataatactcttacagattcttccatttgtaaatatgcatgctcatagtactcttacagcgttggtcctctcttataacattgttagagtagatactgtaaactgaaaagtgacacataaaaatacataatggtgcagctcagatatgtgtcatcttaatattcctattaaccttagaactttgtgactgtgttgggattacttgacatatttgtttatcaatcaacacagtgacagtgacaacgaatgagtaaccagtgttttgtttttgaaacatttgaagaagtgttccatatttctgaagttattagtttagtttaggttagtttagtttagtttagttttaacgacagagtcttgctctgttgcccaggctggagtgcaacagcgtgatctcagctcactgcaacctctgcctcccgggttcaagcaattctccctgcctcagcctcccaagtagctgggattacaggcacctgccaccacacccagctaattttttgtatttttagtagagatagagtttcggcatattggccaggctggtctcaaactcctgacctcaggtggtctgcctgccttggcctcctaactgaagttatttttttaaattaaactaatacatgcaactggcttaacaaactaataggactaatgagtctaaaacaaacgacataccctccgtgcttctcctctctccactctctcaatcctacttcacgaaagacactcttggctgcttcttcctggcatttgcacagcttcatgtctaaaacagaaatgcatttctatctttggaggcataaatcttagacattatctgtggattaataacacaaaagacacggatatgccatccatataaatgtttgactgtttagagcttcctactctgggaaggattgacccatctccctccaaaattgagaaaagggactttcactggacattatcttcaagtccttgcagtgttccagaaggtgtgacaatctggtcctttggctggctgcattactgacctgctgacctgctgttttaggttgattatatttgcctttgagccaaaagagttacttgatgatactccagagccccatttccacacaacacttaggtttaaaagctgcaaaaatggatttaatgaaataatgatggagtgatttgaagatttttcatgtctttcaggaaacacaaggtgctcttagtgaccacagagctagcagcctcccctgcatctcaactttatgtttccaaatatagtctagatgcttagtaagtgttaaaaaataatagtgcatcttgatgcattctttatggtgtaaaataacctgttaggtatcagggataatttttcttcagcattagatggctgtttatgtatgatatatttctctgtgtccctgggacctaatgatcgttgaatacaggtgaatagaatgttatacagtagatggaacatgattatcaaagtcaggagacctagactcagttgctttctagcaaggcagtcattaattacatgttacgtcttttatcagaacctcagtttggatctataaaataggattactcatttccaccttggaactgtttttatgtaaccatcaagtaagccggtaaatatagttatctgtgtagttaactagctgctaacaaaggaatccagggtggcctttaatatatgttcggaatatatttattcaacaaatgtttcttcaattgttttccaagttagatttataaaaaatgagagcctggcaggcaagcaggcaagttggtagcttgggatgggatccactacagcacagaagtgcagccagagacttgctcctaactccccacggattgctacaaatccttgctccaactcgcagcttggcaagggatcttgctatcagccttctctcatggaacccattgtgcatatgaatatttgattagcttattccattttcattttatactattagttctccttgtggggttagatcctatgcacacacacacacacacacacacacacacaccatttaagaataggaaactattttgcaatctatatgccctctgcttgtaattgttactgttcccaatccatttcctcctcattctttgtctctcatccaaatggttttcactttatgtgtaacaggagtgagcttattctgaactacattggttaggtcctttaaagcgtaagcacgagagaataaaatgaatggaatggcacagagcacagctcacatatttgttttttagttttaaattctcatttgctttttagttttacacatatttattacccgtatttctcatagatttgctttttggttttacattctctccttacttttgccttggttctcctgatgtgtgaaaatgctcctaaggccaccaatcacaggattgtgactccttccccaactttgtttacctacaataattgcaacagcatgatattgttcaatgttggcatatgcaaacagaaaacctaagatctggggagccaattctttgcagaaggtgcttcaacctatctaaaagcaaaaacattcaataatgtgtacatgctttaaggtgtgtgtaatatttgtgtgttcattatgttattctcatagtcacaaaactcctttcaggtaaatatttgttcccattgtatgcatgtagaaatcaatgtttagaggggttgttaaatagctagttaaaatcagaaccaagaatcaaattcattatttctgtcttaaacttctctttcaactattttaggctgcagtagtaagcatcatatgacttcttgtcatctctagtgtgaaatggttttccaaagatctgtgtgtgtgtgtgtgtgtgtgtgtgttttaaataggcattttacttttaaaaggaaggttcacagtcaaactgagcagaaaatacaagcaagttcccatatacccccatccccacaaatcccacaaatgcatattctttcccactatcaacatctctgacgagagtggcacattagttacaatcgataaacctacattgtcacataattgtcacccaaagtccatagtttacattagcattgactcttggtgttgtacatgttgtgggctttgatgagtgtgtagcatttatttcccgtcatagaatcatgcggaatactttcactgcccctaagaattattcttgctctgcctattattactttctcccccaaccccggtaacccctgaaatttttactggcttcatagttttgccttatcagaatgtcttatagttgggaccctacaatatgcagcctttccatattgccattttactgaataatatacattcaaggttcatccatgtcttttcatggcttggtaactcatttctttctaatgctggataatattttattatatagatgtccacagtttatttatccattcacctcctaaaggacatcttagttgtttccaagttttggcaattatgaataaagtcgctataaacatccacgtgctggtttctttgtagacatatattttcagctcatttgggtaaataccaaggaatgtgattgccggatcgtatggtaagagtatgtttagttctgtaaaaaactgccaaactgccttccaaagtatctgtaccattttgcggtcccacctgcaatgaatgcgtgttcctgttgctacaacattgtggccagaattttattgtcagtatcagtgttgtcagacttttggattttgcctgtggtagcaggcttatttgcttatttgccatctgtatatcttgtttggtgaggtgtctgttcaggtcttttgcccatttttaatggttgtttttcttactaagttttgagagttctttggatattttcaataataatagtcctttcttaaacgtgttgtttgcaaatactttctcccactctgtggcttgtcttctcataaacgcttgacaaagatgcatttttgacatgcaccctgcctcatctatagcatgtcttcaaataggcttaagcgactaacttgagggaagctgatttatcttggagaactcctaactcatttttctttcattcatttaataggcagcagacttggggatataaaaggaatattctgatgtttagttagtgcttaattattttgcattcttaagtcaagcttttgactgttattgcagtgcacttgcacaaacatgaacatttcaacatctgctgttagtgtgaccagaaagagagagaagagaaaggaaaagaagggagaaatgttgactcaatcctgtccttatgtgaaacaataaaaatattttaaaactttctctcagttatgcgacatagtgcttttctattttttcctaaactggaagctccctaaggggaaaggatgcatctcatagaatctcaaggtgctcagcaggtaatatgcatttgagcaatgtttcttgaattaaacttgctagccttatttatcctgaagtgatataacatcgttgggctgcttcaaactgcctttatcctgatgggttcaactggcacaaacagttattaagatttgggagagtcagaggtcccatagataccatggactttgctgcatctcagttcttccattgcatgcctttggaaatctttcctgctggtgaggttctgtgagggactgtggcctgatagaatttgtttcatttctgtttgtttttattctttagaaaggcagagtagaaaaaacagtttaatgagataacaaatagaggaaaatactttggacttactgtttaaatttaaaggttgactttatggtagctattaatagttccaacatcttgttgaatacccaaagcttaattatgtaaagagcttcttatttcctctctcctgccccttttcttctccatccccttgcaaagcaggcacaaaaattaaagctatttagagatatgtgaatcagcatattgcctatatctaatttatctttgtgcaatgcacacattcgtgaatttctcaaagccatgtgactctccagaaatctttaaatatgtaaataatattataacgtcccttagtgaatagcagatgcaatgcattattccaggtgtctgagtaatgcgaagaaaagatcaaattccctgttgtactacctgtgtcacatgttacattaataaacacagtcagcttgcaagaatagtatgttatctgaatttaatgaacttctgaactgaatggaatgcatctaattgacaaactgtcatcaaagagaacagaagacactacaaagtccaaagggaaagaagaaacaagtggggagaaaaacaaacaaacaaacatgatgaactgtgggggctgggattaaaatcattggaaggcatctctgtgtgaatgtgagcctgtgcagtaacctgcacgtgtgttgatgcctggtggtctttccatgtgagacatcttggatctgattaaagggccttgtggtgtctggcatttacagctttgtatttcccttaattgcatatacagactcaagaaagggatgggggagtgtcacataaaagataatccacagcaaagatctcaagctgttaggtaaatgaaatgtttccacaggagggtttatttttgccttcaaaatctcctggtacctgataaattaaagataaaactctttcaaacaagtttttacttttcttttctccacctcccatgctgtcatattgagtgtcacgtacatcgctacttaaaactccaacgggtagagtggctattaaattcggtctgtatatacatgatatatattatgcatattttcagaacatatgctgtgttaccatcttctgacccaaagagaaaagctgcagtaaggattttttcaggactgtaattgggcaaatgaccttgtaacgcagtggtctccgacctttttggcaccaatgaccacttttctggaagacagtttttccacgaacccagggttggtggggtagggatggcttcagtatgaaactcttccacctcagattatcggcattagagtctcataaggggcatgcaaactaggtcccttacatgcgcagttcacaataaggttcgcacccctatgagaatctaatgccaccaccactgatctgacaggaggcggagctccggctgtaatgctggctcgcctgccactcacctgctaggaacaggccaaggaccactatcagtccatagcctggggactggggacacctgttacagaatttatactgttaaatgtcacttgatatgcacactaaacctattacaaaccacatattgtcacttgtcataattggacagagctgcagtgaggttttggttttaagtgccaactcacctctaagctttttcagatccttgagctaaaagtgtcctctttctgaaatcctattaccatttattgtatatctttaatgaaagttttagtcttttccttcatattaatgttattcacccatttggcttagcacccctcttagagataaagctctgtgaagatgtgtttcttactggttcatttcggcatgccgctaaatgtgtaaaacctagaagatatcccatagccttgtttgaataaataaagttacacatggtgtttcaagttcacctatttctttgactaccaaaagacttctggttttaataaaacaactgtgaagttcaagtcctgtgtattctaacactttgatttactcaatggcctgatagaaactgtttttaaaaattatatttacccttagcattttcctgagtattgtctttagctattggtggggaagatggatatatgtgtatgtgtgtgtgtgtgtctgtgtgtgtgtgtgtgtgtggagagagagagaagagatacatggacccattgccacaatcttttaattatgtgaaacaaaaaatatttaaataacgttgaggttatccatatcttctgtattatattctgtgttactgatttttttggatcaaatagtgatttttcatgagctaggtataaaaatattaccagggactaaaattaggggaaactgggagtaacttagagtgtagccagttgtttttctactggtgctaccggcattgaaagcaagagagttcctccctgtgtggggatggcctgtacatggcaggacctgagtgtgccaggtctccagcctttacactttggtagcatcttccccacacacccagtgtagtacgccctctagagggatccatttcttcagtgaccacgtctttggagagccactgtctagatttttagtgcacaaaaatggagtgtgattaagggttttctgaggatggtgtattgttttatgttttctgttgctccactcaaattcaaattttgctgttagacttatcattataatgaaattgaatgttggtaaatatttttgtaaagtatatgccccttttctgtgttgaatgggctacaggcattcaataccccgtaatacccaaaatatcattaatttccagaaaatataaaattgtcacaaaatctaaaaactggaatattaggaaaaaggaaagaatggtttccataaatcactttgtttaacatagtttctatgtgtttgtctgagtagttgttttattagaaaattgtaatttcctctctaaacagagcaaacatattccctcttcttcttcttttttttttttttttttgagatggagttttgctcttgttgcccaggctggagtgcagtggtacaatctcggctcactgcaacctccaccttccagttttaagcgattctcctgcctcagcctcccgaggagctgggattacaggcacctgtcaccacaccaggctaatttttgtattttttttagtagagttggggtttcaccatgctggccaggctggtctcaaactcctgacctcgtgatctgcctgcctcggcctcccaaagtgctgggattacaggcatgagccacctcgcccggccagctaacatactcttttgttcctaaatacagttttaaaagcacatgtcttgagactaacttgtcctttcctttgtaacatcagtcagttttgttaacaaagtaagtgaggaactataaagtttgcattttaggaaaattttgcatttagtatataattttatcttagcctgtgctttatctggcaggatctgatccatcctataattctacaattagtgttttagtcagaaatgcagtcatttacatttatccctttgacattttgccattcttattcatttatccagtcattcaatttcagaatactaactttgccagatactaatatcaaggactggccaattcattcatgagtagatgaataacataagtgtcctgactcaaggagcttgtaaactaagaattgtaatgttataaactatttatatttctctagtattttacaaattaacaagcaaaattgtgtgattctatttgtagtcaagtgacctcagaagctattcagtcttcaccatttcctaacttatgacttgatctcattctagccagtgacgctctatagtattatatttattatgtcatccttaacggtgtggaagttgaaggaccagaaagattcacacagacttgtctttgttcacaggagtagacccatgcctctagatttaaaaggttcatcaaggcagtataacttagtagaaagaataagaaactgtaagtctggggtgggatctggcctcagtaattctctggctgtgtaaacttaggtaagatgcttaattttaaacacagtatatccttctttgggaaatagaatataccttacggatttctttataacaattatttttcaacaggaaagaaggaaagagaaatgcttgcatggagccatcatttattcaacagtcactcatcaaatacttgttgaatgcttactcggtgccaatcacttgtccacacactggaagtcaggagtaaatacaatcataaaaattcctgccctctgggtgcttacatttctggttgtgttatgctgcagggagaaagaggagattttcaaaggtaatagtacctaataccatctgaaatcctaaaatttctgccttactgtcttccacctaccatccccattggggaaaccttaccttagaggaggccactatatagtggatatataatagtgtttgtattttatatcttttatcactgttttctgcacacagtaaaacagtgataaaagttatcactttcttaagattttgaggttgctgtacattctcatttgtgaacaaaaactttgctctgattacgtaggattcatttaaaatccatggaatcttttgacactgaagttagaagttcattttatcaacaagtgaaatagtctcaggcacaaggtggaaggatgtgagtcctaaaatcttcggtaggagttggctgggcgcaatggctcacgcctgtaatcccagcactttgggaggctgaggcgggcagatcaccaggtcaggagatagagaccatcctggctaacacggtgaaacctcatctccactaaaaatacaaaaaattagccgggcgtggtggtgggcgcctgtagtcccagctacttgggaggctgaggcaggagaatggcgtgaaccccagaggtggagcttgcagtgagccgagatcacaccactgcactccagcctgggtgacagagcgatactctgtctcaaaaaaaaaaaacatctttggtagcagttttacatagattcccttttgacagctcccaccccagcaactctgtaccatagttattggtaagcacatcttccagatgtgggaactgtggcttagaaatgctatgaagccagttagtagaagagctgaaattagaacttggtattctcaacctcaccatctagtgtgctaatcttttttgtttttgtttttcttcctgggacagataccatttgtgacctgttgagtgagactgatttagtccactgtgttaacaggaaagttgttatagtttttttttttcttccgtattgtttttaatggcaatgtaaaacatgtgaatctgaaaagagaggttctgagaaatttgtgcagctcctttttccaaataaaagatagatttctcttgatgaagccttgatggttggaaattaagacaagaactgaaagcaaaacagcctactcaaggttagacagtgactcgagtcattccatgcacttaaacaatatttaggatgaccctatgtaaactcacattatcacttaaaagccagtataaaaatactacccatctgctgtgctagtcctgctgttgcttgccacatttctctgacaagctgttacctcagtatatagagagagtatacattttggaatccggagtttaagtttgaaaaaaaaaaatggtatctggtacatatggactagattctgttcttccaaatgtagatttgtaacctcatttattcttaaagatgatgtgttaagttagctttttttcttgactctgaagattgaagctcttataattttatgcctggacatgaacaatgtacaataggaaatcatttagtttacactcgccatatgatatgcaaagtgggtgttgggaggtgtttatatcaaacaccataactaagttctaaaccgctctctggaagctatgtaacttttcaggtattaaaggtttggaagatttgtaggtgcagtatgtataattgcttccatacaagtaattttttagtgccaaaaaactctaattccataatttccagtgccattataacagccgagatgtaatcttccttcttaataggtatttgagcagaagaggcaagattgaaagttagatcctcaggcttctctgatgcatcaatctgcggataaagcctttagctaggaattacaatctggagcagacgtgcaagatcactgagtcatttgctgtttttccgtgggacaattacttattctttttctgcagatttcctaggaaatactccaaagtaaaaaatatcaggagcagcagtatgtgatcttccttgctgcttattgttcatactctttatcgcttctcagctttttggctaagatcaagtgtattgtttatactgtctccacgattttcctggaaatcctttttggtgaatataaccttgtgcattacttgaaaatgggcattttaatcattttttcattccactaatatttattgaatgatcattatttgtaagatcttaggagacctgtcaaagacaagcacgggctcatcaaaatcttaaacttgtgtatagagtactaaagaaggagcatgtgaacatatgattttcagaaaattgagaagggaagtgagtggggagccctttgagactggacagaaacaagaggaccatgacactgaagaggacatttttaatttcatgttcaccctgagattggtaatcaagagtcttatttactcagagcaagccgcataaatcaaaaccacaatgagataacatctcacaccagttagatcattaaaaagtcagggccgggcatgatggctcacacctgtaatcccagcactttgggaggtcgaggcgggcggatcacgaagtcaggagatcgagaccatcctgactaacatggtgaaaccccgtctctactaaaaatacaaaaaattagctgggcgtggtggcgggcacctgtagtccgagctactcgggaggctgaagcaggagaatggtgtgaacctgggaggcggagcttgcagtgagccgagatcgcaccactgcactccagcctgggtgacagagcaagactccatctcaaaaaaataaaaaataaaagtcaggaaacaacaggtgatgcaggtgatggagatgatgtggagaaatagaaacaattttatactgttggtgggagttcaaccattgtggaagacagtgtggcaattcctcaaggatctagaactagaaataccatttggcccagccatcccattactgggtatacccaaaggattataaatcatgctactataaagacacatgcagacgtatgtttactgcagcactcttcacaatagcaaagacttggaaccaacccaaatgtccatcaatgatagactggattaagaaaatgtggcaaatatacaccgtggaatactaagcagccataaaaaaggatgagttcatgtcctttgtagcgacatggatgaagctggaaaccatcattctgagcaaactatcactaggacagaaaaccaaacaccacatgttctcactcataggtgggaattgaacaatgagaacacttggacacagggtgaggaacttcacacaccagggcctgttgggggttggggagaggagggagggatagcattaggagaaatacctaatgtagctgacgagttaatgggtgcagcacaccaacatggcacatgtatacatatgtaacaaacctgcatgttgtgcatatgtatcctagaacgtaaagtataataataaaaaaataaattaattagttaattaaaatttaaaaagtcacactattaaagttagaagacatgccctgaatcttccagtcaaaattccttgtttacagatgggagaaagagtgaggaagggttttgccaatggtcacatagatgtcaaatatcatttactgagaaaatcagcataagaacccaggtctctctctttttttttttttgtttttttatcactcaagccaatagtttttccacccttttagttctgttatttgtcttctccactgttattcaaggctatctcaggccagaagcagaggtttgaactcttttcagatgagagcatttttgagactgggacctcatgttgaactaaactcacctccacgttggcacgcacgttacttcctcttccactgtataattttgccgttggattaaactcatgtggttggtgctaaggctttgaccacaggcacatttgaagattatacttatttctggatacaacctcctttgcctccaaactgaaaggttggaaggatgacgggaacaaactcaagtcaagggattccaaatggtcacatcttatgaccacaggctttatatttggagcgctaccatgattaatgtgtcctcgttgccatcctaagacttccatcattttcttccattgtctttctgacttcagctccgttgctacttctgggcagttataggtttctaacccaatagggcaatttcagtttcccccgcgttttctacataagttgtcctttctccacatatttgtttatgcagtttaagtcttgccagattgttctctctacgttctaaaatctttccaattttgaaagtcttagatcaagtactacgcagctgaaaatggctctgcctcttttatggcatttaatatctaccttggattatagttattataacgaccatagatactaaaactttgaaaagaataacaatttgaattcctttgtcctatccccataggacctagcattgcctctttcaattaataaatgtgtaaggaataaattattttggcatattatcccttgtcttttaaaagtttcacaggagtccctttgcaatcaagttaaaggctataaaaatttaacatctagttgtgttggcagagttgtcagcatttacttcagtttatcaaacttcaatatttatttaaattgaaaccaatcagccatttttttctatgcaaatcacaaatctcatttattaatgccttcccctccccctttcccttactacatcaataggaagattacatcttgacatgataaaaggagacaagctttcgttaatgttaagaatctgctccatggccccctttgcccagaaagtcatgaattctgataatcaaggggcagttgcctatgttatttttttttaagtttctagttaattatttgctcttccttatttgcattttgagatgtaacagtagagcagtttacccattctctcctgaaaactatgagtctgtttcagacaaattactatactaggcacccaccctcagtggaggtgcaggagactctaggcccggaatgggtgaaataccagaagttgcatttgaatataatattgactaattagtcagccagaaatgagagctctaaacatgctctttttgtgtcatttactgcatttgtggagcatctaattataaagaaaataagtattcttcattggttgctagtaaagctgccactgaagggcaaaaagacatatagcaatcattgtttaaatagaagcgcttgaaaattttccattaattttcgtgtttgcattttgaatgctttcttgctcacacttgaggtatcaaactgaacaagtctgaactgactgcgtaagaatttaaggaagaactgggaggggtagaaatgaggaagctatttgcattcctggaagacaaaactcacgtttataatctttcttgatactaaggcagtttgtttcccaaatgctatttatggtgagctttttgtcttcaaatgtttgttataagactcttttttttttttaatcatccagtgcagaagttcatgaaagaaagtgaaagtgcacccatacccccattcattttccagagcttaccctgtttggtacattatcttgttggctcatgttttgcttggttttgtttatgcaactttttcttattaatttgttgttgtcgttggatggagttagggagggttaaaggactggagtaaaaatgctatttatctttaccccttcttcacttacagtgtgtgtacgttgatggagggggtggtggggatagagggtgattttacctgctccatttttgtttctatttgctgctaccagcttgcttcttaaccctgggcagaggctgccctgcaggcaggagcagaataagctgtctgtgcccttcctcttcctatacctttgaagattggtgcctttcactgttttccaatcgcttgttctttccataagctcgttcccttctctccactgctttgacaacaccttttagagttgctcctggagctgctgccaagacaatagtatgttttctcttttaaaggtctaaaccctgggaggagaggaactggaggaattgagtcaatataatatacgaatcactttatattttactatctataatttagtttttgacttccatttctaaggaaaaaattgttttcttttattgttttttttttttctgtttccattcagcactcgtgtactgagaatccccaagctatattaagtcccatttgggccattaatgtgtgtgcaacatggtctgtctgttccagtagagaaaaaggcatataaataactttcttatcactggttatatgctttgaaggagtacaaattaaacaacctgtggaagttcaagtaaaagaaagcttatttccagtcacgagaagttaaatgtgagctgggcagattcataatagagaagtaccgtttttttgtttgtttgtttgtttttaactctgagggccctgtgagcttggtcaatttacatcatctcatgaatgacatagggccctatatgtggaaacaaataaacaacaacaacaacaaaccactgtagagtcatatcaaagaaaaatgaaggtggtattcatccacatcaatattaagataaattattaaatatttataaaactctttgacagtgtacagcctctataattaatcaatgtagcactttctcaatacttccccattttaattagtaccaacatcaatcataattaggctcatgctttggtctctctgagacttttaaaacatcatgggtagggggcatttttcaggattcaggtatcagctaagagttcatttagccagtagatcgtgaccattcttcctctccctgaagctatgattctggatactgtggctcttcctgctcctccagacatagagaaaatggacaagtttctccttccccattttgagtgcatgaagtgaaaacttagcttgtccagccaaactggaggaaggagaggcgggacttattggagtaactgaaaagagaaaaattggaatatgagcagtaccaatactcagtctcttaaggaagggtagagtccctttctttctctctctgtaatttttttcttttttgttttttttttttcaaagaagattgcataagattctgtctctctaggagatgactgatgaaatataccccctgggtcatttgcatcttactcctttgtagtgtagggaagaacattccaaacccattataagcacttactgttgttgggcatgtcataacaaacacaatacctttctggaatatactgctgagcccttggctttttgctgaatttgcctaaaagcccttctgcctattgagtggccacattctgaactagttatacttggttaagttttcacacagtacactctgggatactagggttgcaacaatttaaaaaagaacatagatggaagctttatatctcaaaagctcctacctttgacttccctgacaatttttccttctcctgctcttcaactctatgtttcccaactttgtttttgtaaacacgaaaagtaaattttttaccattttgtgcctaattcctcttctttctctcttctctttttactcatcacaggaatgtcttagctttccttccttctccaatctgccttgggtatagagtcacgcctttaaatcttttagcataccacaatgtaacttacataaggaaatgtttaatttgggaacctcagttggttttgttaacactgctgcaccgaagctctagctgaattcacataatctcatgattttagtaaaggtaacaaaggaaaactattatgtaagtacctacttttcaacaaacattgggctgggtttcttctttacattttctcatttaatcttcataataaccctgctagataaggtttaccatctcattttgcaatgtggaatctggagcccagagatattaaataccttgtacgagagtaggtgtgcaaagctaaactttgaacctaggcatctctgacttcaaagtctatgctttttccacctcatagaaagaccatccagaagatcaagtgttggaaccttccgaggctgtgacatatttattacttcaaagtttattatcacaggacatgcatgctgctttagcaactagaagtgtgtgaatgaatattactattgtgttgcataagtccttggcaatattactttttaggtgccattctaatcctgccctgtttggaataattgtgattacgagggcataggagtaattcagaaattttttgaagaaatttctccacacagcattagccttagttatgagtataatacaaaagaagaggaccagcactgctggaaggtaaatgaaaagatggaggaattgaacgattacataacagctgttcagacttgtggtactgattagagtcatttgtagagatgaagcagtgtgtctagccagtgtggggtagggtatactgggaaggtctcacagacagagtgaagtgggttacggcaagccctgaggtatggcaaaatctggacagctagcctggatcttcatttttcattagttggcttccttaactgctcaacaagtagaccaaacaaacaaaccacgcatacacacaaagcaaagaagtaaataaagaatggtggggctaagactgtgaatagctcctagcaaattagagaaatagcttcaagtatatgccttctggatgatgtatgtttgtatatgaaggacaacacatcaaggggtgttggtagtaatctgtgctaagcttagaagccagtatatcattgttctagttctatttctactgtcgagtggctttatagccttagacaagtcatgtaaccgttcaggccccaaatgtccttctggaattacagggattgaactggatgaataaaaagttctatttcaactccaacatttaataattctaaagttcttagtgagctctgattgctcatttgcattacataggcatatattaaccattttaatatgtatcagaaaaggtatgttctttttcctcagaaatgttgaagcctgactttgttatagaaagcacccaggaatcatgtcttcagagttcctaatttttagtgttttcttgtactgccccgactgctgcaatcctctctcttacattggaattctgttttaagttttggtgattggaatcctctttttgatttaagagaaagaatcctaggggtgaaagattactatactggaaatgaaagattactagtctctaaatgagaattggctttggtctgtaatagataaaaagatttttaagggaaaaatattagaaaagtgaaaacgtttttaaaaaaaataggtagcagtcaccaccgtattctggtggaatcgaattcttgaagattagatttgtgtattcatggaataatctagacaaaatcctgccttgcacatagtggggagatacactaaaatactgaaacagctacattgtattcaggtgaagctacatagatgtaaataaagggcagccagcgggtacaagctgtcaattaagtgttttcaatagtctactccgtgtcgccacatcttaggtaatttagataggtagaagacaggtcattagcactgaagttgagaacacatttgaactccagaatgggattaatgcatctccaaaaaacgtgtattttctaaccctgtgcaaaaattatatttgaaaagattaaaacaaacaacagttttcttcgttctttgttatatgtctttgtacttgaaaaaggtaaaattctgcattacgttttaaacaaattgtgccagggtaaagggtaaaatctccatcaacatctaaaggtctttcttgttcagaaaatgaaggcccctctcctgcattaaagaccaatgtggccttatagatccttatacagagggaacaaaatgacattagacagactctaaggtgccctcaattattcccacgtggtggtattcatgcctttgtgtaattgcctcccaatgagtgtgggagggacctatgatttctagccaatagaaacagcaaaggtcacatgtagtctttgatgacttgtgtgtgattgtgttatataagactgtaacatttgttctatgaggggactttcacccttgtaggctttaaagaaacaggctgccatgttgtcagctgccacctggagaggtccatgtggtaaagagtgagggcacctagtagctgacaagaaactgaagccatcagtttagcagcctgcaaggaaccgactgttgacgacaatcatgcaaacttgaaagcagatccttccccagtcaatcctcagttgagactgccaccccagcctaactttgcttgtagacaatgagaccctgaggcagaggacccatctaaaccatacctgcacttgtgacccacagaaactgtgggataataaatgtatgttgttttactctgccaagtctttattgttttatagatagctaatacaattatgttacttttagaatctaacattttcttcacctttcgttttctacataatagttactaagtgaatgtgacttgttatccccatcctcaaaatcattaagggtcttttatttaatatttgatttatctgtggctttgtgaaattcataaatctgctcctcagtttctggtatctcttcaggagagatgccctcttactctactgtatatggaagttgaataagattgaaactgatagagaaatacttgttgaatcaagttgaattacatgaaatgggcttctttaaaagctgttattaaatcttcctgtggctgtcctagagatgatataacagaacttctgctgggaaatgggagagggggagggaagcgttccatgagctgctctgtcatttgcatgccagtgaaattaagtttgaatttacattaagaggagttttgaaatttaggatctatcttaccaaatcacaattcagcctaacaaatgttatggaagtacaacaggagcccggactgtccattgtcatctaaatgatggatgtgtttaaggtgtttacatcagtgctgtttctcccacctaccctaggtctgggtggttgcctgggattgtttactcaaagacagtagcttgacaatttggaaatgacagaggacgctgatacttgaaatcaaactgtagccctggaatagcccaaacatggtcccagggtggtcttgcttctgacttatgtggaaacggccaaatcttcaactacattctgtagcttttctttattcacccagccaactggaagatgagtacctatcttggaaatttcccagaagcagcaattcatactttccttataactcttaacacattgctttatagtttctgttccaatgccagcaaagcccctctttgaagactcagtttccgtcatgctgctctcttacaacacgctttcctcaattctgaatgaatgagcagatgaggatgctgaaatgttagcataacaaaccaaagtcttcttctgttgcgggacattacatttaatgtagctttatacagctcagatttatttctataggttaagcattttgttaaactattcctaaaacacttctgaatgggtcaccagaaagaatatggagcaatcaattctactgtaacctagccaggcaaatattgactatttcctgataccagcatatgttgtatatttctgccttactctagtgagcagaaaatctgtgaaggtttttaggaattgcctaaagacacgcagttctcaaatggcaggaaggagagtaaatcctagtctttctgattccaaactttatattttttccattaaatgaatacagcatacttacatacatacataagtaatacatacattcatacatgtattcagctgtgaacattttttgggcaccctcaatggcccatgcgctgtgttggatgtgatgagggatatgtagatgaataagacctagatcttgcccttatagggaaaaataagatttaaataggttaaatcctagtcttgtgggaagatagaaaagatgcacaaaacgaaagccagactcaaatgagtaaagttagattataagtctgcagatgtaggtaggtaacctgagctttccaagaactgtctcctcacttgaagaatggcagttaataatctctgctttatagactggttgagtggattgaatgagaacacatgggaagatgctggcatttaataggcaacccataatagaaatgttaacatgtgctctggggtatcttcagaggtattgggagaggagtccctgcctaaggaagaagcagtgctgggcagaggaaggaatgtggacttggattggaactcagtggatctggtctccagtcacccaacaagccatgtgactgtggaccaactactaactgcataggcaccttggattccacaattgtaaaatggacatcactggaaagccttcctcatgaagtgattagaacagatgcagataatagcacaggtgtggttgaaaattgtgaacattcatggaaaagttcacttgttttttttttatttgtttttgttttactgtcaagaatataataggagccactcaatttatgactctgtcctttcacttattattaaaattatggtattccttttgccactcctgtggacaacatagccaagcaaatgagcattttagtctttctcgtcgtcctgtcttagtttgccaaaactttgaatactctgtgtgtgtgtgtgtgtgtgtgtgtgtgtgtgtgtgtgcgcgcgcgcgcatgtttagttgctgttgaaaatatttgaccactatgaggaactggtaaatttgcctgtgctcaggaatacattacatggatgctctggttagtcactttgtactttacatctgacttttcctccatcagagacaaaattaataataaacaatttttaagattttggataaaaaccttattaaaatgcatggcatatttttcttttttcttatggggctattctaagcatttgaaaccttttgatgactcagggtcatcaccatgaccatctattgttatgctctgctgaaactcagtaattttttcctcctatccccccaggctgtcagcggccatctctgctgtcactgtgctgcctttcacagtctttcccactaccttctaaagttcattggttttaatctcctctggtatgaggaagaaacagcaaaattgtcattagaatcattggtgaataggagtcaacaaacattcactagtggcccaaaggagcactcatcagaggaaaaaatgttgttttattttgaaaaattgctattttataaacccagagctgctactcccccttcttttcttctccgttctctttcttcatctttttctttcctttccaaccttcatgaaaactggaaatatggactatgacttcatatgctcttacttaccctctgctgggattttgttctgaaattgtaacaattagaggagtgtttctaaattggatcgcttcagattgtctcagttctctgtgactttaagaacaagctgatttgaagccacatactgttggcagctttcatccatttatttggactatcaagcaagaatgctcacaatctttcatatgaaagaagacatctttatttccagttcacactcttcataataagaagggtatttgaaataaagccaaaaagcataacttacttctctaacttcatatttcagatgcctgcaatagtgggagaacatttttttactaccccaccttaccctcaaatcagtagcagaaaataacagtgatgcattcagacagcaaaaagagaaaataataattttattaagtttacaggaaaggtctcagctttcttaaaagcctatctttaggaagtaagtaactggagctgcacacccaacagaggaagatgactttacttatcatttacttagaaattatctttgaaaggatcattgtgctgttgttagcaaaaaggagcttctgtaaatgtcacctcaaactttgaaatctgggaaagtctcattatgaaacgcaagttttatctttcatactcagcgctggagcactgagtatccttgcattcatgaagactttctggtacagagtaaacggagctgggagcataagtgagaatgcagctccagctgacagacccccagctctatcttcccaggtgcatttcctttttttttttttttttttgtgagacagagtctcgccctgtcaccaggctggagtgcagtggcatgatctctgcttactgcaatcaccgcctcctgggttcaagtgattctcctgcctcagcctctcgagtagctgggactacaggtgcacaccaccatgcccagctacttttgtatttttagtagggatggggtttcaccatgttggccaggatggtctcgatctcttgacctcgtgatccacccaccttggcctcccagagtgttgggattacaggcgtgagccaccgcacccggccgcatttcccttttgtacactaggagctaccgagtaccagaagtctttgttaggatgcacagttctttgctcactctgcctgggacagtggctcaacatctccagtcccctttgagttacctccagaaggttcaggaagagcctttccctccaaaatgttcatagcatttgatctaccttctctaagataagcagcttttgtcacattgtacctagggtaaagatttgtaatgccttaactctatgccatctgtatgcttcctgcggacaggatatgcttctaatttatcagattcccttaagaaactacaccatgatgcacttctcaaagtatgctcttaactaatacttatgggaggaaaaaaggaaggagaaggaaaaggagggaggaaggaaatcgtgtaattgcagaaagtttatgtctgggacccttgtgtaataatgttaaataatactttgacttttacgccatttttctatatacaaaattctttcacatctattttcaccactatcctgatattgtttgcatgatgtgtagtatgtatgtttttaatgtgtgtgcatattgtttgtctctcacacatacagcagccccaacactgacaaatccaaattctatgagtacagggagtttgttgtgttcactgctgtatccccagcaccttgaacagcacctttcaaggaggaagaacctaattcatgtttgttagaagaatgaatgacaatattgtcttatttgatcttcaccataatcccgtgaagtgaataccgtattcatactgtatcctcgtttttttgcagatggcaaaactgaggccttgagacctgctcaggtttgcatagctagtttttggccatggcaagatttgaattcaggtttttctatttccttattctctcctttttgtcttctgggaatttgctatattaatagcaaagcaagaaatgtcacacaaagaaaaattgtttccaattttaaattcatgatgcatatgcaagaaattactgacttttcaatccaatggtaacacagattgtgtgatttttaggaggaagagcctttcttttccatctcttgcgtttattagcatatgtgtcagtgcacacacatctacaccgtgcagctctcaccttgtacttttccagtctgaattcgttttgtaggctgtccctgccctgactatcccaggtgcctatcagggctgtgtcttggtcaggctaaggccaagcaacaggcaccagcatttgttatggttaccttggcaagtgaatggggtttgagggaagctggagagcaggcatttcaggagtagaactaggccagtctgtttttgtaaaaagttgatattcaccctaattgtagctcatgttggcaagcggagtaaacacccatgcaaattactaagttgtactgaatgtccaaggatgtcaataatcatcttgaaatccaaataaatatattttttactgaaacggaagccaggcaccacatgcagtttctctctgtcactggagacagatttggcacatatgcatgagacagagaagggcaactcttcaggccctaatgcacacaggaaactagggatgtgtatatcatacttggcagcaaaatagaggtggggcagccatcactttctgttctcaagcacctctcttttttcctatattttaaaacaggatgaccacaaagaagaataaggtatacagtagcataggatcctaaattaaagcatgagggaaagctagcattagtttttcatctaaagtccatttgggtaggaatgagtcagtgcaaaactgtacaaaggtgatcttaagtcacatgttatgttaccgactctgtggcaatggctgtgagtagtccaggaactctccaaggcctatttttaaattcacttagaccaagcataatgaggtaaagggatgtctatacacattctcaagtttagttctctgaccgtgagtcagactgtgggccatggacctgggcgtctcagtggtagcaggactcattttttccccttttctttctcataaatgacttaggagacacattggagaaccctatgtgctccttttactggaattatcttttaaggaagtactgatttcacctcctgtacatggtttgctgagatggcctattggggtttcccaccagtccacaactggaagtttctatttgcacattttgactgctagttctatatttagtcaaaagcctgccttttgcctggtttcttagggaaatagtctgtaggagttgctgtgtccatttgccttgttcacttgggtatttatttgactgtataccctgattatttcctaaattaacaaaaaggcacagggccccaaatgaaggaagaccccttgtaatttgttaaaaaataagtttatgaaaatgtgtcgtcaggaaatcagagttgtgttgcggggtggggagcatgatatacatttgtgtttgtatgtttctaattgtctacagatttatggcctactgtaacaaagccattgtaagtgtacagtgggagggtcaagaaaccttattctatggattcaaacacattatgcatacaatttacacgtaggcacaaaaatatcccttcaaagaccctccaataagctatggtatagttgaggaaacactagacttgaagtcgggaaaccggagtgttgtcattttaatctcaggctatatctttacatgaacaagagaactttgtgttatttttcatattcgaactctttgtgctgaagattctgcagtcaaactgcaagacacatacgcattggctgatcagaaatgacataaccattcttactgcactgagttgatattcagtcaataaacagtctaatctcggttaaatgtttgcatatttttagacttttaaaaatttgaaatcagcctctcaagttccattagacagttttatcacggacacatcaagttccatgtacaacaggctgagaaccattaagctacaaaatttctaaaattttctccaggttctcagttgctaaattctctcttgaacatttttggggataaaaaactggcagagaaaaagaagaaagtacacctttttacattatgaaacacctatgttcaccttatccatggagttatgccagtgacctaatgcctattaagttcttccatgttccaaaggtctttctgtacttgaaaactcataggtgagtcaggtccttcactgatagcttatagctaaaaaccacttgggagaggggctgtccaggtcttatgtcaaaactttgtcccatacgctgttagtgttagaaatggagccgtcagcaaatagaatctgttgtttcatttaattacttttcaatatgccattaccagaaatttttatgtaaatacatattttattccctgaggcttgtcaatctgagaccaaaattatacaacactgaaaaaaaaaaaaacaaaattttctttttactagttctctccctgtgttactgtgtcatctctcatgcatggtataggatgatgatggtgctcaaacttagccaaagactcttttgttggtattcaattggcagaattaatgaaacaaatattttaagatccctgaatatgtgctaaaagcatataactacactactggctagtcagtaattggtgcctcagaagagttaggtatttattcatttaccaaatacttatatgtcaagcactgttccatgtgttttcttaacccatgtcattgttaaaacaaccctttgaaatgtgggtactgtgattatttccattttgcattgaggaagctgaggcacagagaaagtaaggaacctgcccaaggtcatactatcaattgtagtggtgcaagacagtgggctctgaagtatgttctctctatgacgacactgtgctctgagggagtgagagaaggaggacattgtttggggcccagtgaattaatgaacaagatatctgactaggatctgaagactagcagaattgaccctacagagaatgtttgaccctacagagaatggctggctgttggtgttcacagccgtgagcatagtgtggtccacagcctcggtgtggaaaatggtctctgtggttgaattgagagaagagcaaatgaactggtctggaatagggtgtacacgtaagtagaagataagattgaaaacaaatttagtgccaaaatctgagggaccttgagccccatgccaaagagtctgtataccttatctaatttgtttaatggggccactaggcaattacgggtccgggacccgcatggcaagaatgccttccatccacagcagcccttgatgtgaggtcagaaagctaactgctaaacttgcagtcctgagggaacaccctcaaatggataaacccagctaagcaagctggaccatttccttgggaattattcacctctcaatcaaagaaggaaacttcccaaattcaatccatttgccttaacgtggtgtcccattaccacgaatactgagttgtatacattcttccctagctcccttgaacaagcttctctactacttttcttaaaaaaaaaattacccatttatgacttatttattatttatccccttcctataagggaatgtccactctttgagatcctcattcttcctccatcatgatgatgtgatgatgtaatgatgtagtcaaggcgcttccctggcctaatgtgtatgagggcaggctttgaagtttgacagtcttaaagctagagtggtgtcatgcattgctcacctctctaatcccagatttcctcctctgtataatgggataaatacctttcctatgaacattttcagatttttaaatattaataattcatatgaaatactcagcccagagctctgtacaaaatatattactcaataaatgtagccattgatattattaataatattattaaatattgagaatgaattctaccaaagtgcatggcacttccagtggctgattctgttttatgtagccacaggcctttaccaaaggcaatggcaataaagagagggcacagcaagatctatactcctttaaactaaggtaacccacttcagttagtccccacagcttctcttgcaactcttaccctattagctgtttctggggagaaatttaatgggcatagatactgggtggatagaccataccccagtgatactccagagagtgaaaaagagaagttaacacagggcgtgacttcctatgtttaacttgcagttcttatcttacgttgcccatcagaattatctgtggcatattctaaccatattcttcctaggcctcacccctagagatactgaattaattgttcttgtgggtagagtcactgttatgctttaagcttcccaagtgattctgatgggcagccaagactaagaatctatgatttagatagaagatgggaagccgagggaggccatgggaaagctctgatggtgagtatgggaagaatcaacataaaacaagcactcaacaagtgtgcatctagttgaagccttgcttctcctgcatttgttatctcagtgtgctatttaaaagcagcacaaaaaacaaggagtgaagaccttgatatcaaggatgtgaaagctacttctaatcttcaaacagatattaggcaggggctttaagacttcaacttgagagaaaagctaaggcacctggtatgtgtgtgctcaagtgaaatatttgtgctgactgagggcttcaatgtcaggctgtctgaaaggacacaatatcaacagctttgctgtgcttgtgtatgagtctttaaatgaatatatctggttatagcttatctcttttctccatgctccctcatttccaatttccaggtaatggagatcatctagttcggtttcagctgctttattttgcagatgagcaaacccagtgatgcctgtgatctagatggaggcagatttcctctctcccccaccctggtataccatagtctgttctaatgctgggatcaaggatgaaagtgctaatttgggagtgtcccccactttcttactagctgatatggtttggctttgtccctacccaaacctcatcttgaattgtgatccccacatgtcaagggagggaggtgattggatcgtgggggcccttcccccatgctgttctcttcatagtgagggagttcttatgagatctgagatttttaaggcagttttccttgctcttgctcgcttctccctctgctgccaccttgtgaagaaggtgcctgcttccccttctgccatgattttaagtttcctgaggcctcctctgccatgcggaactgtgagtcagttaaacctctttagaaattacccattctcagggaagttttttatagcagtgtgaaaatggagtaattcaatgaccctttcttactgactcattggtctgatttcttgaccaaagctctgaatattcccatgtcatcctgtctaaccagctgtcttatactctttttttttttttttttgagatgaagtctcgctctgtcgcccaggctggagtgcagtggcacgatctcggctcactgcaacctccacctcccgggttcatgccattctcctgcctcagcctcccgagtagctgggactacaggcgcccatcaccatgcctggctaatttttttgtatttttagtagagacggggtttcaccacgttatcttattcttaacagtgtctgaggtatttttttgaaacacaattcttaccttaactgccccaggcaccacggcagaagaaccatgaccttgctgagaggcactgcatgccaaatgagacttagtttttccaaagtacttgggagaagaaaaacaataatctatatgatgggcttttggcctaaacccatatcctttagatgacggaatttggcacagctcatattctggtttaaagaaaaatgttttgttatgatgtcatttgcctaattaatagcaaaagaggattgaattttccctatgcaatgtcatctagcctttgagattttagagttaatgactcaaatcaattgtcctgtcttctgtgaaaccttcctgatgccttcagttggataaatctacccttggtgttcataaggcattatattgatgcctctgatgttatgcagatatatcccttcttggctttgtttgcccattcaatgaacatttgttgaacaccacctatatgccaagatagttggaagatggaagtgtggtacacagaggatgtggaagggaatcacagaagatgagactatgaaggcaggcccttcaaggactttctaagtagtactcaggagtttgacaaagaggagctagaagaggtttgtgaagtcagatgagtaatataattaggtttgtattttatgaagggcaacatctaaatatggcttgtctattcagcaagcacttattaagtgccttttgcatggtagacaacatgcttgatgctgaagatacaagaaaaaatttaaaatggtccttgccctcaaggagctcacagtctattgagttacctttctgactttcccactagattgtgagctcctggagggcaggcactttcgttcatctgaaaaagagcttaaatttcagtgttaatcctagattacaatcccgcctctattattttaactttgttcacatctgttaactgctctgaaaatcagagctaatactgcctacctcatcagggaaagattaaacgagaaaagaatgagatgtgattgacacagcaggagctctgtgtatgctatttcctcctctatctctgtgcctggtacatggtaaacattcaggacacttctgctgcctgcttggctggagagcctgtctatgcagcctcagtgttgggaggatttgagcctggggtcggcctggcacccagctatggtagttagcaaatctatcctcagctcagtcagtgatcaaatcactggctctaggctgtaaactaacagggccagaattgggttctggactctgaagcccaggcatgcatattgcaaaagtcagaatcgaagtcataggaaaatgatgaaatttcctttctggccagaatgctattatttcaccaagggcaacaaatcttcttggcaggaaaagttgacttgcttgtgctttgtgtaatcaattgtatttgcaagtgatggagtccttctcacagtggcttagaggaggtgttaaccactattctactctctacttccatgagatcaacttttttagattccacacttgagtgagatcatgcaatatttatctttctgtgcctggcttatttcactcaacataatgtcctccaggtttgtttgacatttcattgttttcggagaattttcacagttcattatctcacttcacagttcctaatagtctctctgaggtccatatggtaagaattagtaccctttactatatttgttgaatcacaagtgagcggaggaatgggtatagttgagacccacagaagtgaagtgacttgcccaaatccatatagcttattatgctacctgtttgttagaggtttcctgttgtatcagaaactagtgagataaatattagtaatttttgtcccattgacacatgatggtatatcaggaattctgagctcattttttttttttggctcaataagtgaccttagaaaatccagaatgggatttttaagttgaatatccttctctgacctgtgaaatcactgcatctgtttccctgactttatcacaaggtaacccaagatattgccaatatttacatgtgacaaactctgaaagatgtgcataatgctcccaaaggtcatcatcttcatacctaccttataaagtgcaaatggaattgacctagtctagaataagcaggcgagatgcagagagattatgtgacatagctaggtcatgtgactagtatgcagcaggcttggggcataaatcctagtcctctggctcccgagtccagtgttcattacgctatgtgacatgtcagtattgctgtttgctcggggttaggcttttcctttggaggttagagcttgataactctaaatcgataaacttcttagtatgccacagtaatgctagcagaaagtatttgttgaagcaaaaaatatgttgtttcaaggggtctgctccctgaaagataagtttttttctttatttgtggttttacatctaatttttctaatgtttcaaaaaacattctgtgttcctttaatctacaagttggaatggatacggtgccctaattttcgtgttccctttgagcacaagcaataacacattttaaaggatgataaatagctgtgtaaaatgtagatgggttctataaatacttaccaaaatccctgtagtcagaccctggtagaaggagagaatagtcaaagtgttctctctttccacattcttcttcttcttttaggggtagtttggtagttaagaacacagttgctagacccagacagactcagacttgagtcttgccctacctgtactacctgttagattttagggaactccttaattttcatgggcctctatttgtagaaggatgctaacaatattatgtgtagtttttagaacattcatctagtataatccctatacattttaagtaggtaattatgggttatctctcatgactgtttttatcttcatctgagaccctttctttcttcctttaagatacttctatccatatttttccctagagagaaacagtattagctactcctgcctgtcagtttaagctactgtgtcatgactattttgcatttctaagtttatccttacctttatcatcaaagtgctgactaatgcagtatctgccaccttgtgcctgctcagtaaatacaatttgggttaaactttattcatttttagttatgagtgcaatataatgacatagctaaaagttcgaaagtagagaagggataacaaataggtactgataatgccactcttgtaatactacatgtagctgactggtgaaggccatggactatagagtcatactggaatccaggcttcagtgccttgagtgctctacttagaaatctgtgctttaatttccttagcactgaatgagggcaataaaagtaaccacctaatcaagatgcagggtggatgaaatacatctgaagcatttggagtaaggcctggcccaaaggttagctgtaataataaaaaggtggatggtgacgatgtacatgatgatggtttgtgtgtccctttattcatattgccattcacaaattacttgagtagtcctacttctcctgtttggtttatttgttgcaagaaacatgtgcattagaagattgaagatgattgcgcccacttgaggaaaccggacccagagaggtgaaatgatttcctaaatagcacccagaaagtttatgatagagaggaacatagaactctagcagccaggctgctctattcttattttctctatacttttcttgttggaaaaggacactgttgactcctagttaccatctaacattgtggtccaagctacagagacagtagagcacattaagttctttcagtctggcttttatgctggctttgtgtgatagtgcctcatatccactgaaacgtaagtacttaaggagtggatgggaagtattcctggaaactcacagctaagcttttatgtaaagacagcacataaaaaaaaaaccacttttcataactttatggaacctgcaaaaaaatcttggcttccttcatgatgcttgcccctagagtgtcagcatagcccttgcagagaaaccccaggatacctgtatttctccaccctggccttcctctgagcattgagttgttagcatcaaaaaatcaccacagccacgttgatcctcattttcttcagcctctatagagcctgctatgccagggtcctgggtaatctgcagacagctgctgtcatgcagcctcatatatgggttgactttaccagcaaagaattccctcaccttcgagacatcactgacatcttcatgcacagcacagacaatgaaacaaacaaaaaagaacaaagagggacataaaggttggaggtcatttacatttgcatttacttgaaaggaaacatgctaacttgttgacttgactcacttgatgtactttttcgagatttcacctggaatcttgttcttgctagatctctggatatgcaaatcccatctttgtccaagacctaattcaaatgccaccttttcttgagaatgtcccttcatctcctgagctacaaccatctcccctttctctgtgctctgatagcacatcattaaaacattttacttcggattgatggacatttttgtgtgtctaatattttctactatatcttctagagggcaagacctacttctcaatatctttagcatggcacttactaggcactcagcaagtgccctttgaataaatgtattatttgcaatcatctcttcaggtatatgtagtttttgtgttagaagcttgctaggttgcatcttgcaagagaaacaatgtgatccttcacatgtacttgttcttctccgaatgactttctatgcaagaagcactggaggctgagttcatacgttcagcattgtcagcagaattgagtcctgaatgacctgggtcagtcactacattagatgatttgattagaaaaaagaataaagccagttataacttgttttctgcctattacccaggatatttagaatgatggagatgcagaagcatttagagtttttgatgatactcatggtggtatcatgaaaataacaccttgtgtgtttatggcacataattacatgaaactcattttattctcattagagtgtcaccttgaatcctgttctttttggtcttaatgtttagtgattagaacttgggaagcaatttctagaaccagaatggtcgggtacaaatcctagctccttctcatatcagctctgagaacttgggcaggtaatttaacttcatgatgtctcaatttcctaatctgtacagtggggcagccagagtacttatttcattgtattatttgagaagtgggaggacatagtgcatagtgattctataaatattactattgcaaccaccaggctttgcataaggccctaagtcaagaaaactttcaccgtttaacagagatgtttctctctgaaaggcatgttatttgagaaatagttgttgagatgaaaggggggaggcaagatagaggccagcttgatgagggctttgaactcagccctatcaacaagaagaccatagggctgcatagactgaggagaaacactctttgtttgtcgaggaaaaggaaacttgcaaagggatggcaccagcgcagcccgacagaattctctgtgggccacatctgttcatgccagctgttgtcagtgtgtgtcgcctcgccgagaataacagcaatgattttcactttatagcaacttccatcttgggatctcagaatgctgcataaatgtagattagggctcccaaaatttttgccaagaatgagcatactttacagagcatcaagaatgcgtcactcttctgagtgaatctttattggtgcaaagagaattaaacgaatattgaattagaccttccttcctgatgtgagctttcttcttgattttactccttattttctagatgaccttgaataactcagtttccctccttgacactcagttttcttcttataaatgaagggattcatgtactactaaatggtctccagtgtcttttctgtttctgaaattcacagaaggcagggaatctaaagttgcctcccacattttagaaaggcctaagttgttgtagaattgaatattttcttagcattttattcatgatatggtaagaacccggcagaaaatttttcagtttggtcactggaaaatgacactgtcctttagcttctaatgtgaaagaatatagtattatttacctgtttttccctttgcccacctttaggtacagtactatttattattttattttactattttaagatttaacattaattctctagcttatatctcagattgataagagcagttctacttcttttgatgagtcaagtgaatgaatgaagacattaaaaatgaccatgtcggccgggcatggtggctcatgcctgtaatcccagcactttgggaggcagaggcaggtggatcacctgaggttgggagttggagaccatcctgaccaacatggagaaaccccatctctactaaaaatacaaaattatccgggcatggtggcacatgcctgtaatcccagctactcaggaggctgaggcaggagaatcacttgaacccgggagtcagaggttgcggtgagccgagatgttgccattgcacactgagcaacaagagtgaaactccatctcaaaaaaaaaaaaataaataaaaactaaaaaacaaccatgtctctcaaagccttgtactcagaccacctgcatcagaattagttgggggtacttgtaatatttttggtttccatctttgtgcgcagagagactatatcattaaaaaatgtttgtccttaagaaaggttcttttgatagttcaagactttgtaatgtatgtgaaattccactacaaataagtggatgggttgttaaatctcactggcaaaaggcagatgagttgagagactgaggcacttttgttgcggttaagcatccctttctggaattgatgactggattcaaatcccaggttctccacttattatcacggtaatctttgtactccagctttctcatttgtaaattcagaatagaagccacctaatatggttgcactggtgatgaaataagttactcaatataaaacattttgaacacctactaagcactcagaataccttatttatactcttgtaaattatacataaattaatacataaattaaatactaatgtatttctacctttcagagtttgtgggaatggataaaagattccttcaatatgactactattattttaatcatggtcagtgattgattagaaatattaaatgttgctggtctttagattcactgtcagagcatgatctttcttcccctcggctgcagtgctgacgaataacactgagtcattcatattctctcatccaccttcctgccacatttgaaagacatccatagctcatatttgacagactgtgtgtgagcatttaatacaaataatcgtgcgccactgtcaaatattagcacatgccatgtgtcttcttatgtattactcacagtggctctcagatgaaggcatctacccagctcctctgcctactttcccaactccatttacaggtgaagacgctaaaggggggaacaaaaaacttgtgaaatgttatacaaaactggaggtataatttggcatttgaaccagcttgttctgcctctgaagcccacgctttctccattataccacaatcaatatttctgaaagtaaaaaaggccacattggtctccagcttctggtctaattagcaccatactttaatcagtgagtttgactgtcttgattaacctttacgatagaccatgtaagtttcatatttctaaatgaatatatagagatggctgtaaattagtggaaaaacactaagctggaatcaaaagactcctgcctaactcttggttctgccacttaatatgggtatgattttggctaatcacttaacaaaccactaacttggtttctacagaaagaagaaatgatttcatgcattggacaatattaaataatctagtgtgtgtgtgttgcacccaagtatcttttgactgtaaaagcacatagaaaggtgaaggaattttaatcccatggttgatagagtagaatgccacctcagttcctctgaattctgtccctcattcaagtcctaattcaagctctttaagcacacagtactctctctctctctctctctgtctctcttaatctgtatcatccattgatacacttgaataatatttatacatcatagtatatctttaaggatgatattagtttcttaattggtgtaggctggaccatctcatttaacttatggctcatgcctgtaatcccagcactttgggatgccgaggcgggcagatcacttgaggtcaggagttagagaccagcctgggcaacacggtgaaaccctgtctctactcaaaatacaaaaattagacagagaaattgcttgaacctgggaggcataggatgcaatgagctgagattatgccactgctctccagcctgggcaacagagagagaatccgtctaaaacaacaacaacaactcacaaagtaaattctatttaccccattttatttttgaaataactaataggtagtaaaattcagcatcctgcactggatcatacaattggtaagctgtggatgtgggatttgaacccaagtaagcagaccctagaacctatatatctaaggcatactgattactatcaacgttcaattttttgctttgttcttttatttctccttcatataccttgatttcctgactggattataaattctatgaactggttgcatctcactcattttgatgactgctttaatgcctaattaattactattatttgtggataatttaatatagatttcataggaggctatagtttgctacactgctcgtgtactctagaaacaaggacccttgacttttttctcttctttggctataagcttatcttcttaccatgttgagatactttgatttgattttcactggtcaagcaaaaaaacatgttcttgttattttcacttaggcactttgtctgcctccctgctgaggcccaaaaattcagtgtgatcggtgtgtctgtcagaaggtaggattgcttgcctagggtggcattgttattgaacaaaacacatgccctttctttgcatcctaagtgtcttggattgctgagccagaaccgctctgactcaaatgaaaaccaccttgtgttaggtgaaagatggggagttaaccatttgtttgctggtttgcatttcccacgaaaaactcaaaaacagaaatttacctcgccatggaaagtgatgtgccaagcgtcatatttgcatattaaaaccgaaaactgatttgcatgttatttcagtgtcttgtgtcacgttcaggcatctgtcaagcccactagacagaaacagcttgtacagtaggaaagtgtttttatgcatatcagactgaaaatctaggtgccttatttttatcagcaacttgtccacactttgggctctccaatctctcctaggttcatacctgaaaatactaaagaaaagtctggaaccccatgttttataaagtatgtttcctgttattttctaagagctatccatttttataatattctgtttagataattttaaaattataaagagaaaaactcaaattactcataatatcacaatcctgacataagtcttgttaacatttggatatattcacttctagtagctgtttgataatacttacataggctaacatatactggcccttttgcatatatatttttatacatttgtaattatcagatgtactattttcatatcttcttattttttggcactataatggcaagaattatgacaatccaagtatctaaaataacagattaataaaatcttattttgagcagacaggaaattagaaccagtcagggctggagccgtggcaaccgaaactctgtgccatctttttgatagtgctttattaaaactgtagcttgtaattgaggatagtttttctatgggacaatgcatagaaagctgtgcatggtgataaaacctttttttcccgacattagagcaactagcccattgcattcttccaggcaaccaaatgaagatgaaacgtgtgcctggagtcactgccaggcatgtggggcacagcaaaggccaaaatatggttttagtttgaaaacccaaccttgaataatggttcattctattcatcaaacttttaggtcatgggtcttgcctaggtgaagccatccaatggaaataatgtcttggaattctcttgcctttattatgtcaaatctctaatatataacatccataaagcctaattaatgggaaaaactgagtgtatgttttagccataacattgtggaaataggttcttttagtttcacacaaatagagatcttctcaccccaccgagaaaactcgctttctcctttacggagggcccgcatggaggtttagagggaaggaaccctgaaatgagaactgtgaataaggttggcaggagatctttgacctagattctcctcgactctgaggatttggcgcttctgctctgcgactcgcttttcttacttcttgcctacccggcaggataacatcagtggttgtaccttgtctgccgaagcctaagggaggctgctctgctctaaatagccaagcatgagctttactttactatttgtcttttggtcctaaaggcgagactgtacaagaattaatagttggagaggcagcaaggcatacgttcaccaaatgtcatgaatttcaagatttgtagctaaaaagtactcagagtaattacatcccttgctaaagcaacaattaatgtgaaattcgggtacactacactgaagtcctttatcagcagatggaaaagtggagagttactggagagatctcattctgcaaacattctgcttccaagaagaaaatcatctttgttagtggtttctaagttgtccctcttgataattataactgacatctatttgatatttaatatgttacaaagcttcttcatatgaatcagatattattattctccagtttatatatgagaaaatcaacaatagaaaaagaaatcactggagaacttaagtagtatcttagacatcaggcctaagagccagatgctccaagcccaggcactattatagctgccttgacacgtggagacggagagaggtgggtgtggagagacctcactttcccccagctcagcctagataaaacccttgtgtgcagagaccagggccccctgactggatgcccaggccttttcccagctgcagtaactcttccaacaactcctcctgtctgtaattcagaatcatccatccttggctatgactccaaatttaagaaaaggcattttatgggcatcgatgcatggcatgagaaagggaatatgaggaagtagagattttaagaaaatcaagatttcgaaagttgaagatcaactgggatgagtttcaaagcaagaatcaaacttttaaagtcaaaatttctgggtcttcctctttgtgtccttaaaattcattcttcaataaaatggaacataagaatagaagaaccaagagcatgcttttctaatcccaaggagctgtgaggagtgttcatttagaagatttcaattcagatagtcaggtatccaccttccacttctttccttctctgtggccatcgcttttaacctgaaacagaagaggtatccagcaaatcatctgcccctggccagaaggggttctccttccatttaagcagtgagatgttgagagtagagtataattcagtgagagtcaaaaagtagaagcagccacaggaaattgcaaactgcagacttgacacagctaaatagaaggggggaaaagaacgaaaatatcagaaatatattttttctggcaggctttcagctctaaaacggggctaattctaccttttgaaaagaagataatttcaatgtttcttttttttcaagaacacataattgaagttattttccctctgagggaaggaacctcttgtacatcactacaaatggacaagaaaaatgagcagctctggtacccagagtgatagagtattcattatcatgtaatctttttgaatatcttggctgccttttcccggtgttttatccgcctgagcggtgcttttctggtaaggttcagatttgcagtaaatttgagttatctaacaccatgtaacaaagaaatcaacagcaggtaagcactcaagaaagaaaaatgatcacgccaaggtcagccccagaggaactcagggggctgacattgcgacagatagtgggtatccattttgtaaattggatccttagcacacaggttaaagtaggtaaattgtagtaacaaagatgcaagatggtgtggtgttttcctgggagccatttgcaccttagtgcgggctgtttcccatgcttcctttttcctttagaaaggatgatggatatttttcttctccactcagaaaaggggcagtgggatgataaggtgattaacctttgtgtgttcttgatttcatgccccaagtgtagtgaaagttcagtaggctgcagaaaccctgtgacctgcccattgcttactcagattcagaatgctgaatgaagttctggatgtttcaggggatgctgacaactggcttaagtcctctcataaatggaaatctctgtcataatgaggtttccacttactcagtgtgtctatttttatagactacaaaggatctgtaaatatgaatatctgtgatttcactctaaagattggtaatgatatgtgtcttgcatactatgggcacaaatgggcacaaaaaaatgatagagtagaaccaaaggaagctttgaaaataacatgttacacataaagaaactgaggctcagaaaatggaaatgatttgagcaaaatcactggacaacttaaaggcagaactaagattaaagatattctgaatagtcaggtcttctgtatttatgggtttctatgtaaatgtataatcaaataccatgaagtgttatatgaatatgacagatactgttatgtatgttattcttaatctagtggagtttccttcttcatcaagggtcctattcatgtgtacattttgtttcagaagcaagtcttcattactgcatagtcccacccataatgtttaccagggatttagacccagatttggctgtaaatttggcttcatattaagtattttcttgaatgacaatcacctgggcccctagcaagaaaagaggaatggcaaagaagaaccagttttagataattttcagctgaaaaaaaaaaaatctttattttaagaagggaaaatacagaaacatagaaagaatataaagcattcaatttcccatgactttcaacgattaacctttgagcatattgtattgccgtaaggcaggtcagcctggccagcgagtgacttatctccatgtggtagttcagggcccagtctccatccttcctgtgcctcacaaggccacatctaactgcaaggagcatgggaaatgtagtctagcagtgtgcccagcaagaggaggaaatggattttggtgagcagttagcaggctctgccatgcttagtaaacatcagtcctttttaaagcatattagccactaaattgctcagaatgccacgatatctggctgcgttttttttttttgaaagtgtcagtggtcttggtgttagaagatgtttgccaatacacttacttcagaagcatgactttcataaaaactcagctcccatttttaaatctcataatgacttcccattacttaaaacaggcttggcattgaccatatcttacttctcttttctcatcctagttctgtttttttccctttttttttttttttttttttttgagacagagtctcgctctgtcgcccaggctggaatgcaatgatgtgatctgggctcactgcaacctctgcctcctgggttcaagcaattcttctgcctcagcctccagagtagctgggactacagacaccaggcacccgccaccatgcccggctaattttttgtatttttagtagaggtgggatttcaccatgttagctaggatggtctcgatttcctgacctcgtgatccgcctccctcagcctcccaaagtgctgggattataggcgtaagccaccacgcccagcctttcctcttaacagttttttagatatacatgttcctcctgaaatgcctttaactttcttccttctttcttttcttcttcttcttcttttttttttttttccggctgttgtacgcaatttattcttcaagatcaaactacaggtcatctttttttggcagccttcttccgtctcagaacactgaattcatacctgtgttttagagcttagactttattgtaattgcctattttcatgtctctttcttcccaaactgtgagttgttagagacaggatctctgaataatttgtctttatacttaaagttcttggcacttggtaatcccgtaggagatttatgttaagacaattttgacggagtcctctaaaatctgtcgctcagtaactcacctgtggatcatataacgttaacttgcctttagtaagagattcgggtatttcagaaacaaacatattagtgattaagattgatacttacaagaatgtctttttttaagagaaaggtttgcttcacaatgtctttgttttgctatttggcagcaaacctccactctgataaaagaaatctttgcttagataatagactcagactaaaatccaaacagccgcacagtaagagaactagaaagtcttggagacaatgatatcaaaaccccgagaggcattgcagtgaagaagtatgcccaactcagcacaccccagtttcaacgttctgctgtttttaagcagcggtacctctacaaggttgctcacttatcttcttaagtctctattttctcatccagaaataggattacatgtcatacagggctgttgtgtaggcatttgagatttcacatctgtgaaagtaggcaccttgaaaagggtcttgcaaacatgaggaattaatatgctacagtgaatatgttgctgatacaactcacacttctacttctgaagaaacgagaaacaaaaataacacaaactattccctttcagcacctcccaccacaaatattcaatcgtgttttattacccatacaatatgctagaagttgcttattaacaaataagttggacacagttgttcatttttcttaggaggtattgagccctaaacactatcgagagagaggtattagagtaggtctctgattatgacagtaagaatagtactggattactgcttctaggctcgaacactgaaagttttaagctgtcttctttggtgtaagagacaactcttaacggaggaaccctgtgtttctccatggtgtattccacaggtgttaagtattctgcactgggttagtgacagccgtggagtggaggtggaggctgttctctagccaaataaacttcagaaatactgaaagaaatggtctctcagaatctttcatcataagaaaaaaacaggaatccataattagcattagataaaagagtagaatctaacagaaaatagcctttccaagtgttatttcagaaacagcatagcaagcaaatagagtattcagagaacaaaaagaatgataacgtttttctcaaaatctgtgaaatattgacaaggtaagtactttgaaattagatttatacttgaaatgtaagtgctaggggtagaatctaaatttctggcttagatttataaaggacaggatcggccttcttgctgccttgtctatattgaaagggaaactgatattaggttgagacaatgataaattgtgtctgttctctgagggtccatcctaagactgaagacaggaattatcaagttttctctaacagtcgtttggcttaattaaaacaacttgcaccattattattagaggtaatattttatacttttctagcactctctgtgggaagcatcgtttgcttggggaaaaaatgcatggcacttggagacaggtgacaccatattttgggctcaaggtctccctgtattgcaagcctggagaaaaggtgtaggtcacttcccaacctcattttcaattccactacctgaactgtaataatccactccctcagaggcagtttgagagattcaaagagatcctctttgttacaattgtctgaaagtagttaaactctatttatcatgaaatgtgggttatctcactttaattcttacagagactgtgaggtaccactggcaagtccattgatagaagagaacctgaagttatgaaaggttgacaagctcacctaaggatgccaagtgaaggtcatagtcaaatctctgtctctaaccttaatgatactgccgtataatgtattcctttatctctggccaccagtatattagataaactcaccatctcatttcagtcttgctgctctcccattcaccctctacttcagcgggaactttctaaatatgattagaacactcttctaaaaacacttaccgtggtttctaatgcctggatgttcctaattgagaacatgcaaatatattccccgtggtctgtgaacttcttgaaattgtaagtaaattttgtgtacactgcagatacctgttttgttgttgttgttgttgttgttgttttgtcaaaagacagtttaacacattagattttgagacttgtccacgttcttacccaaggcctggagcccctagctcaccgagaagccctaaacatctcagcatggcatggaagcagtaattaactgacccttcctatttttccacctgtccagaccgaaatactgaaccacttgtagtttttcccactcacaccaaactacgtctcaactttgaaactgtgctcctctcagggtccttcacttggcctgggttggaagctccaggatagcgggtcatgtctagcatatctttatcacttgaagtcatcatgtttaaaaagatttatattcatggattacaaaagtagaactacttgctgtacaataaagaaacaaatgtagaaagtgaaagtcccctaagattccacctgctagaaagaatctcctttaacatttccgtacctggtctttatatagacctgtaaataaactgtagttactttatcctattctgcagttggatttgttctttatgaaacatgtcttgttcatctttgcaggcttgttccatagatttacaatgtacgtatctgtcattgtctatttaggtgattcttttgctggttagtttaccttgttagtccttgttcctcctctcaaatatggctcctgtgaccaaccttcgtcatttaattttattcacttgtatgagtacttctgtacaattttcctggaagcaagtcacatgtatgcaatttaaagtttaacaatactggcaaccattcatccaatattcatgtttatgcaaatacctatcaatatactatgctatatatatatataattttttttaattttttctttttttgtgtggggggaaaatagaatctccctctgtcaccaaggttggaatgcagtggcacgatcttggctcaaactgtaccaccgggttcaagcgattttcatgccccagcctcctgagtagctgggattacaggcgtgcattatcacacctggctaatttttgtgtttttagtagatacggggtttcacagttttggctaggctggtctcgaacttctggcctcaagtgatctgccagccttgatttcccaagatgctgggattactgatgtaagccactgtgcccgacctgtgctttttataattaatcatttgtgcatgtttcttacccccactagactgcaaaactctcaaaaacaaaggttgtgtgtaatatatcttcatgtccctcctgggttcttacagaaggtacacaaaataaaccctgtaagaatgagtggataaaacaataaacaaaagaataactgaataattcagtagcttctctaatcctcatatgacaggtaatgtttacagttcagaggaggtcctaagtttaacctttaatgtttgctaataaataagtcagtcaaggatgagctcttgtcctgactttatcaaaactagccctccctgatttttggggggctctcagtttccctgtctcacaaagaggagattagcataatggttcttcagatcctggcaagcaactcaattttttttgtctgtaacctgagcatatgccatagtttactcatcactgtctcatctctaatccaaattgttcaacaatgcaataaagtctcaggctaaggttagtgaccagcataaaatatttttggccttttcagccttctgcgtgtctgtacttcaaatgtctgtatattttgggaaaccaaaaaaaatggaaattattttagagaaaaggccaaataggtaccaatcaaccttcttgactatgtttagaagacatttaacgctttagacatcacacaaatgattaatacccatcttggagttgtagtaaatgttgggaatgatagcatgtgttcagagatttgtactttacaggattttcacgtccaagagctcacttggtgtagtgaagataataggagaatgaatatgtagctttcagttttgttgaacttactcttgtaaacattctgaaaagagaaccttttggccaactattttaacaatgcataaatatcaaggcaagagcattcccaacccacatctctgcccattactcatggcagacatcatcatcagttctaaatttaaataatagcatttctgtttttatcacacttttattaagaatgttggggtgagatattagaaatggtcaaatttataggcaatggaaaatgtgataaattcccttttaatcacatagcacaaagctactttaaatctagtatatggcctttattccttttttacatactttttattcttcattgatgatctcaagtactctctcaattgatatttgattctcttgcattgctataattctggctcgcccgcctatttattttttaattttttttttactgcagtatgttttggggtacatgtgagttttggttacatggatgggttctatagtggtgaattctgagattttagtgcacccatcacccaagcagtgtacactgtacccataagggtggaatgaagggggaatagacaaaggccccagtggccctgcatgtcccatatgggtacaggggatgagggataaaagactatacattttatatggagtctttgatccctgcccccctgcccaacctggccgcgccaaagccccaaagtccatcattttgctctgtatgtcttcacatcctcgtagctttgctctcacccacccatttcaacaccaacccagtgtcaatgctactgacttatcatcactatttgaaatctggctgtttgcagtgctggaaaaatgaaattactcaacttccttaactggaacaaaagaactagaaccaaaatgttcgctttctggactcctgtactcgataagatttatctcatttcctatctcaaagtttatatgtggtcccgaagtacacaacttccacaagctctttatgctgcttgacttttttcacctgagtgtgagaaacttctacctgtatgttttctcccttttagctgaataaggcctagcctgctctgctccctctcttcaggaagtccgtcgcgggctatgcgagaggtcccaccttatacccttattttgctcttcctgcagctgtttttctttaattattaatgtgcctgtatctctcacttcactgtaaggttcataagaaagaaagactcaatttatttttctcataaatgtataacagcaaatagtgattacttagcaattgttgaacaaaatagattcttcctattgtaaacatggatttctaaagcctgatagatgactcatctagataaggcaaatgagtaaagagatgtgtccaaggttagccactgaataagtgataaaactaattctaaaacccaggtctcctgacagccacgtccagtgctttttcctctccagtgcaatcgctgcttgtttaggctgactgccttggttgatggtctaggtggcaattaaaggactgtgtgctttctgcctttcagggtggccattcagggcaactggggccttcgtcagttgccccttcattccgcccagaggatgagcttgagcacctgaccaaaaagatgctgtatgacatggaaaatccacctgctgacgaatactttggtgagtggggcctagagctgacttctgaagtaactatcttgctctgatttccttccttagtaattggaactattatcagctccactggtaaagtatttgagtccagatgcatgagagttgatatacatccccgcacaactaagtaattgtaggatttgcatttgcaagactgccatagatgtgatgtctacttagcttatactaaaatttcagtggtccttagagtttccttagatacaaattttattgttgagacttattttttaccagtctaggcaacatggggagaccctgtctccattaaaaatacaaaaattagctgagtgtggtggcatgtgcctgcagtcccagctactcagaaggctgaggctggagaatcacctgagcctgggaggtcgaggctgcagtgagctgtggctcagtgagctgtggttgtgccactgcactccagcctggacaacagagtgagaccctgtttttttgttttttgtttttgtttttgttttttgttttaaaaaagaagacattttttgacaacttattagcttcccattaggcagaaataggatttctgtgtatgttcccatttctcactggtctaaagattcaagtaaaaaatgtggaattggatattgtctgatatccaatttccagattgtactcttaatttttttttctatctcagttgaagaaatgatgttttctttgtagttttaattttcccctcttcaaacttgttaataactaggaatggttaatccttccaatccatgaatataatgcaaatttatgaattatatgccgattgtgaggttctgtggacgcataacctgtcctcagtgaggttaaaattgttcagaaagaggtaagacaagcatacaaataattactagtctaggtagaaagtgataaaagacatgagaaggcttaggtcaattgttgcaaattttatttttattttattttattttatttatttttgagacagagccttgctctgtcacccaggctagagtatactggcgtgatcttggctcactgcaacctccacctccggattttgagcaattctcctgcctcagcctcccgagtagctgggattacaggtgcccaccgccacacctggctagtttttgtatttttagtagagacgaggtttcgccatgttggccaggctggtcttgaactcctgacctcaggtgatccacccgcctcagcctcccaaagtgctgggattacaggtgtgagccactgcgcccggccagaagttttaaaagctccatttattaggagcatccggaatactttggtaaagaattggtggcacttgaatctgagccctttaaaccagtgcctttcacattttctgtggtagaagaccattttcctcccaatctgttggagaccagtatttttgttgagtcagttaaaattaattactagggaaataaaagacacaaaataaaatggaagatgaaattttatcattattagagttaactgttaacgaattactcttttaaatttttatactagtttctaaatattaatcctttgttcctgtatttatctcatccagggtgataagcatttcttagacacccatccatggaccactttttgagtggcactgctttaaggacaaatagagaaacgacatttggggaacagtattagtaaaggcacaaagatggggaaattgcacaggatttttgcttcttcaaatattttctattttcatgtcttttttgctcctatatgggaatatgtaatgacaggtcaactgaccacaccagtccaaaaacacacagtagatgaagtaggaggtattaggatatgaaaaccctggcttttatttgtgttggggtggcagtttagcttagctaaaagagcaaaaagagtgggaatgaaacatctggttgtggtctcttctctgtccctcgctggccaagcaatactggcatgtcacccatctgcctgagccccatttcccacctcactatatcaacggttggggcaaatgttctctagcatttctttcaacagtaataagttcaatgtacaaacatccttaatctaaagtataacaataaagctaaacataaattgatggagattaacaacaatgcatggagaacagtaaaacaaaacatagaaaatccacgaaggtttctagttacatcaaaatacacaaaaagtttattaatgctcttgtcattgccatgtgaggagggtttataatggggtctaaaatacattttttaaaagtgaaaaataaggtctctgtatttaggtcctattaaaaaggaaaagctgacttaccaagtatatatgcttcaaatatcatagcaacaaaatatattgccacaaaaaaaaaactgaacatagatgctaattgcatgaatgaatatatattgaacactctgggaaacagatataaattattacctttcccttcaagaactgtccaagctctactacttagtagcttagaaaacttgaacaagtattattccctctaaaccttcatttttgttttgttttatctgtaatatgggaataataactagcttatactgttgttttaagaaatggatgaaatatttatacaaagcacttagccaagttcttggcatgtagaatatgctcaatacaatactcaaggttctcccatgctcttggggcttatagtttatttaagacataagatatgctcgttaaaaatccattaataatgctcaatttaagtttaagttcctagcaacaatagaacgtatgtcactggtaagtaatcattgccaaatggggatgaataaccatttgagaatttggaaaaatggctaacttttattgagtgcttatgatatggcagcactatattttatttacattataggaattaactcatttcactcttataggaaaacataaccctgtgaaatagatactattatcattttcagattttgaaattaaggcacagaaatattaatttgcctaatgtcaacagctaatacattgcagaactgaattagaatgcagatctgtacatttacacaccacactgtaaaagatggggaaagctagccaggctacatatttagaagagtgtttatggtggagattagctttggacagatgggaaataagagatgagcattctcttctaggtacacagaattaacaaaatataagttgaggccaggattatttaaagaaaatttacgttatgtagaaaacaaaaaaaaaagtgcctatggtaatattcaggctgctctgctaggtggtggtgggggtagatgtgggtcttacctttgaagttcttatagtctaataggatatgtgtacagagttatggtgttataagcacaaggcagaaagtgacaagtgacttaatcaatgttcaccaagtgttctttgagaattcagaaaaaggaaagagaaaatcaagagagagaaatggaaaagtatttatggaatacttagcctttgagtaagtctttaaaattgtgctaattgagatttggaagtaggaagatagtagagaagtgaagtcatttctcatgaggggagtttttgacataacagggaataaaaccactggagtgaagtgtccacgtgagaagtagcaaatattgggaaataaggttcaagtagtaggttaggaccaatctagggaaggctgtcaatgtccggctaaaggctaagaacgttattgtctataatgagcccttgcacattgagatcacatgccatgagaactgctctgtggatagtggttaaaaacatgcactccagagccaggatgcacttcttaccagcaagatgaaatcaagaggcaaaggactagtgaaaagaactgtcctttattgttccgtgctttaaacatttctcaagcaccttctctgtgcctgctactgtgctgggtgttcaggacacccaaatgcagaggctctgccctcatggggctcacgggttcctaggaaggacaagagagtcacagatgtcaaggattttagtgcagatattagcactgtgttgggtgtgactgagctgctatgtgagagtccataagtctgcctgaggatgagcggaaagaatacatagcagtgtgtttgcatcagcagggcctgacccaagagcgataaagtcttctcttcctttctgtcagagttttacctttggcctattctggactgcaaatagcattgccaagcacttcccttaaataacttctcttttttgcaggactatcctctcagccctgccaaaaccccatcacctactctttctttactactttgcctatttaatgctggaatttttatttaaactgtagctgatttactgaaggtaattaagtgctttcatgctgtagatctcctgctagactacaggctgtacttgggagtgagagtgaacaaaatgtaaataaatgatgtcaacagagtaggttcctttgtggtcatgttgctttgcttccaagacactcttttttttttcataagtagaatgattcatgaatatgttattatagttcttgtttctttgcggagcccctcatcactcttaacagttttatttatattgaattataattatcgtatgcttaaaagtactgggagaggtaccagaagatcacctcacagatgacttaagtacaaaggagaaaaggaacttttataatggagaggtctcctggaagccgtcttaaaccaagtaatgaaatttaacatcctcaataatgggacagactggcatgtgccaactgaatgtaggaagtctgcagcatcgtctaggcagtggtcttgctaaaatatttcagctctatccaaccatgaggaagtaaaaaatgcagatgatgggacatgcttcaagacacctgtcctgaattctgcaacactgtcaatgttataaaacactattctagattaaaggaaattgaagagacatgccattcaaatgcaaggcatgtgtcttgattgaattctggatgaaaaaaaaaaaagctgtaaaggattggtagcaaacttagagaaatttgaatatcaatgatatattagataatacatcaatgttaatttcatgatgatattaatggtgttgtgattatgtaggaaaatcttatttttatgagctatttgttgcagtataaggtgaggtatgattgtgtctacagttttattttgaaatattgatagagtgacagaaatagagagagagagacagaaagagagagagggatgattgacagatatatgtagacaaacagagatagagataaatgtggggaggcagaatcacctcaggttaaaacagctagagatgctataactgcaacaactataaggactcccctcctctctaaaagtgtactgaagcctgtcacaaatgaattaccttaagaatcccttcttgggtgggtagagagattgacatttctgcaccttctcaactttcctgttttaatgactacagtgggtctttgaaatttcccgttatcgttttctttttttcttattttttaccagacatacacatcttctattgctggtgagatgaggacaattgtggtagtgatgacaaaagctgatatttacctagagctccatatgtttaaaaaaccaagtcgcagccacaacatgactggcagacctggcgatgatgtcttcatttcattttttggatggggaaatagagattcagagaggctcagtgagttgttcaagctcacatagctaataattttggaatttggcctcactcttctgatctcatgtctatcataatacattaccattacagaaaggtatataaatgctgttcctgctgaatgttagtaactggctgtttctctcccatgtcataacttttccttatgaagttatgatcttcaagtgagagatggagggactgcttctgcccaagattacatgtttgtaatctggacttcgatgtcactgatatgtttcaactatcttaaacatcctgaattaactgctgtgacatggctgaggtacatacattaggaagaccgtctaccgaatacctacctatcagccattttgcagtctgtagttcttctcttgaccatgggagaaggcaaatcactaatagccaccgttcttattttttcaagtcaggtttttttataaaatataacaaacagggacccttaactgtctcagctgggtttttttttaatgatttcttctggaaaggtgatagttttagtgtttccatgccttcttttgtccatgttcattataacttgtgactgtcgcattacagtattaggtaaatgccacagatgttgaaccatgataaagcagttggatgagtctatatctctaaagggaagatacagtctctatactgtgggcatttgccatctacttggacttaagttttggctataacagatttccttaccatggacctgtgtctttccattaacactggtgtcattgagagggcctctaaacactaccctgtagaggaaagggaggaaacatagtagaaagttgggggtaggagaaaattcttacccagttcaataaaccagacagtgagtgtttagcccagctcatctacaggaagccttggttcaagtgcttgcattttagagcaaattttttcctagacaactagaaaaatatgttgatactaaaggaggctctcagttctagtgatagatacttaaaaagaacaaggggtggctcatgcctgtaatcccagcactttgggaggctgaggtgggcagatcacgaggtcaagagatcaagaccatcctggccaacatggtgaaaccccatctctactaaaaatacaaaaatcagctgggcatggtggcacgcacctgtagtcccagttactcaggaggctgaggcaggagaatcacttgaacccaggaggcggaggttacagtgagccaagatcgtgccactgcactccagcctggtgacagagggagactccgtctcaaaaaaaaaaaaaaaaaaaaaaaaaaaaaaggaacatggggcgatgaagtagctgtaaattattataatttagagtcaattcagagcttataatagaaaatggaaaacttttaaattgagtattaaaatgaataggagagaaaggtattattctcagaaaattgggacatctacagggctagttgccagttttaaagtttgttttttcaaacagttttaggcagctaaaggaaagcaaagttgagtttttctccagataaccttgagatatctctttgaaattgtccaagacttttctgtgttggttgatacagccacagccttaagtaatacacccagagcctctaagttttatgctttcattcattttgtaagagaaagcgtgtttgtatatgaagcttttcatacatgcatgtctgtgactatggcataattttttccaaataataatattctggctgaggagccctcaaggctgaaggcaacactgttggaagacagtatctctggaaatggatgttgtaatacatctaaggatggactggaaatatctgacagtagatttttaagcatagagctgtaattatcttgacattgtttatatgatattgtcttattccttctttaaaaaaaagcagaagtatgtgagccttaaaattattgagtgagctatttgaagaatccttcagagcagtgccaggtaaattatcttctcagaacttagcatttatctaaggaaactttttgttcatctctgagtattgttagtaggagtttttgagaatttttgcagaaaaccaggagtttgttccagtggaactaggccttcatttttcaaaggacagctagacaaaagtgaaggcatgaggcagcagggacctagcacatgctaagccttgagagaagaaaggcgttaacatgaacaaagtgctatgatcggtcactttattggttatgccagctcattgtatttggtgccttggtatcaactcaattaagatgaaaatggagggccagtgaatgttcatgaatagaaacagaacaaaaaaaacaatgaggaggatggtccattttctttctgcactagtgggaccagttgataagtgagcttgtccagaggacttgactaagatgcttaggaaattagaaaccatgatttgaggtgcagttgaaggtatggagagaggaaaacctagagccctcattgctgttgaaagactatcatgtggaaaaggaatttgacttaatatttgtgattcaaaaattagcaacaaaggcaagtgaggggagtctggccagttcccattcagcgtaatgaaatcactttcttaagagacagaagaaagtctttgtaaaattctaggtcagaatctaataatcccttgttggtgaaaatggtgataggtactcaagcaactgatggatgattagattatacttcataagtgctgtccaattctaacattttgtgacttaggcacaaacaagacgctaaacttgtttggaagttagcgtcttgcatccaacttctaggtctacccctagattatcattattattattacatgatttcaactaacatttatataatgctttttaaagcacttttctacatgttatatcacttgagcaagacagcagtcctacaaaatagacagtgtgtttatttccatttgggatatgaagaaatgaaagatttcagtgattaagggactccccactccccagggctctccactaccctcacaagtcataaagcaggtaagtagcagaattgccctggggcacaggcctacagactttaaattcttttcacttttcaccccattgtgctgttaacaccatgttgctgaattggtcatgggccataagatagatgagttaacatacttcatgttttagctttttaatctgtataaggaacgatgtgattactttgtaaagtgcttagaggatctcaactgagaggtgtaaagtaatttgtatttcatagtttgtgttattatgtgacaagaaaatggtttccaaagtgcttctatcaattacaaactgggaaatgactccaggtaggcagctacctttagtggatcttgttttcacagataaatgacctaattaatgaaaaaccccaaaaccacaatggaagaaaaattagacaataagtggcttagagagaaggttgtattgatttggggggaaaaatgggttttttggttttgtttctctctaactttttgtttagggtatctttgagttgtgggaatagaatgttctctagttaatgaggcatattagatatattttcttttgtggtagtgacttctggtaatgtttgttcagagtagtatatgtttacagcactaaataaataataattctgagcattttatgtgttctatcttagcatacattaattttttattaatttggctagtgtgtttgtttgtttgtctgttttgtgtcagagtttcactcttattgaccaggctggagtgcaatggtgcgatctcggtgcaccacaaactccacctccaaggttcaagcgattctcctgcctcagcctcccaggtagctgggattacaggcatatgccagcatgccaggctaattatttttgtatttttagtagagacgaggtttctccatgttggtcaggctgatctcgaactcccgacctcaggtgatcctcctgcctcggcctcccaaaagtgctgggattacaggcgtgagccactgcacccggcctggctaatgtgtttttaagcattgatttggaatcccagacttagagtaaagaagaatgtgatcttagaaattatctaggaaaatccttcattttctagaaaactgtatcccaaatgacttatccaaagccatgcaactaggtgtgttttgaattctatggtcaaaattttctttctgagtaatggacagtctccgatggcatgaagaggaatggcagggctgtttacaaaggtgcagacataggtcgggcctgctacttttgtgatctcagaccgtagatccaccttattcaaacataagaacacattgtccttaaaaagaataaaataaataacttttaaggaattttgtgtatgtatttttcaaatacaaaagaaccaaagttttcttattcaaaagaaacaaaagagattcccagtatcttttatctcagtgtctttatccaatttacttgtaatatttcctatctgttttcttcactaaatgtaagtctgcgtgagggcaacaatttatgtttagttcagtattgtgttcctatcattcctggaataatgcctggcacatcggagatatttaataggtgttaatgaattaatgaactaataaatgaaaactgtgagcagactttcacacttctgtgacaggacatggtatatagtaaactatagggaggaaatacttcattcatttaagatatatttatttagcaccttataaaatcataaaacgttagagctggagggaatcttaagagactaggaaaacctcttcatttttagagatcatgaaaatgagtgagatttttagggtcccaaatttgttagtgacagagccacagagtataactcagattttctcattcctttttttaattcacttaagggcacaggaaaacatataaactagagtaagacatggctgctacatttattgaacttaaatttaaattgttttaacacctttggacttgatctcttttgcatgtatcttctgtgaaatttaaaggttcaactggtcaatgaagagagtacttggttaagattttattttttaagtactgggtcacatttcctccacctgtaggtttcatctatagtctttggttcccaggaccatttcgtaccaccacaattttcttctgttctaatctaattggattggatggatagggcatcacattgaaagaaacattcttttcttacgtttacttgagttgtccatagcaacctgtcctgaaagattgtccgtttaaagtaagcctcttcaagactgtgaaccaccacccaagattggtgtttcataccgtcttgatacaaacagcagacatccagtcattcagctgcgttaggatcactatctctttatcagaagaaagaagagaaaagtagaagagagatttctacttcataattgaatgttctttgcttattaactgtggaagcaaacttgaaattctgggagagaaagcactgatggggcacacattgtctgtggtgcaaagaaagtctcagtttggtactggtacctgaacctgcaagtgctaattatgcatcttctggtattaacacacaaacacaattaactgtgaactcagctccttttccctttcaaaccaccatcattcccccaacctgcactttccccaccactttctctaaaacacacagataagcatctccttacagactttgaagtgacattaggattgtcagaaggcataattaattgactgtcagcaaagctattgtttgaacatctctggagttgtacttggtaggcatcttgtttttttgttgttttgttttgtctgagacgtagtcttgctccgtcgcccaggttggaatgcagtggcgtgatcttggctcactgcaacctccacctcccaggttcaagctgtgctcctgcctcagcctcccaagtagatgggactacaggcacgtgccaccacgcccagctaatttttgtatttttagtagctatggggttttaccatattgatcaggctgatcttgaactcctaaccttgtgatctgccagccttggcctcccaaagtgttgagattacaggcgtgagccactgcacctggccctgttgtatttttaattgaccgattctttcctctacaaatatttattgagtgcctactactcaccaattattgtagtgtatactatgggagataatggaaatgatataatggccaaggagagaaagcatttgtcaaatcctctagggccaagggctttgatagagaacagatttcacaactggcagtggaaaatgtattcttttccatcccggttcagaggattttgccactgtacttgtgccatataaaatgctgaaatagttcatgagaagaggtacaggcatacatcttcctggtgtgtgaagatgagtggcaatgcactgtctctggttagagttcccaccaaaaattgtaaaatacttaaaaagaaaaagcaaaaaatatccgaggcaattaaaaaaaaaaaaaaaaagggaaatcacagaagcaggtccaagttaatgaccttatcccaattctgttcctaagtctgactctgatgttagtcatgttgtatttaattcttccagatttcctatagtactgtacagctctgatctcagtcctcacttggttctaaggtttgaccatcaaactttgagcttgcatgagccttgaacttggctctactcctatctggcagtgagcatcatttgttaaaattcaacaagagcaaacagaaacagtgtacactagtgacttgctgaaagagcctaagaagatacagtaggcaggagtaatggaaatgagtttttaacctccactgactcaccctttctttcctagtcacccttagggtcatggcaaagttacagaggcatttagaaatcatcttgcttgaaagcttccctttcttcagtcattagtgagcatcttcataattttttttaccatatatgtaaactatccatagtattatttgcctaatatttttatttaaatcaattaactttttatccgactttgtcttccttcatgtcaataacatctataatttgattctgtgggttgaagtactaagttgcttctttcctgtaaaagatattaaactgaatactatatttaaattttaaaaatacggctggaattacagatcacatctgtaatcccaacactttgggaggccgaggctggagaattgcttgagtccaaaagtttgagaccaacccaggcaacagagtgagacccccatctctacaaaaaatgaaaaaaatattactaggtatagtgatgcacatctgtggttccagctactcatgaggctgagataggaggatcacttaagcactggaggtcaacggtgcagtgagccgtgattgcaccaccgcactccagcctgagtgacagagtaacagtctgtctcaacaaaacaaaacaaaacaaaaaacaaagttcatttcatgcaccagctaatgtttgaaatattgagaaatgtggatatcattcaacaagaagaaaaattgataggataccatggtgaaagaaatggtgtcctcaagcttacccattaagtgtataaagcataattttttcttttttcttttgcatgcggagtcatcatgttcttgtgaaggatcgtgttgtgttgttagatattgttccaggcatccagcactgagaggcattgccggcctgatactgtcccactgactcactgtgacatcttaggccggtttctcttccataggtctcatctctcatatcacgagattagaacacatgaactattgtgatccttttgaccttaattcctttgcctcaaacacttttcatatattgtcctctctacactgttaaaatgtaggtgagtaagaaaagcagctgccccatataaaatttcagtgctgcttgcctcagagttctggagaattgtaaacaaacccaagaattatatttcctagatcactttatgctctgcttgttactgttacccatttcctgaggtttatgagagggtcactgccttgaaagtagctttcaatgccaggtaataaaagtggaataggatgttgaatatgatgaagaataccatgcactaagtgttgggtacactagcagcgtcactgtgtttcagcattttcagtaatggtgttcagtcatggtaattggcataccggctcagtaatggtgtttactaatggtaactggcatatgtgagtgatattagtgtgggtaaccatcaacggagcaatagtctaatgtagatgatacagcagtaataaaaatgaataattcatcttttgtcagatagcttagtaaagtgagcactagatttggagtcaggaaatccaagtgtaagtcatcttttctgtgtgacgttagtgacatgtgacatttgtgctctccttagagtattttgttatacagtcttgagaactcttcttttagcagctttaaaatgagtgttattttgccagaagaactaacatatccatggacaagtcagaagttaaaaccaaattatttcagttttcttgtttagattagctcttctatagaacctcagagtcttcctgaatttcaggtatttcacttattaaaaagataattatccctatctattttatgtgcatattgtgggaatcaaattaaataagtcggtatgaaaaagttttctaaaccgtagcagaagaccaaaaatttaagaggtgttagtatctccacctagtgcagcatctggtttgatttgtgtcatttatgattagtgtgtaataatcattcctctaaattgttaacgtcagtgtttatctctatttgaattaacactttgtattttcttatgatgttctgttgtaattggaatatcgctggagaatacaaaaagtgttttttagtcattgtgtgtgagaaagcaacacaccaagatataccacaatgttctcgtttgctgagcaaactactcttgctttttaatgtggaatgtagaagaactaattgaaaagagacaaaatgaattttgactcaaattgaacaggatgaatcataacccactttctcatctgagatgtgaggaagaaaatgtaaaggaaaccaaccaccacacagctttactgtcagtgtcagcataatcaatatagagtgtttttcaacagaataaagaatacatttctgcaaggctgagagttgcaggtagtcggaaacctagttatttttgctttgtctatagtctgctaaaattgtctcgttctgccttggttaaagcattctaatcaagagagtttggggcccctcagtaattgcttctcaaaccattcagaaatgtacctgtgatctctattgaacagaggccaatcagagactggaccctctattgaacgtctggtcccagtgtcattttgtcagatggtcaagagcagggagacggcagacatacagaaacctggacaggactgaattgctgcttccctgaaaataacttacttgggtttattgatgtgaatgattaaacaaaaacactttgtcctattggattctagaatttcgatgcataatccacttagcttgtgaatgtagcttaaaaaaaaaaagattttacacaaataaagaggcactatagcatatcccaggaaaaaaactctaattcctaagtcaaaatttatttctaatttttgttactattgtatttgattcataactcttatgatctttattttcctcatgtgtgtttatatattttctattttactgtaaaattactaagatgggagagcacatctttcttatcttactcttcctctcttccccaaaaagaaaaatgagaagaggagatagagctggatgatttttttaaatatctttgtgccactccaccaagagttttgcttgcaatagaggttctctagtctgatttgatcctaaaccattctcactaatgattctgcttaaaataagactagtacatattgagcactgactatttagtatgagttctacatgcattacttatatctggactataactctaggcagtagatactgttttttacaatgagaaagctgaagccaagatgagttaaataattttcccggaatctagtaattagagttgcaatttgaacacagaacccagctcttaacccctgcatataccatgcctgtgactatagatttcagaaaatgagctagccaaagcctggaaaaagattagactcacaggatctgtgctcattccatgacttttctggtaaatcctattctgttttttcctctactttccttgggggatgtttttagtatgatttgattttctctgattgaaagctctcactactaataagggagcaattagaaatacaggtacaccatctctttgtttgctctgtaccagatgtctgctgagacagtgtctttgccctcctacatgggtagtagtgcccagttgggctgcttagtccagataacaaaaggcgatttctgaccgtaattttttttgttgttaataacacttgaaatatgcatctttattcctccattccttcttggacttgaaacttggttattatgattgtagcaatatttatgtccagaaactctcttctccccacaatttgcctcaatccagtactgctttctttcacacacgtaaatagttttaacttttaacgatccatgcctatggcatcttctagtctagtgatgtgtagaaaagccaggcccagtctcattgcccaggtggaaataagagagagcaaggaaaaggggactgattttgaaaataaagtcaccctgttgacatgtcatcagtcaaaagagttcagtgcaatagctagcaattggctcactcagtcggaagttgatgctattttaggccgtcagcggcagtgtcaatgtatctgtgaattttgccattttatttcattaagatggttcaggaagtcagacactgattaactgattcttcgacttagttcccactcctaattttggatgtgtggtgtctttaggaagctgctgtgtcaccttgattctaaagaaaagtttcgttgtgcctctagagcaatccggaacagtttacccttgtgtctggttatgctggaacctgctgtgttctacctctctggtcacaggtggtatggggatacttttgcttctggttctcctctggcagatcaagcaaatacaatccaagtgcgtgcagcccgttcccattcaaaatgtatccgtcataataacagcattctcgctgacgcattagactcaaggtggacttaatttggagatcacctatgaagacatctgtggaaggaatggcctcagcattgcagtcactttcgaagtcaagaggtattctagacagaccacacagcatgtataggtaagactaggaaaattctaagttttgtgttgttgctaggggcttgtaatcttattttatttgtaaacatgctctaaataagaaggataaggatctctagataggaaatatatgttgttctttgtttctccatttattcaataattattgaaggcctatgatatgccagacaattgttccaagcatttccattaaacattagtccacaaaatatagacagaagtgcttacaaatagctcaattccaatatgatacattgctggagtttggtgatatgggaggaaagaagttagaatggcttactatgaatggaaaagtggagaaagattttctgacatagatcatgttaagactgaatattaatggaatttttcaggtaagccatgaattcaagggcatttcagacaaacaattcaatagggacaaaggtatagagaccaacaccaaaaaaagtgcaatatgactgccaaagaatattggaaggagaaatgagactaaatgaatgattagtggccagatcaagagggcctcttatttcttactaaagaatctagagtctgtcctgaaagtgtggaaactccatgaagggtttcaacaagggaaccacaagatattgattaaagatcactctgggtactattgtggggagaggtgttcaatgggacaagatttgggggatgaagatcagtctgggtgtcatttgtacttgtctaaggggaataagggctggaaccaagatagtcatcttgtgacaatttagagaagggtttcaaaggggcgtaagagggatgggctgagacttattcctgggcctctatcttgggtgggtaatgacatcactaagtgatgtgagaaaaagagaaggagttcagtaatggtgatgccatcagtccacagagatcctctctttatcaatacttattgagcacttgctgtgtgtacacactgttctaagcattggtgctacagcagatgaaaagcttcttttatggggcttacattccagtgagaagaaaatgatgacacataaataaaatacatagcaggtcagatagcagtatatcctattgagaaaattatgcaggagaaagggatagtgagtgatacagtggtattggagtggaagtattatggtgaatagtgtgaccgctataattgtgaggtctctattatgggtgaaatctggtctgcctaattttgtttcttttccattttttgtttgtttgatgaattattatttctcgtaaacaaggcaaataaacagcaatagcaacataaacatttacaagcacatagatgtaggcataatagtttgtgttgccaacataacacatgccaggaaaaacaaaagaaaacagcagctaaaaaaagtaaatatcaaaaaagggagctttctcagacacaaattcttatcattcaaaatgctgtgtagtttgaattagaaagtcacagaatgggaccttagatttaatccaaatctcttagtttaggcagaaaaaccttcagccgagcaaggaagtcagttattcaaggacacacaggtaggtctacaatttaggtgctctaacttcatgtctaaggatcttacccttatcaccatcccagaaaagcccaaagtagcttgggtctgaatttccactttgccacagtaaccttgagcaagttttgcttctctttgcaacagtttgctcatttgcaaggtagggatgattataaaagtgtctgtgatagggggttttggaggattaaataagttaataatacatgcaaattacttacagatgtgggctgacacacagttaatgttcagcagtactgagagtattgaaacgttatgatacaggctacttaggttttgtgtatttgaacataaacttcagaccaatttctggtgatgaccacgggtaagatattctgtgttttagttaagatgatttccagttaagatgttgaaatattaaatacttttcttgggtcactgaataattataaaatatattaaaataactttgatatttatttcattcatagaagttctagacaatccagtctagagaagagttatgtaaaattctacaccagaaatagaaccgtaaccttgaaagacagggacacttattcatatatgtatgtctaacacaaatgggcctcataattgttgacagccacttattgagcattgaccatgtgccaagcagcatgctgaacacttcacatagctggtcttacttaatgctcacaacaggtaagcattcatatccggatttttcagatgagaaaattgagtcttaggcagttcagtaccttgtccaaggttatacggatatcaagagcctagatcttcataagccaagtctctgttctttttgctcagcaaatacctatttttaatgaggatgcttttctcaactagctactatattctgcaaccagtctgcattttacactgctatcctttctgtgtcattcctaatactcattcatagaattataagatcatagattgttaaggctggaggaaacctgaggagtttcttggttctcagcataaagactcagaatcacctgggggagctttatcacattcaaaactacacacccacacacatctaccttgtatttacaatgaaactctgatctactgacataaccctagatccactgagaaaatattattactcggagaaaatttagctgatggagtgtgccataccccacgtgtgatgagataacaaaaaaagttgacaattactgatctagtccaatcttacatcacaaacatgaaaacagaatgaagagtgacaatcactttctaaagatttttaaaatgtcacttataactatctgcaaaagaacctgcgtcttttgacttataatgttaagtgattttcttgtttattccttaaaactgcctttgtagaatgcactatgttatttgatggttctggagtaatacaaaagaagagagtgattaatttgcctgggatcctacaacaaaccagttgaccaagagataataagcttattatattatgcagatctatacctattcacttcgtttagttaagaaacagctcatcaatatggaatacacattttcatagtagatttgtgggttgcatagcttttttgtgtctgttttcaatttctgttcctttgataactgaacaaataacagagatggtgaaacccagcaagcaaattatcttccagattttatgtgatctcccttctctagtgagttggtatgtctactaatgacacagtagattataaggttatttggtttaagtaaatatttatgcagagcctatgatatgtccatctctgtcttaggtggggtgaattagaattactataagtgctttctgaaaaaaaaaaaaatgtaccatgaacaaatttagaggtctctgcccccaagaagtccatagaccattataggttagagaataaaaaatatatgataatcccttttcccatgtgataaatgttataaaggagctctgtacctatgattatgagagggaatgtttgagagctctaggaaaaacctccctagggagattaagaggtgatatctgatgtcttcatgaaggaataaaatgtttccaagtagagaaagagaagaaagatgttagatacagaagaaacagcatgtacaaaggtatagaggtaggaaaacatggtattctgggaacaggaagatgttacttcctaacagaacttctctgtggctgaagccacattgagttgagggacaagtagtgggacaaggaaggatagagagtctggagttcagtgataaaagatcttgtgtgatagtcataggaaggatgttttggatgtttacctgtgcaaaatgggaaattgttgactattgtcaaacaatgggtaacatcagattagtgatttatgtaaaactgaagggataaccatttctactgctgtataccacttggataaccttataaagccacttaatagggaataatggggctggaaatttaatgggaatagatttaaagtgcttgtgggataagaaacatgatattgctctcttttgttctctttcagttcaaaacaggaagtgcctaggtatgcagaaatgcaaatcaagccagctatatttttggtgtgttttgtgtgtgtttagattttcacacatcagcaatactgtaagaacactatgtggccaggcacagtggctcacgcttataatcccagccctttgggaggccaaggtgggaggattgcttgagccctgggagttcaagaccagcctgggcaacatagtaagaccctgtctgtacaaaaagtgaaaaaaaaaaaaaatggatgggcatgatggcatatgctgtggttccagctaatctggacgtggaggtgggaggaggatcacttaagttcaggaatttttggtggctgcagtgagctgtgaccatgccactgcactccagcttgggcaacagagccagaccctgtctccaaaaaaagaatactattatgtgaataatccaccagattcaactaaaaaatggccatgatgttttaaaagtacatatatacacacatatagatttaaagattactttcaactttctaagaaattagtagatctttagaaaatcattgtgcgtatgtgcatatgtgcattgtttgtgctggtcccaccttcaaggagaaaatatttcaagatcctgatgcttacttaagaggttgtatgtgtttaccatggaaaggaccttggaaatcatctcctaattctgacttcattatttatttattttgatgaagcaaatggtgcccagattgaaacaggagtgtaagccacagccaccaagtgccagtgcccaggctaacacttttctccattaactctggaaaccttatttcctttttgtaccacgtatttacagtgtttggtagttatgaattgagtgaattatcccaaggttggagatatcttggtactcacttgtaagtggagaaacactaataggaaaatattctgggaatctggtaaggaagtatgagtgaatttatcatatttaacctttgttcaaatacattaagccctttcttccctttgtcattctcaaactggatcgacatgataggaggagaaattttatcaactaaaaggggttgtgtcaataagtgtttatgatacctctaaacttaggccttaaaacaacacaatctgtgatctgacagttctgtaggttagatgttcaacatgagtctcatctggctaaaaccatcatgttagcaaagctgcatttgtctctgaaggttctttctaggggagaatcccccttgctttttctgacttctaaaaactgaccacattccttgacttgtggccctctttttccatcctcaaagcctgtaacatagcacctctgaccatttttttcatagtcattctgtgtctggccccagctgggaaaagttctccaattggtaaggacctacttgattagatatgacccacctgaataacctcacatactcttcctatctcaaaactcttaacttaatcctatctgcaaagtccgttttgtcatatacagtagcatgttcataggtttcaagcatttggacatggtcctctttgggaggcattacgctgcctgtgacagtgctcttctgatacattttcagtgatcttctagacataacaatcctggtcctgggaacatgcatggcggggacctaaataagtctattttttaagaggccctaccctttgcatagattctaatcttggggtaaaggaaagtttgagatttcactccacctttttttttggtgctggtatttccactgtgggaaagatcattcggatttaacaaccacatgaagctcctggattatctggggcatgtttgctgattcccaaggaagcttgatctttttgatggagcacttgagctggtaagttattagaagctgagctataattttccttggcattggtcatttttgtctaatcttttatttttttgttttttttgttttgttttgttttgttttgagatggagtctcactgtgtcccccaggctggagtgcagtggtgcgatctcggctcactgcaacctccgcctcctgggttcaagcaattctcctccctaagccttcagagtagctgggactacaggcgtgcaccaccatgcccgggtaactttttgtattttcagtagagacagggtttcaccatgctggccaggctgatctcgaactcctgaccttgtgatccacccacctcagcctccaaaagtgctaggattacaggcatgagccaccgcgcctggcctgtctaatcttttatttaatgcatctaggctcctcctttcttccttcatggtttcctttttcctacttccctatctcgttttctttccttcttttcatttacagagaaatggtgttagaaatgaatgagaggagtgagcaaagaaagatgagggaaaaatagatgtgttaaggagtatacgcataaagaaaagaggccaggaggaaaagctgttcaccccgactcccatcctaatcttgcgtagtctttcgtttcctgagaatagttaggtcagaagttacagtagaaactttcatggaatacacaaaagggaattaagtaaggaaacttgtgaccgatgctatgggaaaggacatgtttgtcaaagcaataggttcttcctgagttagagaacaattatggttcccccatggaaatgtttatctgacgcaatgagaaccaggtcagacacaattcagaaatgaaatgaataaaattattctaagatctagatgggaggagacataagggattgtgttttgatagtcttaagggtgcacttacatttacatccccaaattccctcttccatgaaccactgtgcactgtacattgccacattaatgctaactgtgccaattagattaactaatattggtcaaaaaagaatatcctggccgggcgcagtggctcacgcctgtaatcccagcgctttgggaggccgaggcgggtcacggtgaaaccccgtctctactaaaaatacaacaattagctgggcgtggtggtgggcacctgtaatcccagctacttgggaggctgagacaggagaatcgcttgaacccgtgaggcggaggttgcagtgagccaagatcacaccactgtgttccagccctagcgacagagtgagactcttatcaaaaaaaaaaaaaaaaaaaagaatatcctaatgaagagaaaaatgacagaaatttctaagataactgtttcatatttcttcattaaattaaaatgaaaatacatcttcttagagtattggggtataaattaaactgaataataccagtgaaaatgctctttcaactataaagtattagagttgagaaagttctttttgtttgactattcattctgtcatctcaccttagtggtaatttcttctgcttggacaatagagcaaagttgggccagtaccactttggcaatgggcatcaaagtcgaagaatcccatgtgcaggtcgaactcagtgaaaaagggctggaactggctgctcctgcccgcttcctgccatagtcaggcccacatttgaactttattatttcgggggtaattaccttgtgtagtcgtaaattttaatccaagtctcatatgtgactgtggatgggtacagtctaaagggaacatttctttatttctctgctgcagagtgactacgtctacagtcaaaagttctcaacctatcttaggaatcttactttacttcaccaaaaacgtgtgtgtgtgtgtgtgtgtgtgtgtacatttatataccatacatgtacacgctagtatgctttagttaaaatacaaagcctctgtagaaaacagaagaattctgcaatacccctgaaaaataatttattttctacatgctatctcataaatctgtactaaaatcaattttgaaaaattaagccccccttctctaacatggtactctctctctttatttgaattgtttcatgcacttcaacaattatttctagtttcatttcttttcatgaggactttattccaagataattcaatttttgttgctactgtgcaatctttttgcttgttgttgttgatgtgtggttattgctagtttaaaggaaactcttgactttgcttgctcatatccaaacactttaccaaattcagttgttaacaaacttatattaacaacgttttcaggttcttcagtgattattaggctactgaagtgtttttgtggttgttttgttttgttttacttctattggaattcatgtggctgtttatattttgctagaaaattatgcattttgtcaagattgtctactgttgttactatgatataggcgtatttctcacttatactttttaaaatatctgtcttgtccatattcatagcttccttttgctttgactgtttttcctttttcctccttagtggaactttcctaagaagtgtgtatatgtgtgtgtgtggagtttgttttctaactcattacttttaacgtttgccttattattttatatatccttctttaagtttatttagttattcattgttgtagtatcttactctgaatgttcatttatatttctctgtctcttctgtttactaataaaaagcatttaaattgatgaaatgcctctccttgactttatctgcatcccatttggatatcttttaaaatttatcataaaggtgttataattcagtcattcttccacataagaattattcagaaacttatttctaaattatttttatcaaaaaatgttattctattttttaatttgaaagaatttaagtcttgaaatttattagtgacatgtaaattcctgactgagcattatgaaacttgtttagttcattgctgaatttggtattttgtcagctgggaacactaaatacccccacttaacttgctatttgtgaagctcagagtagcattggggttcctgtacactttggcaattgccccatggctaatttggccaacttccaattcctcagggagcaacaaagagttgtctcattgccacctgctattaactaaatgcttaggattcagtgtcctaggggtgactgggagacatgggaatggattattgtaacagcctgtggaacctccttccctggggaattttgagaacagcaaagaaccatctgtctgggctggttttaggagcagccctgcctgaaggcaggtgcacggattagatgacctgtgaagattgtcatccatcccaatgacttcaatggaaaggatgcatttgctgaatttgaaaagagtccaggaggaacactgataggtttggggagcatatggtcaagagcctgagggtattgagcccttcttgaaattggagacactcggtgtcaccccatgccctgaattccagaatgccataatctacacgtgaacccagcagtcattcacccttgaaaattatgtgcagatgtggttcacattggagtattcacgtcgttgttgatcataagcagaattcctttttaacacatagctcaactgatctatacccagaacatactgttgaccctgattcttctggttaagccggatctgcctgtataatacatcatttactgacccactgacattgagttttcttagcttgtttctcagtggttgttctgtgtttgtttcaggcaattaaatatgttgatgcatgtttcagaagagctctcctaattatatcaacaatagctttattatagttagaaaagacaaaatgctaaatgaattagccgggttaagtcacatttattgtgatttaattcttactgtatgtagtgtaatataaataaaataaaaattttattttattattattattattttttgagacgaagtcttgctctcatcccccaggctggagtgcaatggtgcgatctcagctcactgcaacctctgcctcctgggttcaagcaattctcctgcctcagcctcccgagtagctgggattacaggagcctgccaccgtgcccggctaatttttttgtatttttattagagatggggtttcaccatgttggctaggctggtcttgaactcctgacctcaggtgatccacccacctcagcctcccaaagtgctgggattacaggcatgagccactgtgcctggcctgtaataacatattttaaagttacagagaaagggcaatgtccccaaaatattttcatgatgatatgtcagacatatggagtttcaaactaacactgtggtaattgttgtgtgtctaaacaagtgacaacggggctgggcagcaaaactagacatgggagaagccaactgatccattgagctgtcccagcaagagttagtgggattatgatttatgaaagacctgtgtggacaaggtagtttggaggaactgaatggagggagtgaattaattagaagaatgagacaggactagccacaaacttctcctagaagtttaaactattttaaaaataagagttgtggctcatcaaaaaagtagtgttttcaaaaaacacagccccttcacttaaatgatacgcacagtccagatagactgcaaaacttaatgtttagaagctaacaactttttaaaaactttattgatctgatctgtactgagaacagattttctctgtgctttataataaaacataaagatcaatcacaaaataatttatcaataaattttaaaacaaaaattttaaagtgtatgtaaatatcatataaaattaagaaaaaatatgtaagaataatatttgcaatgactatgataagcaaagggttaacaactgtatgaaaattttcatgcaaatacaaatatcccaacagagaaagacaaggaatgtaaataattcttaagtagataaatacaaatggatatttaacttaaaaaaaattttattcacattagtatgaaaagaaaatttaaataattgaaatctagtttttcacttatgaaattagcaaagatttaggaaaagaaactactgtcatttgctgctggtaagaccgtaaattggcccaaaacttttagaaagttattttacaatatttctcaagaactttaaatgtctcatatctgtcaatccagacagatagatggatggatggatggatggataaatatcagatggatggatggatggatggatggatttatcagtaatagatacatagatggatagatagatagatacatagacatctatagagatatatgtttctatataaatatatatctatattatcctaaagaaatatatatttgaacaaaatctatttatgaaaatgttcactaatgcaaaacttataatggcaaatagaaagggaatctgctgaacaaaatattatcaatcccaaataatgagatattgccaaaacactatatttaaagaacttaagtgatttgggaaaatattatcttgtgagggcaaatacattaaatttgtatattcagtattgccaaatttatataaaaaaatgggtagaatttctttttaaaaaacaccttaaaatataaacggagtacttcccaataatcagattacatgtgattttattttcccccctaattttccttaattttcaagttccgtacaatgaacatgtgttattttcataagtataaaagacttttttataaaaagaaatatatagaactaattagccaaataggaaagtttctaagaacaagggaagaaatttgtgaatggagtggtgaagagatccttggactgagagctgggcaatgtggatactaacactggctctgtcacaaagaaacaaggagacttattgaggttctctcttctggctcaaagattttatgagccagtaatttatcaaagagcccatcctagtgtacccatgggcctgtcaaccctggtagacaggttagtagcccagatgaaatttcccgtggatgaattttagaactccgctccattgatcacccttttttgttgttgttgttcttttactcttctggaagagagctaagaaacttctgataccatccccctttcccactcgccctcagttgtgagatggaggcagcaaatattcagtgtgttctttttggtcttaagtagttctagactcagataccacctcagcaccaggctgagtttgggctggctttggctacggtttgctgctgaatgtatcagtgatggacttttgaatgtttaatagccttagggaatgtggcagtgtcccctacatagagaactgtagattctttagtccaccatttccaaccctgtgatttagattgtcattataagcatcacaggatgccctgagttgagaaaaatctgtgctgtttaaatggtctttaagcagcctttcctttctcctctttctcagctctattctgcttaggatatggcttatgccacttaatcaacatgctatcatatgctttctgcattccagacatatattgaaatatcttggttgttatagccatcttctcccacatacatcccctttctctcttcccctctacatttttttctgttacttgttatttttggtactgatgtgcttttatttgagtaggatattggaatgcaattgtcttcttagtccaccatcccctgacctgtcattattgaaaaacaaaattctgtagcaaatgagtccccgaaagtgttttttttcaaatgatgatgatcggtcacgttgtgaatctgtagactcctttgcgaaaacaacaataaacacagtattatttatggtggatatgctaggtacatccaaagctcttcatatgtgttgccttgtataatttcctcagcaactctaatttaatagaaactattgtccatgtatagatgaggtagtttatacccagataggttatacaaacctgtaagtaacagagccaaattttaaaggcagacaatgtaactgcagaaaccttgttcctaattgtttaatggaatatggtttagaattctgtgtggagaatcttactctaccctagtggtaaacttaaagctctttaatttactgtggttatattatatatgtgcaatggatccctattttcaaacatagtcgtttgataaagtgtgggctgcttttcatcacgaatgtaaaaagtctcttagttgctacacccagcaactaagtgtcctttaattcttaactttgaatacttaattggatccctggtgctatgtgtatttgatttttgttgtgaaagttgcattcactgtgtccctttatttgacatcagcaagatgtaatttctataaaccaattaatgatgcacctttcaactcttactatgagaatattagctggtgtaaatatcggactccttgtgaaggatgactcgctatctgattggtctttaaaaaaatactttaggaaataatggcttgcccctgcatataccaatttgaagtctttctaatatcagccattagctgggatccacatggagtacatagacaaatgaccatagtttctactgtaaaaatgcctcaagatcttgtaggtgagattaggcaattagataaatgcctatagcacaaaatgaattaacatgattgcttgaaaagaattaatttctgtaataatttgaagaaggaagaagttatgtatgctttggggggtatacagaaaggctttataaacaaccctatgaaaaaatggaccacagttttaaacgggcaatccacagaagggaaacactgcaatattcattggaaaaagaaaaggaaggaagggagtgaccaagagaagaaacaagaaggaaaggactgaaatcttgtttgcctttttggagaagatagcatttgaaatgggccttggataataaggtgtgattgtcgttggtggaaatgaattgcatccagaatgcagaaataactcaagcaaaggcatagagattggaaaacatggggcaggtagaaaacaagtccagagtctttgctgcttcttagaagatgtataagggttttattttatagttttataatgaagggcttttaatttcaagtgatgggtcagtgtataattccttaggagataaaattccagggaaaaggaggaggggttataagataaatctagaaatctaactcataaaaattagttcccttccagggagttagttactccaaaaatatccttgataagctaactctgcatggatataactgtgttatctgtgagctggctacagacaagaatttacaattgtctgtagttgcagtctttgagctgcagtcattcaatctctgtctactgctaaaagccagagtttggaaagagcccttatgcatgcttgataatgacacaatttgactgagaatactgccattttataataatctctgaaagttacttccttggtctactgaatctcatattttgtgaagttaaatgaccaatgactgtcattcattggccatgattgtcttgagtttgttgatactaaggtgttatttataatgtgccttttgtttctcaagaatatgttcgcagaaatcaccagtagtgttatccatgtgtatggaaggccagactgtatccccttatgtactaacagactgtatggcaagaagggagccaggttgtcaatgtgagagctaatgttgatatcaacacaggcatcagaaagtcaattactctgtttccctagtttactaaatggtgcttttgcaatagggaccatgttgcccaatgggctgtgaactttaatttgttcataacagtgccaatgagtaaatggatctacctgtggactttagagtgtacttctaacattttaggactgcaagaaagtagtgtgttttatcctctgatacattcatattctctattggagcatacctatccaagcccaatatcctacatcagttttaataaagagaaattacatttaattgtgtctctatcctttcatattaatccattatgaatattttattccacaatgttagaaaaattacattaacttattagtgaagaacattcttttataagaagtgctttatacttcagaacctcataacttactttaaatatttcaggcacaataactggtaagagatgaaaaataagcctgaactcatagggtaaggaccatttagaagtcttttgtcttcagcttgtgattgttcagttaaacttatttgatgtgtgctcagcaggttgtaaaattcctatctttctggagtgatccataagagattacttcatagtgaaacacttaagtttgattcttatgagttgcaaaatgattttccaccaggaaaaataaagaatatgggttccatcaaaagtcaggcatgaattctcatctcctgataaaatgtgaaatatctttgctgatcctgtgcctattctcagtttccatgaccatgcacaattattatttttagcaaataagcaaatttgaggcaaaaacattaatttgataagatatctgcaaatgcctttctggaggagaaaataaatttaaaaagcatcagtgtgtttcactgatatgcacaatcccccacttcttataagaaattaaaacactagtttttaatatcttcagagagaaaatgagtaaaggaagcacagtattttccgaaacgtgttatttaaactaaaaccatgaaatttatgaaaaaaaaaaaaagtagacccttccttgatacacttggtcccaccgaggttcaaagtttcctttgaattggggggggaagggagattctgtaatttaagttttaaacttctgtctttgtatctatccttgtgctggtactccgctatcttggttgctatggttttagagcaaatcttcatatcaggtggtctaagttctccaactttgttcctcttttccaaaattagttgaactattgtgcatcctttatatttccatatacattttagatgtggcttgtcaatttataccaataaaggattctgttgtacatgtaaaccaaattagggagaactgacactttaacaatattgtctttcaatgcatgaacatggtatatctctccctttacttcatttttttttttttggttctctcagcagtgtttttaattattattgtaaaggccttgcacatattatggaacaaacacatattatggaacaaataaatgtaaaagctaaatctataaaacttttccaagaaaagaaaagaattcttacaaccttagataggcaaatatttcttaaggagtatacaaaaaaccccacaaaccataaagttaaaaatgataaatttgattttataaaaactctaaaacttgttttttaaaagacaccataacaaatgaaatagcaagtcccatacagggagaaaatatgtgtacagtatgtgtatatgacaaagattttatgccagaatatagaaataattattaaaactcaagaagaagacaaagaatgcaatttaaaaacaggcaacagatttgaaaataggcaatagatttgaacaggtacttctctaagaaaatacacaaataaccaataagcaaatgaaaaatgctcaatatatgtagtcattaaagaaacaaaataaaactctgtaaggtacctccatacattgatgagagtggctaagactaacaataccaagcattagctaaaagacagagcaattgaaattctcatacactgcagttgaggatgtaacatggtactgccactttggaaaacagtttggtagtgtcttaaaaataaaacgtgttcaacatatgacccagcaattctcctccttgacattgacccaagtgaaatgaaaccttttttttacacaaaggcttgtacacaaatgttcatagcaactatatttataatggccaaaaactggaaacaacccaaatgttcattaacaggtgaaaggacaaattatgctatatttatacaatgaaagatgactcatcggtaataaataaatgatctgctaatatgcacaaatacatgaaaaaaatcttaaaaatatgatgctgaataaaaggaaccagagctacctccacccctaaaaaagactgcctaccttagaattatatatttacaaaatcctggaaaagacaaaactaatctatactgacacaaagcaatcagtggtttgctgaggctgggagtggggaaaggattgattataatggggactgacaaatagggaactttttggggtgatggaaatgttccagatcctggtaatggaggcagttacaaagtcttataaatgtattgaaattcatcaaagtgtacagttaaaatggttttatttattgcatttagattatacctcaacaaaggtggttttaataaataaacaagaaaaagtgtttttcaccaattggtttgaaattcggccaaggcatatttgagcgagggctgtcagccttgtatttgttgcaagtcacagtgagtatgtcctaatggatcctctacaaggtccaggttaggtttctttaaaggatggcaagaacctgaaacagtgtgagtgcagagaacagtgaaacagtgtgtgtacatagtgctttgatttttgtgcattttttggtcctaatattttaaagtttgctgaaccatacctcatagaacatttacctgctttttctgagggaaatatctttatagaacttttccaaagcattctgcatagattttattttaagaaattaaaacattttatttgtattaatttacataataattggttaactcacataattacaatgacaagatcatacagtaggagcagacttgggatcaaatgcagctgactctaatagcaggtgtagcaggaggcacacagctgaggggacatttgagacgaaattgaggccaggttccacttcacattgtactagggttaagcgtgtccacccagaggaagagaatccttaggcctaaaagagcaaaagtgtacagacatactcaagagtaagagagtagccaggaacaccagccaagccataaactccagtctgtgtgtgttaacagataaaattaagagggtaatctagggagtctattgctaaatgaagggcacattaagtctcaacagtattcctatgatcaatcaagcaaccaatgaagtgtacaagcagaagtgatttgtcatggaatttcagagccagaaagatccttaaaaaggcagtgtactccaacttcctctgaagcttgtgtcctacctacagaattcccaaccactctgcttgaatgtctccaaagaggaaaaaatttagaagagaagacaaggaaaattaatcacaagataggcaatgaataggcaagtggtaagaggccagttttcccatcctcatttactctaaatttgattcatagattattgagcctcagatatctgtttgccatctggtctggtcagtctggtttggcatgcgtcttctttctctttagagtttgatgacgttttaggctgtgaggggcatttgcattgtagtagaaattggatgatgtcagacttgctttatcacactttctcaataatctcttttggtgagtttgatattctacttacagctgctaaagctccttataaccatacgcacaaacatacacttccatatagtcatacatactcacaaacatatatacacagccatttacttacacacgtgtacacaaaggtgtatatccacacacttacatgcacaatgagagatgcatagtaagaatttttccactacccctagtttaactggaagctgtagaaaatctgaactttattatattgatctctgggatcatccacaaaattgcccaaaatgggaatgcggaagctgtttcttacctttcattttctccacatccaatgtgtcctcttcaactgtgtattttgaaacaacctttgaatctgtccccttcccgcaactgcactgccaactgctgatatcattttttgcaaacaagtgtaatgaaaagagcatattctttaacatcaagcaaactaaggtgcaaattttagctctgcatgtattcattgtgctatcttggacaagttatttaactatcctgagcctccttgtcttaatgtgcagatagaagaagataatgcctacctgataggtggcataggaaaaggtcaaaaacattattttctactcccattgctccccttgcctgaaacattataatggccaaacaactggcctcccaacctcctttcccctcttcagtttttcctctacattatagctagagattttgctaaaatgtatatatggtcatcccattttttacttgaaactggtatcttcctgcctataaaacacattttgtttcttagtctcacataggaaatcctttttagtctgtcttgggcccaggactccagtccgattttcctcccattcctacctgccctcttggttttgaatgttccacacaacttcattcctttctttgttaattggcttttcctttacttagaatgctttcccccttcctgctttttagggagaacagggtaaactgttctccctatccttcattgagtctcctttcttttttctaaagttttttcttatcagcatccctcccccaatttgagctcattttctagaaagaattaatagctttcttatatgactctcaagatatttctgtgtggttctctaacagccttcatttattttatatggtaattatagatgtccatttgttctagggaaggcaggtgtcaggtcttactcatctttatattcctggtttgacatacagtgcctgatgtctagtaagcacttgatatctgtttattttaatgtttatgccctacattatctatcacaagtattaaagattgataggtgctctgtaaatgttaaattgagttaattattttcaatcttacaggaagttacataagtcattcctgtattcatttgtgaattttcgacatcctatattaagagttgcacttagaatgtgagttccatgagggcaacagcacttctgtcttactgctctgtctgctatgttggcccataattaaccactcagtaagccttttgtgaaaacaacctcaatgagtcttctacctcaagtcttttgaataggaatggatttaaagctgacccctaatacatctttcaaactttaagtcagtaaattttttacaaacttttttaagttgataaatccctcagaaattattctgaggaagctgatgggatagaaatgaaacagactaaggggctccaggcaatcaccactccccttcgttctccttcctctgttggtggggatcaatagagcaggatcctcaaaactgtggagttctttggagcatactttgaaagcctctaattctattccacgctctaatttccaaaagagggaactgaggcccgtggtggttaaatgccctttccgaggttacacagctatacatggtagagccgacccatgtcttctgactctcatcccgttgcacttacaactagcctgcatgttccccttttcccatatcgcatggatagcatcttacgcatctaagtttttttctttaataatgatcttctcttttctttaagagacaccatcactccgagttgtaccacttgcaccaggctaaattattcctcagtgtttacccctttcagatatttatagaccatcattatggcactccctagtcacctgtcagcttcctaatatgtacatatatggtttctttaatctttctgtacagtcggcttctctagtcccttaatcatttgtaccattctctctctaatgcctataagggaactgtttaaatatagtccatatgggaaaagtaacctcaacatgttgtaacagggggcagaaaaacacgctgaatagatgaaaggaacaatctacaggttaattagtagtatggccacaaatatgtgcacagttttgtttcagaaataaagcaagctgtatttgttgttaactatctcttctttgaacttaacagaatgctgataatgccaagctgtgtttacagtccaaatttttgctgaagaccttcaactttgcactctccctgtgtggtatctcttgcccaagacagaacttcaaataaaatcacatagctgatgcaagaaaccgttactgagcgtatccatttttatgcagtttctgtggacttacatggtttctgggagctccctataagccttagtaagggaaagctcttgacttatctcactagttattagggatttggatatatgtttactaaatgtgataatctaagtatggaaactacattagtacaagaggaatcacccagaaatactctactggcataaataaaacattacctattgcccagttttctcatttgtttcattttgtaacttttataatgtgtcaataagtttgaagtcttgaagggctgcccagaaaccaccacagagtggattttccttaccctcaatctgccttcatcaaaatttagtttgtgtgtttatcctataaaatttatctcataataaaaactgaagactaggacggtccttagaaaaacacttgattcggtgtatttattttataaaagggagtcacagagagaaaatgtggccagctcaggtacatggcttcctaggcaatgttccatttcccaaaactttcattggtccagaaagtgtaccttcattcccaaccaaatccttcctataatgctttccatgcctttcttctgtggctctctctgatgatctcacaggtctataagctcttacaggtagaaatatgatttcttgctgtgttcttattataaagcattgccatgcaactgagaagtaatgagagccagtggattttattagaatggaattttaacttttctactttaaaacccagtgattctgctagtctggaggtagcaaagaaggatgactattttctctctcacacaaagtaagattctgaaggggcttattctctgaatgaaaaacgagaggagaaaagtaagaaccttctaatgttttattcaaatgttaacaaagaaatttgagaagcgtgtttccttaaaattgacaccatttttatcccaaacattctggtaagtgatagcagatgactgtgcaagcttctatggagagagagagaggaatttttccaggagcatagtcccagtgggaagtattacctaaaagtaatacactaatcactttcaatcttgcatatttccacatactgtgtgcacacatatgtgtattaataactgttccctagacgtcacttcagcgctcagacagcttagtgttgctatgcgaatgctggagatggaatcagatgcagactacagtttagcaatgagaattcttcagagatacaagaatggaaatggccttaggtcctgcctcatgggtctccctctgagctccagtgtaacatcgggtgtcaagtatttgtggccccatctgcccactccactgagaatctaaatggcattgccagtatttgtgaggtactcatatcttaaaagtcagtgtactcaaatcagtcttgcattctaccttgtggattttgcatggaaattttttagaatgtcattgctgatggaagccccagatatataagtacatctgctccatcgtactggtgatttttatagatattcataagaaaatttattttacagcagtttattttagaggaattctttgcattttatttgtatgtgtgtatacttattttactggcaggatacacacacatgtatatacacacacacacatacatatatacacatacatacatatatatatgaatgtatgtttgtatcctgtcagtaatactttgaggtacctagggctgagattactatttctcttccacctatggctcaaatgggtaaaatagcttactcaaagtcacagttcatacatgtggtgcagcttgaatcaaaactcaattcttctatccacagatttaccactacttgagtagtctgtggtgtttaaaaaaaataataaacaacaggccgggcacagcggctcacacctgtaatcccagcactttgggaggctgaggcaggtggatcacaaggtcaggagtttgagatcagcctggctaacatagtgaaaccccgtttctactaaaaatacaaaaaattagctgggcatggtgacgtgcgcctgtaatcccagctactcgggaggctgaggcaggagaatcacttgaacccgggaggcagaggttgctgtgagccaagattgtgccgttgcactccagcttgggcaacaagagcaaaactctgtctcaaagtaataataataataagacgaagaagtaacaaagccaaactggaaagtttctgttaaatgaatgttctagataataccaacgtataaagcaatcattttataccagctatggtcaaacagggaccagagccttgacttttttttgcctcaacacagctctgcagaacccactcagtaccccatgtcctactgccattcctttggtttccagaacattgagatgtacaaatccaaaacaccacagtgtttcagagagaaatggcatgactctactggttgcaattgtaatggagttcaccttgttctggagtcatacagaagccatgttgtagacttagtgtcccacgcaatactcctaattacaatgaaaatctactgttaggtagaaggagaaattcctcacaatcaggcaacagcgcctactagtgggaagaaactgatacttgaggtagggcacctgggagatagctctgtgcatcttgagagagtgctacactgagagcccaaaggctctcaggtctcatctctcctgacagcttgctatgacatcttaatcaatgaattgcctctctcttaccctttgttattgagtctgtaaatgaagagtttggaatggctactttctaaattttctacacgtcctatgacccttgaaatcctcttaacaatgtattatggatactttgctactaaacggtaaaacagaatcccgagtaagatgaattggcttcctaaggaagtagtgtcaggggagaatagcaccatctttggggccagttccatttatgcaggtaatatggtatggtccagctcaaagatcactggactgggctgagttgcaactctgctacctacttctcaagtcatgtacaaggtcattcctatgttaactcatgtgttgggaagatgataattgtctcatttagcttttagttattataagattcatatgagaatatagaaattatgaagttttatgtgaatctgcaaatttattttcagtctttatatatcacaattttaatttaggctaattataatttttattttcccctttttgttctatattctaaattcgtatctcccatggaggcaggtactgtatggacaaaatcttttattagtcacatattgttttcatccattttgtgctgctatagcagaataactgagactgggtaatttataaagaatgaaaatttattttatcacggttctagaggctggtaagtccaagatcaaggcaccagcaggcttggttttctggtgagggctactctctgtttccaggatggtgctttgtgctacctcctcacatggcagacagtggaagagcaagccagcagaatgccgcatgaagcctctttcacaaagggctttatcccattcatgacagagaagcccgtatggcctgatcaacactttttaataaaatcacaatatctactgctgaattttggagggaaccaattcaaatcatagcacacatcttttctaaaatggaaagggtaatatgatcattggagaaatactcattcctttgcatattggtttactatccaagccaggtgtggtggttcacacttgtaattccagcactttgggaggccgagatgggtggatcacctgatgtcaggagtttgagactagcctggccaacatggtgaaaccccatctctactacaaatatcaaaaaattagccagccatggtggcacacacctgtaatcccagctactcaggaggctggggccagagaattgcttgaacctgggaggcagaggttgcagtgagccaagatcgcaccactgcactccaacctgggcaaccgagtgagactccatctcaaaaaataaaaaaaaaagtttactatccagagaatcttgtccaggttaacactcttttttgtctgctttcttcttttgtgaaacaagaaggtaagagggacactggagaaaacctaatgttctttacaaaatgagtcatagttctccatctgcaaactgtggctcccatttatgtcttggtgtcaatatgactattacatgttatgtacatggattccacctcatttgcaacatagtcttctgcctgagctctgtttgttggatctgatctaactttacatggtcttaagtcacacattgaactcttaagttctgtaggcctctaagcctttttaagttttagtattttcatcgttaaaatgagagtgattataacccttgctttgctgcctccaaatattattgagggatcaaatgcattgataaataagataaagcactagacaaatataagggatgcttgatgacttcacagagggaagattattctgttgctggctgctgaaatacagtagctttagaaaaacccctttgggttcccttattatcaggtttggtctcaaataaccagaataaatttggagatttcctaccacaaaagctaaaagtacctgggcagatttaccctttgagtggacctaagggaaatgcagattcccacgggagagatcacggagcagattcaaaccataaggcaaaaataattgttgcaatagcggttctaactgtactagtaaatattgatttttctgttagcagatcaatcatgaaatgaattctaaatatagaagactggttaaaaaattaagacggagaatgtgaaaatgtccatgtgtaaaaattaacttaaagagaaatcttgctttggccaaaagaaatactactgtttctgtcaggaatgttctgtgatttaatcaagtttcctgcctggccagataattttaggaattgtggacttttaaagtagtaagtcagtttagaaaactggttaagtggacagatgtaaagtcagactgcctaagccccaattccagcttcaatatttaactctgtggttgtgggcaaggcacataatctctttatgctgccttttcatcaactgttatggagataatgatagaacctacatcatagagttgttggggtgactacatgagataatacaattaaatacttaacacctggtccataaaaagcgctgaataaatattgactattatcatcaccccggggtctacaaatttttgtaggattaggattaggattgaaatttctaccgaaaaattccatcagtaaaatattgataaatataaatcttaaccaactgcctcagagacatagggacctctattttccactcattgactgtcatctttagagaacagtccaaagcatgtgcctttctgttctagttgttatgagctctttattttgaagttgaactatatacttcctatagtttaaaggagaaagaagtaggtctcatgctggacaccttctagatgttacctcctccgaatttcatagccaagtatttaaggcagttatgatcatctccctcttagagaagcctagaaaaggttactgcagtgcttgacagcaaatagaaactcaccaagtgcatttgttgagggattgacagaatggctggataagtgactcaactaagaccacttatctagtgagtgcgtctactcagctgcttgttttgaagacaaggaaattcgggctcagaaaatttaggaaacttgtctaggctgccaatagctagtaacaaaggcaagaattgcatatctgattttctttacaccatgttacatctaactgttcaaaagataaccatgtattatactcgaaaatgcaaaacagggttgttttttgttttgtttgttgtggtggtggtgatggtatttttgttttgtttttgctacttttcctgagagtggaagttgttatcaaaaagttactgtcatgactactatgtgtatagatgctattagtttcatcaaggttgggaatagggtatatgttgcccaactttctgcccctctccgcctcatattaaagttccagtttcctagaatatatctcctgggagatttggcactagccatcactgcattccaataccccgggacaaactactcttggtggaacacagaagcatacagtccttgttacagcagtggttctcaaactcacattcctgatggaaagctagagttgaagggtcaacacccaagagctgcagtggaggaccatcacctgtcctgattcgccacctgtggtagatcatgactttcactaagatcccctgaggcttgtggggatggagaagtgatgctggactggcccttcctctttccctgcaggtgttaatgggttctgctcctaaacaatactgatataggtcagagttatgattgaattgtatacatagaaacatgtgctgattgagaaaatgggctttacaagtcagacctggttccagtctcagccacactacattctgcctttgagactttggccaggtgatggaacatcaggtttcttatctaaaaaggagaataattggttggtaggactaaatgaaaaaatgtatgtgaaatgcttaggacagtgctgagcacagataaaaatgcacaataattttctattttttgttagtttccttcacaatacatatatttacatcagcgaaacatgcttgcttttgcaaccttctgtgggactccccctcctaatttaccacctcacctgaagttctaagctaagcaaatctctgtctataaatgaatcacatcgtggttagactttataacaacttccccttgccaggagatcactcagccttcacttcatctcatctggtttgctgcccaggcctttatccactcattcctgaactcctctccctgacaaccttggggttttggcttgttgtgtgcgtgtgtgtgtgtgtgtgtgtgtgtgtgtgtgtgtgttttgttttttgtttttttttactttaccttaatttctctttttggactaagatgttaaaatgtttcttaatgtgactgtctccgaaactgttttgtgtctaccactcatcctagtggcagtcattgatccttttcttgttgcgagtgtttgagtgtgggtgtgtgtgagtgtgtatatgtatttgtagagggaaaaacaagagagagggaaacagacattggagccacctttcccccactagccacgtacctgttgaaccttcaagcctctctatagaatcagatatacacaagcacagtgacagaactacatgtgtcctacagtccagcttttaagatatgataaaaactcttgtattcacagagctaaatggcaataaccataggagattgcatattgctacattatgtaaagacagagtcccaagaaaatagtgagaactcagtttgatgtatgatgtgatatgtgatatcttactttacatggctaacagttgacattctttgtggattctatattgtctaaggctacagaagagccatatgataaattcatcggcaacccaaaagaagcctgttctatcgcagtgcttccaattaatataagtaaaccactttctctggctcaatgctaccaaaatattttatgagaaaatttagctgattctgctcatgtatattttcaatggatggaaagccattgcaaacttttcaaactaaaatataaagatagcattagggagaatactctctctggtgaaaaacaacatgtattatgatgcgttaggaatttctttttttcagccaactcgtggttgagcagtctgtccccaaactgttttgcatgcggacgaaacctgtttgggcgatacttgtcagcttttcttctgacaagcaggacagaaataggcacccccagaacactgagtttgacttgactcaacatagaatcacctggagagttttaaaagtttctctcctgtaatatcccacctccagaccaatgaaatcagaatctttggagttgggaaccagggatcaatatttttttttttaagtttcccagatgattgcaatatacaggcaagattgagagtcactgtcctagagtataagcagtttaagaaacaagttgtctattattacatgcatcaatactacagagtccatgaaataaaagctttggtgataagaaaatgccaccatcctagagccttcagttaacatcatatgggcctgtcatataaagaatgcaaactcattctgttatctttttgggccttcagtggaagataatttttaaatcagcttaatggaaactgtgcttcaggaaaataacttcagtagccatatgtaggataaactggagcaggttttgtttctaggaatatgttgccatcatttcactacccttatataatcttattgattcaacttttagaaccaagactttttgcagaatatatcgaagaatgtgcttaatgggaatgctgatatatcatacaattggcatatagagcttcagttcattatcatatttaaaggtacaatattaattttgcttgtgcttaaaatgtctattataattcaagtagcaaggaagacataaagaaaaatgtgacctggctttacatctgcacatatttaatactttacatttgatggtgaataatgggaaagtttgggagtatgtcatgctcagtcaccatgcatcaactcccaaaatggctgtggacagctttggtcctgcctcaaaacaagcactgcttgcaaaagagggtctgtggcttatttttatcagttgtgtggtgatcacaggaaaaacattttaaataaaaagtttattttgccatcatgaaagaaacaaattcatattaccaaaagagaaaataaatatgacaacccagcctggtgcagtggttcatgactataatcccggcacctcaggaggccaaggttggagggttgcatgatcccaggagcttgagaccagcctgggaagcacagcaagaccctatctgtacaggaaaatattaaaaattagctgggcttggtggcgtgtgcctatagtcccagctactggtggcaagggctgagggaggaggatcacttgagcccaggagttcaagggtgtagtgaaccatgatcgcactactgccctccagcctgggcaacagagtgagatcctgtcacaaaaaaaaaaaaaaaaaaaaaaaaaaaaaaaaaaaaaaaaaaaaaaaaaaaaaaccccaaaaaaaaaaccccctttttcccttttcccctttttttttttaaaccgggaaatttcctgggaaggccctttttccccccgccccccccaaaaaagggcggggaaaaatttaaacttttaaaaaaaccccctttaaaaaaaatttggaaaagtttttttggggggaaggggggggaaatcaaaaaattcaaaaaaacggggagcccttgggaaaaccctttaaaaggaggggggttttgttaataccccgggggggaaaagacacctttttcaaaaaattggggggggggtctataaggggaaaaaccccgggggaggaaaaaaaaaaaaatgggggcggggcactaaaagagccccccccccaccttgtatttaaaaaaaaaggggttttaattataaacccccccctttttttgggttttggggggggaaataatttaaattttcctggggagagaaggccccccctgggggggggggggcccctcttggaaagggaaaattttttttagggacagggcgggcgccacaacaagggggaaaaaaattttttttaacaccccaccccgggggggggaagaaaaaaaaaaagggggggggtccttttatagccccaggagccctaaaaaaaggggaaaaataacccccgggggttctttgtgtaaaaaaaggggggaaaaactttctcaaaaaaagggggcccaaaaaaaggggggggggttttaaaaaaggggggggaaaaggccctttaggggcgcccaccccttggtgggggaaactttcctcctctagaaaaccccccaaaaaaacaaatttaaaaggttttctctgaaaaaggaaaaaaaggcccttttttgccccggggggggggggcattaaaggggggccccccttttttcgccgggaaaaaaggggccaagaggtacccccgagggggcccctcgttccaaaaaaaaagnnnnnnnnnnnnnnnnnnnnccccttttattttttgttgtttttttagaaccacactttttccaataatattaaaaagaggtgtttgagaggaggtttatattcaccacggggggatagaagagcccgcggtgctctctattatagagggacattattatattgtgcgtggcgtaaagagtgtttttattttcccggggcggaggagggcccataaaaaaaatgtgggcccgcgtcttccccgcgcacattattaatcctcccccttgaggggaaaaaaagagaaaatttgggggttatttattttcaattcccccaggccaattctcaaaaaaggattgtgggaagattttggttctcccttaaaaaaaagaatgtttttaaaaagaggggggggggctttttttccagagggggggggcccccggaaaacctttttaaaaaaaaggttttttttgccccaaagaaagaaccaatttctttttccaaaaaagaaaaaaattatgccccccccccctggggcagggggttaaaacaaaaaacccggccccccagggggcaaaggttgggggggtgtattatccccgggggtttggcccacccggggaagacaaaaaaacccctttttggccggggaaattttaaaaatttctggggggggggggggggggccaaaaacccccccccttggtggcaagggttaaggaaaaggattccttttggccccggggtttaaggggggggtgacccaattttccccaatgcccccccccccgggggaaaaaaagagattcctttcccccaaaaaaaaaaaaaaaaaaaaaaaaaaaaaaaaaaaaaaaaaaaaaaaaaaacaaagaaaagaaaacccatatcacgctatgccacttctcttgttcaacctgtagatttccctggaatgccactattcacccatgccatccccaaaaatgacttgttaaaattctaactcttcagattagctccattattaagacttctgtaaagtctttctgttggtaagaggaggtaaatcagagatatcagaacaatcaggaagccattgcaatagcctttgaaaggaagggtgattaggtagtaggcatgtggtggaaagcaggcatttctgacacattgctgaggttgctatagatgggagagcagaggtgaaggataagaagaattgttggctgaatctagagtcagtacaaagcaatatataaaataagtaataatatataaacaccatttttggttttgtttggaaatcttaattcactgacaaagttccccatcggctgccggccctctgtcatcggatcttttgattgactgactgctcagcattggcagcaagctcttcacaccagccctgggtctgagctaatcagctgtgtttccttcatgctctgatgccttgaagtttggtactattctcctggtttctcttgtttaaaagtgctgagatacttgtctaaaagatgggccttaagattgtggtgtgcttttaataatgtgtggggtaagtgcctctagaggcaagcatacactatgcttgagtaactttctctccattctgaatctctccctaaaggacacagtttgtaaatgtttgttcatgtgaaaagggaagattcaggtaccttttctgtcctactgatgtgtggggctatttttatgttttgttcttcacttttttctgtacttgtgatttaaaggtgccagactggttaccctcaaggctagtgtccccactgtatcccaagaatagaaaaaataatgagaggcagcaaaactggcctgtgtctgagtccagcatattaggctgacccactctagaggaatattctccaaagcataaagtagaagatcattccttaggaatacaatacagtccatctgttttcatagctgagaaggcaattccgtgtcatgccatcatggagccactgcagtgttttggtatccaagccatagtcactcattctctccgtgagggaaaactagaatgtcttttcctcttccacctttacctttcaaaattccatccttgaaggttcggctcaaatgcttctttctccacacaacctttcctgagcccctgtgagtgtggttttccttccacattccatagcactttcttctaagacgtgttacatgctttgccatgtgactattgcatgtaggttgtcttgactgtgagaggcactgacatcgtgacatcgtcgaattcatttttgtatatcacacagaaggagaacatagtcgtgggcaagagtagatatttgaggttgaatagatggaccatttcaaagcttatcttttcagcctgacctttaaggctttgctctggccgttccctctaaatcagtgattgaagtttgctcccagatcctcatgagtagctatcaaactctccataagccatgtaggctcaggttcttggattccaggtattacacttcgggcatcatagtctgaatcaaaattgctacttttagctgcttagtagactgccattaccaatagtttaatgagaactacttttttaggggacggggggaagtgtggtccacagatccctgatagcccttcgtgtactatgtagtgaatctgcttgacatctagaaaagggaagagtaatatagaaaaagaattttgttgacctgcctgcatttaacaaatgtaaaatgtaaaattacagctttcacaggaatctaatatgcttttaataatcatatggattggtaatccatttactcctaatccctaattcgttttctgcaatgaaatgttgtcaaagggtggcatgaagctgttagaatttaagcatgattttcaaacatagcacattttttttgtggttttgtttttttggttttttttttttttttttttcagaataatttcaaaaatagtgccatatgaaatagttttgttactgttggcaggaaagtccaaaatgttatctcataataaaaacaggtacaagttcagtcttggataaaaacttttgaagtctgccacaaacaaatactatacaaaattttttcatcaaatgtcaagactgtggtatcaagactttataatgatatcaactgtagtggtgacagcttagtttccaatactttaactctttttccagcacttcatatttctttttggtttgagatgaagtctcgctctgtcacccagctggagtgcagtggcgccatctcagctcactgcaacctctgcctcccgggttcaagcgattctcctgcctcagcctcctgagtagctgtggttacaggcacacaccaccacgcccagctattttttgtatttttcatagagatggggtttcaccatgttgaccaggctggtcttgaactcctgacctcaggtgatccacccacctcggcctcccaaagtgctgggattgaagacatgagccactgcacccagccttcatatttcttattccttaggaaaaaaactaagatgtatactttgggttatatttaaagtcacattcaaatcccacaacaggatataaagaaatacttttcagggccaaatacaactggagaggattagaaataaatttacctttttttctctcacgttgaaacatctagccctcccatgtttgagtgtgaaatggctgtcaatccaatgtgatggagtgctgaaagccgtcttcagtgagaagtctctccataatgctccctaacatcagatccatgttaatcctgatgcacagaactgggaataggtaatatagcatagtgtttaagagcacagatgctgaagttagactgcttaggctggaatttagttaaccatttgtgtgactcagtttcctcatctgtgaaataggcataataacagtacctgcatatagactgttgtgaatatgaaatgagttaatatatctaaagcccctagaaaaagtctgacatatgtgaagcactacatttgctataccttatctatcaaagcctacagcttctggctaacattcccagtgttctataattattagatagaattttttttaacttagtagaaacaaagactaagaagggaaactagatgtggacgtgacgtctagctcaagattcccatgatggagccacatagagatatggatggcaaccagcataatgcctctcactgacataactatttgtctgaatttatattttattgttattatttaaagcttactgcaaattttaaaaactgaaacctgatgtccatatgtaggccagatgccacattaatcaatttaagaatgctggagcttcgcagaatactgcatgaacaacgagaaccgtggccctgaaagactcaaaaccctacagtatatgaaactattgcaggatgtgtggatgttcaaaggaataacagacttggaagcaatgcttactgaattttgatgtattaaaggatgtcaagtccaagagagagataaggtctcagaagacagaactagaaccatggggtaagcagttagaatgaggaagcactatggctcagtaggagaaagaaccttttagccatcaaagcgatctagaaattaaaggactgccttgggatctgcctgtcactgagagctggctgcagaggttttacaatcagggcttttgtaaaaggaactaaaatttgagtttggacccaattatcttacattctaactggatgtgtagaatctccaagaagaaagactcttctgtactgttttatagattttgccttccactccaaacatcctgagtcatgttccttttatacttgcatgtgagatgagagtcagagcactgacctcaaagccagcgaccgggttctactgttcctttctgcaagaacttagactatgagactcaatcccctcaaccgattaatgtaaaatcccctccatgccaatcttgcagaggataggggtggctgtactggtgatcttgctggggtaatggggtaatagtactggggtaatgacggcaggagtggtggttctattgctgctgacgttatgaacctgctttctcctccactttggctttagcaggactgaagtactccttggtgtgttcttatcaaacccttttttttccaggccgctgtgctcgctgtggagaaaacgtagttggggaaggtacaggatgcactgccatggatcaggtcttccacgtggattgttttacctgcatcatctgcaacaacaagctccgagggcagccattctatgctgtggaaaagaaagcatactgcgagccctgctacattgtaagttccagatttgttcctcaagcactttgcaaagatgtcttctgtggctgaatgccagtcactctagatagaatatagccatcagatctttgcttcttcctagacttcaaaatgtgtgtgtggggtgtgtgtgtgtgtgtgtgtgtgtgtgcgtgcgcgcatgtaaattagcatattgtaatttttttctacacatcccccattcataagcagtcagaaaggtgtattagcatgggactgccattcagttagtggtctgctgggaagatcatcagcctgtggctttctagcatgtatgtacaagctaaaattttctttcttaaagcatcagaaagctttccaagtagctgagtcacacctcttataagatctcaccctacatttgaagtgcccagtagtttcaaggaaactttacagaatctctggacttgtcagtcctcttccagaatactgggccctttgagtccatttttatctaccaaaatgtttcttccccctcttatccaacaggtttttaatgatgcaaacaggggaactgtttattataaagcaccttaaagagaaatgaacagtaatgctgactgagctaatcattgttttcttttattacagaacacaaaaactatattttaataatatacctgggtaactaaaaaattctcagtcatgttaccttagcgttttacaatgctacttacttaatctacctgttaaactattctctggtagagtaatttgatgaatgaacacagacttttttcatctattgtaaatttctttgctatccttcagcatgattttaatctttgtttaacacatgttgatgggaaaagtagtgttttttgtttgtttgttatgtaaacccacaaaacagtcatggtttgtccctcagtgcccagagatttcaacataaaagacaccttggtttctttaccaaggtattgggagtcatacttggctttacaaggttcacatttattgaagacgtttttggcctggttggtattttcctataacttggcagctctaacccattgtaaccttggggtctgtagcacagatctgaaagttcatcaagattaaggcttcgtaggattaaatatggctttgcatctgtcttaggttcaattttatttcgttttctttccaaaggtaacttaatacatgtaacatcatttctttccaaaggtagcttaaacacatgtagagccatacagtggtagagttggaaaaaaaatcttaaaatcatttgcgtaattactctctttagcaatgagaatgccaagacatacagaagaggaaagcgacttcgtatgacctatcattagtgtcagaaccaaggctgcattccgttattcacgctccacagtcttagattctttgcagatgctacatggttttcattttcctaaacataaagataaacaaagtaatgtactgttgatctggaaggagcaattatgcataagcgaaagtctagtaaacaaaagcttacctctttagaatataagaatatttcaaatatctttgaaatctttattgaaaaaagaaaggcattacataattccttgcctttttaaacagactaaaccgggtgtcattcacaatggcttggcaccacgtttatgaaattatttattgccacgagccctaaggtagtgatgttggcagagtgtgtagaggcacccagggttgtccttacaccaagtaaacacatactgctgtgtttttttatagctcctgtctattttttatccctttttgactccatagttgatttttgctactttaatgatgctactgtggcagcagccttcttcagttgttttgtttcaacccttgttagcttgaaatcatatagacagtattgggaaacagtgtaacagggtgggaagaacatgaatttgaatttcgttacgtcacttagtgcctcccctccttgggaaaattatttactctttctaagtatcagttgcctcatctatataatggggacgatggcagttattttccatgaagaagaaatgagacaatcctagtaaagcacactgggcctcttcaggaaaagtagtggaataaatgttattctgggattaactttaatgatgtttctgaaactgtttaatatttctgaatgtgggaaccttacatgtgcagtgaaattcactgggctttaggaaattattataacctttcagacatactcctcgcatttttacatgtttgcttgcttttctgagtgcgtaacaaaactggagaaggtctaatctgattaaataataggtttctacagtgtgtgggctcaagtttctatctccattccaggcataggatgggtctctgtgattctgtaggatgccagccccttcttctttggtttgttgttactatactatgcttatgagaaggaaaactatccgggagatatttaatcgcgtacttggaagaactgggtgaattcaaataatggaaattctaaccatttttttttttttacttctttccctcataagaacatttaatcaaggtttttctttaatgagatctattcgtggtgactctaaaatgtaatttaattcttatcagaattcagttaagctttaccaaagacccttgttcaatattgattcgagttcagcacagtcctcaagccctcagatggatgtatcagaactttaatttcttctgaacttttatatgtccaataagctgcatactagaagtgtaaggaggttgaggaaattgggcaaatgaaataaaacaagttggctttgaagatagtttgcattaaggagaatcctagaactgtgcgtctctcttggaaccaaaagccttagaacaggaagcatattctgtgtgatccagcaaaattgcctttggttacactgttgaaaactgatgtctaaaaggtattccatacaaaccagagcaaacctagcccttggccatcagtcagtgtgcctgtcttttttttttttttaattgatggaatgagaatattcaagatagtggcttaattatttttgtataaggaccagcatgtttgatactctgagttcaggaatgagaccagtctaatgtaaattaaatttacttctgcctaaattggttgttgatcaacttaagatcctattaaaattaaaaatttacatgattttgagggaaaatgcaccagtaatgtctgcagctttggttcaatgatttttaatattttcctgtggtttattgagtttgttcttaatctttgtgcttaagtagttatgattaaacagtttgattcagtatagcattgtaattctctttaatcattttacatattttgttttctattttttatttattaacataatacaaatgttcatatagttttgcattgttagtattcatttttagatttttatctgtttagttttacatttagattacacacttcattttaaaaccatttgccagtcaaaatgtattgtgtgttttgcaatcttttagaattgtaaataacatgcctatagatagttaataaaaattttattttttattttgaattacatccttagcataaattctttgatttatattaccaaatcaaatttaatctggaggacttttgcattaccttgctagatttctttagaaatatttttctaatttacagaaccatcaacaataatgaaactatatgttaaaatgcaaactatcccctatggcagaagtttatttatattttctgaactaatttaataagcacattatgtcttagttattttaagtttgtgtaattattagcaaaatcaatgagatgcttttcttctttggtgatatgtctcttgaaagcctagttttggttattcttatagatttgaatatgtaaacagattaaagtaaagatcactaaaactttgttaggaagtgatataaatagaatgtatttatcctaattctagctctcctggtgtgaccttgggtaaatcatttagcttctgagtatcagtgtcctcatttactaaagggagatattaatttctcccatgtcttcacagataaggaataagcagttgtgatattttgtatacatgaaattatttactaatataagtgcttaatctgattaacagaatttttatcattgctttttttttcccctttagtataatgtgatacactatagaaaccctctaaatctggggcaatttcttggctgtagttgctatggaaatactgaaataaataaatgtcatggaaggaatataaggacacatattaaaagcggaggttcatgctttgcttaagaagatttttatgttggtatgaatatgaagggcagcaacagtgcctcctgcttatgtacccttctgcacataaagagacagccttactcataagtatagttttagaaaaagaattgctgttttattcctagcattaccaaggagtctgggcctagggacagagtgcatcagaaattctcagcaaaagtctatttatgaagtggcagccaaggatcctcccccaaaccagtgcttttattcccagtggatggactccaggtcctaactctctgacagcagaaggtggtacagacatttttactagagttgaaatccaaatgactaaagggcctctggaaataggaggccaactccacaggaggctaaacactttaaggtacctgaaacttggcgcattagtgaccaacccactagcagccttttgctcccttatgtcatcaaatggctacagttaaaacattctaacttgtcagcctacattaagaggtagttttgtacctctgcaggaaagctgttcttttatatactcaattcttcttaataaaatgttttaaaagcacttatggccagtgctttatgtggatgttggaaaaggaagcaagagtttggactaaacctgaaaaatccacatgaactttcttcctttttttctaattgcctacgtctgctctctcacctccaaggagtgtttgtctgtgcctcttgtctctctttctgtctcacacaacacacacacacacacacacacacacacacacacacacacactttcttcttgctgttacatcatcatttcaccagaactctcctaggaaggagaaaaatggttcaagaaagagaaaaatttgtcaagcactctcttgggaagttaagcatgttacccactgggaatagttatctcttccattcatacagccccttacattttataatgctaccgagcatctgttgttgcatgctgtcatacctagtagagccttgtgaaatagatcatggggagattattagtctcattttacaaatgtggctcggatgttttcaaagtaaatgacaaaacaaagactatgaataacttttataatttacactttattgcttggcccatactaacatccgtgctaacattcagcaactaattttttttttcttttttgagatgtggtcttgctgttgttgcccaggctgaactcaaactcctgggataaaatgatcttcctgcctcagcctcgcaagtagctaggactacaggcttgcaccaccacgtgcaacgtgcaacttaatgttcaactcttttttttttttttttttttttttttggagacagggtctctctctgtcgcccaggctggagtgcagtggtatgatcttggctcactgcaatctccacctcccggattcaagcaattctcctgccttagcctcctgagtagctgggattacaggcgcccaccaccacgcccggctaatttttttattttttcatagagacggggtttaaccatgttggccaggctggtctcaaactcctgacctcaggttatccactgccttggcctcccaaagtgcttggattacaggcatgagccatcacacccagcccatgttaaattttctacgtgaagatcctaaaagcccccaactactcagatttaaaatcaggtataattatagccttttcccagaaaattttaattgataaccacctgactcatgctttccagtatcacagaacctgaaatgctaaacttctactgatgaaaaaccataagcccttgtattttcttgagcatttgaggccttaaaaagcaaaaaaaaaaggttaaaaatatttataacaactgacattgacattaacatttgctcagtgctttaacttttatgaagcacttttcttttatcatattaccctctaattaatgatcctagaaaatagttacagttatttttgccttcatttccagtggcaagaaactgaatcttagaaagtgtcagcttgcttagttccatagagtatgagtgtcagagctaatacttgaccctgggcctctgattcccaaggccggctatctctacatctaacagaaaacactggaaatcccatttgctgttgctaggttacctttttcccatgatggtaattcttttttaaaatcctaagtttttcattaatgtacgcccattagagaaaaattagcaaatagaagaagaaaggtatgtaattctctcatctcagtataatagttcacattttgtcatgcacttcttttctgttatgtttacctgtgggtatggaaggatgtatacaaatgtaaccacacatctgtatacatgtggttacatacacacacacacaatgagatcataccttaactattggttagtaccttgcttttgttacataacagtatatcaaactttgccttctatacagtccgttttaaatattcttgaaccactgaaaaagaatatatgtcacctacatatgctttctgaaggttgattcaaggatattttccaaaaggcaaataaagtaatcaaaataatatgcacaagagatgcatagcaaataaaatggtgaaaagcaatgaagtaataaaactactggtaaaaaaataaaggggcaaagatgtagtagtaaactcagaccaaaataagataatattaattacctactaactacaatattcatagaagaaaagtaccattcagtacaaaggtatcaagcagtctgaagaacattactttttgataaatgtcacagttccccatgaagaatagccctgagctttccttcattaaatatcattatattgaaatgtataatttaaaaatactgaagtaagagataagaagggtgaaaacatattctttataaaacctgaacacattgcttttagtctttgataaatcataaaaaggagttaaataatatgattgataacgttaatttaatccacatacactgatctatgcaaacaaagagtttctatcttctgtctaaatctgcatgggagatttagaaaaacatttatcatatcaaagtctaataggaaattgtagacagttcctactgtggctggcagaattacatgtagccatatagtagaacaagaaatgaataaatacataagcgcactcttgggttaaggaatcttagaaagtagtgatgatgctaacactgcatagcaatgagaacgggatggagccgacatagtatgccaagtaatactagtctcattaattgcaacaggaaacagtgcatatgtattaacttaaaaaactagaacagacaagaaaatcaaccttaaagaaatccattaaaataaaacattgttgataagttgaaaaatactgcaatgtttagatctggggatgattttttgaaaagagcagtgaaataaacatttggttaagataaccaagaaagaaacaaaaactacagaaaattaggaatgaaaaagacactcagcatagatacagatgacattttaaaattattgcacttaaaattttatatgagagactatgttctatgcaaatctaaagtacaggtgaaagaaacttgaataaactcgtaaagacagatggaatgtgaagctactacttgcaaaagagccagaaaatttcactaatcaaagttttcagatctccaaagaacaaatgatttctgtgctatttcaactttaagagcctagcaaaaaacgagatgcttaccaaatcattttataaagctagcgtgctcccaataataatacctaacctaggttacccccagaagacaattctgtgataatctaactttcataaatgcagaaatcctaagtgaaatattagcaaattgaataccacataataaaacattccagttattccatattcagtgctagaacaattaggaatcttttagcataatttgctatattgatatatcaaaattttagaaaaactagtaatctccatagatgcttttcattaaaagggcatttaataaaatttttcatgcattcatatttaaaaacaaaaacaatggcaatgcaaaataagctctaagtagtatttacatatttcgatttattatgcaacatttctaacatatataaagatatgaagcataatgacaaaggtccatgtacctgttatccaatttaagaaataaaacattaaaaattcagtagaaatcccttgggttctattccatgatcatgttcccccagagagagccactattctaaatttgttttttatcattttatgcatttctttaaacaatatgtagtgttgttagcacatagtgtttcttaattttaaataaatggcattctattatttgtattagtgggagacttttccactcaacatcttaagactgtatgtacatatagtcatttacaaatgattgattattcttctagagaacctgaaaaattttaaatattggaataatgaaagtttagtaagctgacaatataaaaatgacaattttaggtttagaatatataacagaaaagtgtcctcatacagaagcaataaaaaatataaaatatctaggtaaaactttaaaacgtataaatgatctaagtgaggaatgctaaaaaagttttgcatgaataattaactcatgagcaaaaagggtattttggggattgaatgtgctttggaaagcctctctcgctttaatagacattcgtattatcaccctttattatacaacaatgttttcagtgggggaatgaatagttactacactctcctttgctagtggtatttatttagccctttcaaccaaatatcccccagccctctgctcatcttagttactgctcaccacatccttgcacgttccaaggcagcccttacttggtaaggaaagagaggcacagacctgtaagtggattgcccagaacaacaaagaggcctagctgaacataaccctttcttcccagttcctgttgcaaaccgtattaactgctgttgtcatagaattagaatgctttttaaagtccagcaggaaccttagaaattcaataatgccattttatagctgagaaagctaaatcccaagaaagctgagtgttttgcctgaggttatacgatttattaacggcagaggtgggactagaaaccatgagtcttcatgaggccttcaaagaactactttctttgggaccgacatgaagggtttaaacatttgtggctacaggtccagagagacatccctagaaaatgctgagattagtaagattttggttggagagtgtagaaataggacagcgtttgctttcaccctaaccagaatgaagggtctcagatttccaggttaaatgcctctgaaactttattctagaaccttcccactgccctagtttgtttaagtcaagcatgaactcaccactcaatgtttgccagagtttggatgaatgtcagcatcaggctactgtaataatggtttaagattatttaatcccattagttatacacttcattaggctgagtgaattgttggcagtggttcagtaaacttcctcctttagagataaaaggacagaaagaaaataggaaaggagcctattcctcattttctttcatagttataattctttttttttttttttttttttttttccgagacggggtcttgctctgtcacccaggctggagtgcagtggtgcaatctcggctcaccgcaagctccacctgccgggttcacgccattctcctgcctcagcctcccgagtagttgggactacaagcacccgccaccacgcccagctattttttttttttttttttttgtatttttagtagagatgggtttcaccgtgttagccaggatggtcttgatctcctgacctcatgatccgcctgccttggcctcccaaagtgctgggattacaggggtgagccactgcactggccataattcttaatggataaaggaatgataattacccagctgtagcgtggactccatattagtacggtctcctaaactactcttcattctcaggagaaataaatgtttgtaacctaatattctctattagaagaaaatggacagtggcagagaagagagtgtgtgtccgtgtgatcaggccataaagttaatcttaaaagtaaacctgaaaataaattcaaagattctagatatgagagtcttttacgtagtggggttggtatgaggcagtaaatgattttaaggaaagaatatagaatttaaagtgagacctggttcacactcagccagctgctattctgcattcttccctttacttttagcttcagtttcctcacacttagaatgaaaacaaacaataagagcaaaccagtttgttatatgttctcacatctgactttgtaaaacagtttgaaaacattagcgtgctcagctccaggattgtcccatgcaggcaatgactgttacatctttcccttctttgtagtttatttttgcccagatggatctgcattcatttgtactatctattataatattgttagaattcactattatactgtagaattcattaattctattatattgtagaattcactaattctataatattgtacaattcacattatatattataacattgtagaattcaccaataatattgtaaaagtcactaataattcataaaaggaatgaattcatttgtgatcttatcaaaaaaaatttaaaaagaaaaaagaggccgggcacagtagctcacgcctgtaatcccagcacgttgggaggccgaggtgcacagatcacttgaggtcaggagttcgagaccagactggctaacatagtgaaactccatctctactaaaaatacaaaaattagctgaatgtggtggcacaagcctgtaatcccagctactcgggaggctgaggcaggagaatcacttgaacccaggaggcagaggttgcagtgagctgggatttgtgccactgcactccagcctgggcgacagagtgagactccatctcaaaaaaaaaaaaaaagaaagaaagaaagaaaggaagaaagggagaaagaaagaaagaaagaggcacttgaatgaaagtactgtttcttagctcacatggttatagggtgaaatgaggattcggagaggacaggactgaacaaaaatcagtgtgggggctttgagtcgtaaataactgtaccagggcttagccccagttagacacataacaaatctgcaagagagaattttgcctaacttgaatcaccaaaggacaactgtaagtcagcatttcaggctctggaatattacttgcatacccacttggtttgagaacttgtggagtctgagagatggcaagtcatgagactaggagctcggttttctcaaaatgtgtcagcggtcacctgctttgtaatcactgtgaactcctcattaaaaagtaaagttctggactcctccccagaatttctgcacaaggagacaggaactttgcatcttttgcaaggctcctgggacagcagggagttgggaggtaaatttttatgcacagtcaagtttgaaatccactagtctgtacttccagtcaagctcatgcaaaaattggtcccaaaatatgtttgcattcttatctcccatcagctctcctacacattctttttacaacacttgcccaaggtgaggactcttctcctggacattgatatggaggtttctctgtctattcccatgccattggttgcctaccttctgccttttccgatctccagccttaaaatgctttcctggaacttaaccaactagatgtaaccatttctgaacatgcaaggttttcatttccacatctctcataggattgatcctcaccacaactggtattatcaagtcactggcatccttgacacactccagtactgacaggaaccccttgaagactgtgcggggtgcggggaggtcacccttttttcttttcttttcttttcttttttttgagacagagtctcactctgtagcccaggctggagtgcagtggcgccatcttggctcactgcaacctctgcctcctgggttcgcgccattctcctgcctcggcctcccgagtagctgggactacaggtgcccgccaccaagcccagctaatttttgtatttttagtagagacggggtttcaccgtgttagccaggatgatctcgatctcctgactgcagggaggtcacctttaattcgtctttgtcttttctgtagtgcttatcataataggtgaacctattgctgctctgatagtgagggggatttggggggagcctgtgtcactctagcactatgtctccccacagtcattgactcacataccctttgcttgccccttcgtgcacctaggacctgagactatgtatgtataagaaggaaggaggagaacttggctctgagagactatgaacagagtcattgctgaaatgtaaatatcaaagattgaagggaaagatgtgagagtgaagccagctgtctagcttccagccgtagaatgatcataagagctactacactcaaggtcaaacacactgactcacccatgaaaattgccaaggagtttgagtggaagttctctgatattccaatgactttgaatgggacacggtaattccttcccacagccagggcttacttaaaataagtaaatgaataaataaagtctactccctggatcttttttttgctcttgtccctgcagagtaaggggatgccagccaaggctgacatcatcattatagcaagacaggtgctttttttgaatacttcacaaggacaagggcctggtattatgtaggtcttcaaagaatatatatatatataaatttttttaattcagtctcctacatttatagtatggggaaataagacaagagcgaggaatgccttgcttgggatattgcaattggatggctgcactgaggactatttaagcaaccttaaaatcacaaacacacatctgtgatgactttttaattatatctgtcattttggaaaagatattaaacatcttcctcagaagttatttttactttacacactctttaataatgttaaaagatatttgatgcaatttatattaataaagctcatgggacgtgttagtaaaaataaaattgaatcttctaaaatatattcctttaaaaatgaatgtctataattttatgctagtttaagcaaataatctgaataaatcctgtttgtttagcataacacatgtacacgtagtttctccacaaaatggaacgcgctaaatgtgttggggcctcaggaaagaactagtggaagggggcataggaggatttgggggcaaaaggaggaatccaaaaagaaggtcttcatggaggaagagacctgtcccaatgtgtcattcggtagatctcactttctcctagtacctcatagtcattcatttttcacccccaacagacaagtggagactgatattattcccttttacaatgtaacaaaatcaaagcttagaaaaccagggggtttggaaaataaggaatttgtgtaggattaaaatagaactttgagctcctggactctgaatcttagcttctaccttgcacttaaataaatttatgctaacagatgtcctgtcatcagataggacttttttttttctttttaatgtcggcaagtctcattgttacagctctctggtctgcccagtttggttacacctgttttgagattccttgcctatacccttccaactgaagacaagcacttcctactgtacttacagaactttcatctatgtcttggtttaatcttttgcctttgttttaaccgtttaccacttctgctttatattggtaggtaatcttacccccaaatacatagactatgagctccttaggagcaaactcatttttttttcctgttgttctttgtgtctttttttccctatccacctccaaatcttactccacatttctgaaaatagcacccaaagcaatacctctcactttggggagtatttagtacattttttaaaaaatgaatgtattatacagtctggatcaccataacaaaaatacaaggactgagtgccttaaataacagagatttattttcttatagattgagaatggaagtccgagatcagggtgttagcactgtaggattctgctgaggactgtcttcctgacttgtagatagccaccctctcactgtgtccttacatggtgtgtgtggggagggagcaagcccactaagtgtcttttcttataaggtcactagtaccatcatgagggctccatccttatgacctcatctaggcttaatcacttctcaaaggccccatatacacatactatcactttggggttaaggcttcaacatataaatttataaagggactcaatttagtccatagcaataaattaggccttttgactatagatctgtaagtgcataattggcactgattgatggattgcagatcagaatatcctatgcttctagttatatagaaactacatgcttagtgttttttttttttttttagacagagtctcactctgttgcccaggctgaagtgtagtggcacaatcttggctcactgcagcctccacctcccagattcaagcgattctcctgcctcagccttctcagtagctgggactgcaggcatgtgccaccacgcccagctaatttttgtatttttagtacagacggggtttcaccatgttggcccggatggtctggatctcctgacctcgtgatccacctgcttcagcctcccaaggtgctgggattacaggtgtgagccaccacacccggcccatgcttagttatttaacagaggtttattgagcactgtgttggctttaaacaattttgctagacattcagtagggcctgatgagtgtttaagacctcgtacagttcaggtgcattttcctttaaggatacatttaacctgctagatgtcatctcattttgaagacaagagaaaaagagaggaagacttgttttttcagagggttattatacattcctattagatcattaggaaattggcacaagtggcaggaagccaaactgacctgagtctggctgggcagtgtctgcaggttactccagcaaagctgctggaataacgatgtgttcttccataaagtgctttttgtcaaagtctcttctggaattaactcctcatgcacagatcgataaaccccaccaacttgccaatgtaattaagaagtgacaggttaagcataaccattaattaagttcaaagtaaaagaaaatgaagaagattgtttttgtgaaattgtgctgtcagatttttctcaagggtatttctgagttcctataaaggggaatttaggaaagggaggagaagattgtctccacttccttgggaaaagtgagtgtttaaacacatgtccattgaatatttttaactgaaaagtgaactatttgccagttttaagagacattgagtgagcaccttctgtgtgcaaaagactgtgctccgtgctatgcggaatacagcgcagtgtgagacttgttcacgctctcgtggagccctgaggtgaatgagaagtatcagacatgtgaacaaatataacacaaggcaaagtaatccaacttatctgtgagagattcgggcagttgtgagagctcagaggaaaggccatgccccatcctacagtggggagaggaggggactggcatcgagaaagacctcccagaggatgcagcatttgagcaaagccttgaaagtagagtaggaatggataagggggaaagaatgaatgagaacagttccaatatctcaacatttttttatgttgaattccattatagcttctaggatcaaaggaaaagaaatcagcctcttgttcagtaaagatttgttgagcattcattatatgtgcattattctgcagaaaatttggggctgggagaggtaaaaaaataccttcaggataacaggctttttcacaaaagtatcaaatagtcttagactcattgtcttcctctgatggcatcttaatggaattcaatacaaaggccaaaattcctttgttttgaagccacaagaaaacacagccaatggaaaagccgtgttagtgctgcctgtcctattctgataaggtgaatacttaaaagctatgaaagaagcactgagtactgctggacagtttgagttcatttggctggtagaattgagtggaagtcaattctcatgccatttaaactggaagaaactgaagattctccaacccaagctcctctttttgcagatagtcaactgaagccctgtaagactgtagttttatagataaaaaagagccatgtgaatttcctaaatcacataacagtcagtttattatttgacatttatggtacattcacatggaagagaatgattagacatttccaggagagaataacgactcccaattccctgagttaccattagatggtattaagcaacttcacttaattatgtacctgttttccagttatgttaattatacatcctttagcatttaccacctgtaccaatcatttagcataataataccttatacttaaatgcaagtacccagaatacttttatagttgttttcatttgatattcacaacaatcctacaaggcaagtgttatttctagattagatatgagagaactgaggcatagagaaggtaacccatatagccaagaaactaaaacagggttctgacatccattttctaactatgcatctaggtttttttttttttttacctctgcgtctaagttgcctgcctaaatcgccttcagtccattgaaatccatccaatcaatatttactgagcatcatctgtatttcaaatattgtagtgggcattgggggtatgaaattgcaaaagagagaatcatcagtatttgggaaactcactgtttgaatgagatagaaagccaaacagataaatgggaattattttaagtgccataatgggtctatgcactgtctttggagattggatggacagggtagcaaaagattgaggagctaattttgctgctgtttatctaagcatgtcagggtcctgtcttttcacgtagattatgagtgtcttggcatgtcttttgtctctctgcatcccccgaggctccttgcacagtcctcacactccactggcgttctgttaatatttgttgatgatgatactggtgattttttctctctgacatccagaacactggagagattttctgttggcccttgggtataacagatttttatttatacatttgaattagccttttagaaatcattcttaagtaaaatagatatctttttagtgagagagtttctaaatacgaacttattcaaaacagtaatgatattctattttagccagctaatactcaactacgatttgcaatttagagagttgtgcttgtatagattgtccctttctgaagtgagtgaattgtaactttaaataagggctgttaacacatcaaaatagtttttaatcagcctcaaaaattccccttatttccaagtatcttatttttactatttcattgatgtttcaagtggaatcaaatattccaactgttttccactggaagaagatgaatttcaggtacaattcagtagcaaagaacacccatgttttcaaaataatggagaaatttttttctcatatgaagttatgattaaatttgtgaattgcacaagcttggaattctgctgcaggatgcctacattctgtattgctttattttggtcatatattacaaatggaatatttcccagctcatttatatacagttcctggttgctgaaattttactggcaagctttgtgaactaattttacttctcaaagatactaggaataaagtgaaaatagggtcttttctctcataggtctaaaagatacttctttcctttaaccattacattctggaggtgtaattaatccaaccctgctgtagataggatctcattataaagattctaggtaaacagtctttctagcagaaatgatctttttggttcagtcttgcagcatttcctaaaattgctagtgtacgtagtaaatagggaggtaagtggggaaatttcctaaaaatgccagtgtacagagtgaattgttaggtaaatgagaaaatcaggcttgatttaccaaccaccccatgtgcacatacaaacaaacacacactcacaccaaagccaggaaccctgcaacaaagttctatttaccctgaggagatataaaactttgtgactgccactaaattatttttttgaaaaataatacagaaatttgtaagcagacacaacagctctagtttatccaccaaataacaatataaatgggacaagcaaagagaaactgtaatttgaagatttttgagtgtgatacttataaaagtgtgtgtgtttgtgtgtagaaatgtattgaatttgagagtaatttatggaaagtgctgtcagcatggtatttcaaatgcttcacaatttgaatttaaactagtcaatgggatcattaagattattatgcatgttttccaaagagtttgaattcaaatgacaacttaaaagaaaaaaaaaaagatgtccttgaaaaactaaggaatgttagtgcacttatagaaattcttgcagtttggagtaatttgccacctccccttctgaaaaagtacctgatgatagtgtgcttgagagataggggtattgcagacatattccttaggtgagtaaaactgaattgtaaagtggatgctatggaccatggattatttcatttagtacgattgacagtagaaaatcaggaagggacgtgcatcagtgcgaggctgacacacagatctgaggatggcagaagctcactgaatagcacacgcaaggacccttcaaactcatcacatgtgccgtttggttccctttcaatgggtcggtcttggaatatggaggtctgctttcattttgtgccaagtaaccacgtgagcagtttacaaaagatacaaacagaaggctgctcattcatttttcaaaaagacttttttttttttgcaatggagtttgcaaagtgattttgcaatggattttgcaaaaaaaatggatgccattttttttaaataagtgtaattccaatgatgggaaatttactagctctcaaggcagcttttccttgtgttgaaatctctaaaggttaaaaagttactttttggaaagaagtctatttccttacaacatgttttcattggtccatagagaagacagctaatacatcttccacttggcagccttttaagtatttgaagaaaattctcaagtccatctgaatcttctgttttggctaacttctagttccttcatccatttccaacctaaatttgagcctaacgaacagatttcttctttcttatttaaatatatatatatatgaggaaataaaggcacagagggcttaagggagttgcccaagaacatagagctggttggatgactggaatgtaaggctgtgtggctctaaaccttgtcatttagactagagcacctatacgtcagttagcttcctgccacttcttgttttctgcctggataggactttataaagagtttggaagaagggagagttccgacgaggtacagaaatcagaacttccccttcttccaaactatatacaaataatcagttaatcagattaaaggactcttagtaacattgaaatcaaacctttgtgtttccaggagctctgagaacaacaatttttttggagcattgcaatctcttgagtatccaaaatgattctgtaatgatgtctgtgaggtcagaattggagcagcaaatggaattcctttaagggcttcccatcaatggacagctgattccagaaatggaggaggcacagtttgtatccaaattcataagcacaagtgggagaaattaggctttggtaaagagggtgacattcccaaaggaatcatctgtgaagttggggaaggaattcaagctcagggctgctgttctctaccaggttcttcagccagctggacatgctccccaggtttctactcagtctggaatgttagtaaaagtccacttcctctccttgtttctcccttctagtgaaaacgttcctcttctctaccttcctgacctcaagaccattgttccacacatcccccctcaggatcccaccccgccattctcattctcattacattgtttctggatccatgtctttatcagatgcagcccactgtccctttcagaagatgccagaaaatttacatatgtgatcaaatgttcccatcacaacagttctttccagtaatcccagtgctgggcagctgattccagtaatggaggagacactttcagctattaggcaatggatcacactttcaaaggagattgagcaatctcctcatcaagttgtacttagagcacaaatctggtgccaaaaggcactaccggattcagactgacagcactgagagttttgagtgaaagggaagttagactggtgttatgtgtattcactgggaggaactcaccgggagaaataaagagggtttccagtttattcattgtgtaaagcggctataatagtatttataggggttttgtgaatgtcaaataaaattatatttggaacagtggctagtgccataagtaggacttaacctttagcaatatgtactacattaaaaggaaggtggacacatgagtgatctctagcattttgtgactggaaggaaagagactggatgaccactcttcagagatgctatggacagtacttttgtcaaggactgggagtggagaaaatgacttatagtggtctttccaacatgaagtttgtattaatccgttttcacactgtgaggaagaaatacctgatactgggcaattataaagaaaagaggtttaattggctcacagttccacacggctggggaggcgtcaggaaacttacaatcatggtggaaggcacctcttcacagggtggcaggagagagaatgagagacaagcaaaaaaggaaaagccctttataaaactatcaccccctgcctcggtgcggtcgctcacacctgtaatcccagcactttgggaggccgaggtgggtggatcacgaggtcaggagatcgagatcatcctggctaacacggtgaaaccccatctctactaaaaaaaaaaaaatacaaaaaaattagccggacatggtggcgggtgcctgtagtcccagctactcaggaggctgaggcaggagaatcacttgaacccgggaggcggacgttgcagtgagctgagatcatgccactgcactccagcctgggcgacagagcaagactccgtctcaaaaaaaaaaaaaaaaaatctatcaccccccttgattcacttacctcccactgtgtcccttctacttcacgtggggattatgggaactacaattcaagatgagatttgggtggggacacagccaaaccatatcacacatgaaacacagaaaaaggacatctttttacatggatcttctgatatgcttgtaccaaagcccacagtatatcctgtcttcttgaaagagtatcatagttattcatttgccttggatggaaataatgttgtaataccagttaatacttttttcaactaaagggaatttggcttcatctccagttgcaaattcacatcaggaaatatcaaatccaaagatcaaaactcagtatctcatcactttcaggaccatccttgccacttgtctcaggcatcatgtacctggaagctgaaaagcaatgtacagaacctttgaattggagagatatcaatttgaacccagatcctgctacttcctacattgtgaaagggatcaagtttctttagttctctaaagcaaaggtttttcatctataaaaggaggttaataaaagggaatacttatcatgttgaattaatgggaatattaaatgagtttatgtggtttaattgcctagcacagtatctgcctcctaagatatgtttaataaatgctaactgtgactatagagatttaccctgaagatacctgtcatgtcatgccttctctgtcaaatagatcatgaatgcagttcctagcctctctctcctgttataccctcctagcaatattctgatgcagatgaacccagccacttgtcttttgcttgccagaacagctgaatgttgctgggaaaaaaaaaaacaaaacacagccgggcataatcatatcattataagttgtgaccagccttgacctgcgccttgaccccacccacagcctacattcttacaccctgctctcaactgtttcagacattctctactgtgacttctatctcccttccccactccttccttctcaagggatgccctggcctcattcttcatagtgaaaatgaaagctgccagaagaaactctttcagcttctgctctcaaatctgtgcccatcctttctgtcccttagtgcctatcagattatcagttgccaattggtctccatgtatctctggtccctttttcccctgtcttctgagtgccctggctccatggatcatccattctttatcctacccaatgggattcttctcgtcaacatccatttgtgccccagcttggcccatattttccctccattgactccacagctctctgtagctattgctttatcccttccttcacagccaaactctgggaagttggatattaaaaatgctgtctcccactattcccaatagccaagacatggaatcaacttacatgcccatcaccgacagaccggataaagaaaaggtgggacctataccccacagaatactaagcagccataaaaaagaatgagatcatgtattttgcaggaacatggatggagctagaggccattatccttagcaaagtaatgcaggaatagaaaaactaatgctgcttgttctcatttataagtgagagctgaatgatgagaacacgtggacacaaataaggaaacaacaagcactgggatctacttgagggtggagggggagaggagggagaggaatgaagatagctgttgggtactgggcttcatacctgagtggtgaaataatctgtacaacaaacccccatgacatgagtttgcctatgtgactaaaccttcacatatacccctgaacctaaaataaaagttttttttaaaaaaagaaaaaaaaatcctgcctccatttttctatcaagtattctgcctgctaccaggcccctatcccttcatagactagctgaggacatcagggacttccatgttgccaaaaccgtgagtctaatcagtgtttacctaacttgatatctcattcttacaaaactgtccctcccaacttccttggcaccccagcctcccgattttgtttttaatttttcaataggttattgggggcacaggtggtgtttggttacatgagtaagttcttagtggtgatttgtgagattttcgtgcacccatcacccaagcagtatatactgcaccatatttgtaatcttttatccctcgtcccccttccacgcttccccccaaatccccaaagtccgtcgtatcattcttatgcttttgcgtcctcgtggcttagctcccacatatcagtgaaaaatatgatatttggttttccattcctgagttacttcacttagaataataatttccaatttcatccaggtcactgtgaatgccattatttcattcatttttatggctgaatagtattccatcatatatatatattccatcatatatatatattccatcatatatatatattccatcatatatatatattccatcatatatatatattccatcatatatatatattccatcatatatatatattccatcatatatatatattccatcatatatatattccatcatatatatatattccatcatatatatatattccatcatatatatattccatcatatatatatattccatcatatatatattccatcatatatatatattccatcatatatatattccatcatatatatattccatcatatatatatattccatcatatatatatattccatcatatatatatattccatcatatatatatattccatcatatatatattccatcatatatatatattccatcatatatatatattcatcatatatatatattccatcatatatatatatatatatattccatcatatatatatatacacacacacacacacacacacacacatacccacacatcccagtttctttatccacttgttgattgatgggcatttgggttggttccatgattttgcaattgcgaattgtgctgctataaacatgcttgtgcaagtatctttttcgtatgacttcttttcctctgggtagatacccagtagtgggattgctggattaaatggtggttctacttttagttcattaaggaatctccacattgtttccataggaccagcctgctgnnnnnnnnnnnnnnnnnnnnactgggatctacttgagggtggaaggggagaggagggagaggaatgaagatagctgttgggtactgggcttcatacctgagtggtgaaataatctgtacaacaaacccccatgacatgagtttgcctatgtgactaaaccttcacatatacccctgaacctaaaataaaagttttttttaaaaaaagaaaaaaaatcctgcctccatttttctatcaagtattctgcctactaccaggcccctatcccttcatagactagctgaggacatcagggacttccatgttgccaaaaccgtgagtctaatcagtgtttacctaacttgatatctcagtaaagggtgatcattcattcttacaaaactgtccctcccaacttccttggcaccccagcctcccgattttgtttttaatttttcaataggttattgggggcacaggtggtgtttggttacatgagtaagttcttagtggtgatttgtgagattttcgtgcacccatcacccaagcagtatatactgcaccatatttgtaatcttttatccctcgtcccccttccacgcttccccccaaatccccaaagtccgtcgtatcattcttatgcttttgcgtcctcgtggcttagctcccacatatcagtgagaaaatatgatatttggttttccattcctgagttacttcacttagaataataatttccaatttcatccaggtcactgtgaatgccattatttcattcatttttatggctgaatagtattccatcatatatatatattccatcatatatatatattccatcatatatatatattccatcatatatatatattccatcatatatatatatatatatattccatcatatatatatattccatcatatatatatatatatatattccatcatatatatatatacacacacacacacacacacacacacatacccacacatcccagtttctttatcccttgttgatttgatgggcatttgggttggttccatgattttgcaattgcgaattgtgctgctataaacatgcttgtgcaagtatctttttcgtatgacttcttttcctctgggtagatacccagtagtgggattgctggattaaatggtggttctacttttagttcattaaggaatctccacattgtttccataggaccagcctgctgattttctctttacctatgtctcagttacctttgctgttttgtattctccctgactcctaagttgtccagtctctctgggatcattttctttctcaattttctctttagtcaccctcatatcctcccaagcttttagatatcatcagtatgctgacatgtctcaaataggtaccatgatggttttgttactattttttatcttagccattctgataggtgtgtagtaattatctcattatagtttgacttgcttttctcaaagtgctaatgatattaaacatcagtgcaggctgggcccggtggctcatgcttgtaatcctagcactttgggaggctgaggcgggtggatcacttgaggtcaggagttcgaaaccagtgtggccaacatgctgaaaccctgtctctactaaaaatacaaaaaaaattacccgggcatggtggcgggtgcctataatcccaactacttgggaggctgaggcaggagcattgtttgaacctgggaggcagaggttgcagtgagccaagagcatgccactgcactccagcctgggcaacagcgtgagactccgtctcaaaaaaaaaaaaaaaaaaaaaaaaaaaccaaccatcagtgcagaagaggatgtggagtggagagactgcatcaattatattttgctgatgagaatataagatggaacaaccattctagagaaagttttgggaatttcttcttttaaaactaatcctgcaactaccatgtgacccagcagttgcactcctgggcatttatcccagggaaatgaagacttgtatatcccagggaaatgaacaaatcaaatatttgttcatagcagctatatttgtaagattcccaacctggaaaaaacccagatgtctttcaacaggtgaatggttaaacggtggcacattcttaccctggaatacgatttagcaataaaaggaaggagttgttgatatatgcaacaccttgggtgaatctcaaaagaattatactgagtgggaagggccaacccccaaaggctgcatactgtatgattctatatataacattcttgaaataacactatataaatggagaacagattagtgtttgtcaggagttagggatgggagacaagaagtcagggattaggaattgggggtttggggtagctgtggttataaaaggacaatagaagggatcattgtggtgatggaactgctctgtatctttgccatggtggcagatacattaatctatacaggcagtgcaattacataaatcaaatacacacacacctgcatgaacttacacatatatacagacaagtggagaaatctgaataagattgatagactgtatcaatctcatattctggctgtaatattgtaccatagttttacaaggtattattgctgggggaaactggataaagggtacttagatctctacgttatttctttcaacttcatatgaatctacaattataagaaaatttaaagtttaatttatagaaaaggcaattttagatttgaaataaaattcctacattaactgaaaaattaattaaatataaatttaaaatcaaaattaaaaaccctttgacaactttagatctctctctcttacacacacacgcacacacacacatacatctaagctttattgtctttgctctactaacagttcagctccctgtaattcagtttctatccccacctctccacttacaccacacttctgaacatcaccagtgacctctttgatgtttaatacacttaagactcttcagtccttatcattcttgagctcttgcagcatttaaagatgttgactctatctttgtttcatttgacttctatagcaccgtacactctgggttttcttcctatcgctgtacacaactttctaccgtttttaatagatttcctctcttcattccttaaattctccatttttcttgagttctgccctaatctcccttcttgtctcaatctgtactcctgagttatttcatctgcttccgtgagtacaaatatcatctgtgtgctgagaactctctggccaaaatctgcagctggatctctctgtaagctccagatatgtatctatcattttagcctgcagtcttcatagattggcccataggcccacaaatgcaacagtttcagacagaacccaaggtgttcccttttaaacctgctcctctctgtgttccttttccatgaatggcattaccttgttgctccaaccaaaggcacaggagctggcctgtatccttcctcttccttcagtatcccctcttatccacttattaaccaatttctgacataatactttggcttcctttatatcttctttcatttatgagacaagttccttcagtgttttctagtgacttttcattacttggaagagacagttcatactcctcacactaccatgtaaagagctcatagccacatgcacacacatgcacatccacttgtgcacacatacctaaacacacacccaaaacagagagattgtctcatgcctgtggctgggtaaacacttgtccttgatggaatgtgtagctttcccatctccatcccaatcacctagccaaaaactctcctccttcaggcctccatttagacatcacttttccctcaagtatgtgtgattcttgtgccttatcctccccatcatcctgtaatagcatcctctgcttttcctcatcatagcatttagaagactgtatttaaattacctatttgacacatacctcagtagctatacattttccctaaggggagggttgatgtcttgtttctcattgcatcctgcagtaagcaccgagtaagtgtttcttgactctggggctgtactgagttgaagaaggatgacatcactgactacagaaccctttgtataagcatcaaaggggtagcagtggggtaaatgatcacatcctggctaaatggttccgattcctacaaccctgcagcacgcccccccggctctaaaccttttagtcatttcctgtgaatcttgccagcactcatttcattttttgttttttccattttcttcatctttcccacatagtatagaccagaatgaatcaaggtctaacttatgctgactgtccgtgttgcatcatcagtctttggggccccttctcagtttctgtggctgctcttgtgcctgctgactccatccctgtagaccttgctgttcctcccagtctgtggccactaacctcagttatttttactgaatgtgttacctcatccatagtgagtcttttgttgttgttgggttttttttttagcaacaatgtattttttaattaaggtatgtacattgttattttagacataatgctattgcacacttaatagactaccatatagtgtaaacataacctttactgcactgggaaaccaaaaaaataagtgtgacacactttattcaatagtcactttattgcaatgttctggaaccctttttgttgttgttgttgttgaacggttattataacatgtctgatttagaggaaagtacactgaactgaaaatcaggaaagctgggcccagggggctggccttgagcagctgactaagcctgtacatttaattcaaaaagagctactcaggttattcccttaatcggtcttatactttatgacagtaagcacttacctcgttctgtcacatggtgtggccagattatgcatgtactatgattcaaaacattcacgtaaataaatcttcctaacatacaagaattatgtgtctgtggtgctttccagcttttgatgtgcttgcaaacccattttctcatttaatcctcacaaagttggaaaccagctcacttacttattcatgtttacaggaataatcaacattgatgccaataattttgattatatattttaaaaatctcatgaaattggttttaaaagaatcatttattagacaaaaagagtgaacctatcaacaggcaattcacagaagagaaaataaaaataacaaatgaaccaatgaaatgatgttcaaattatttaaagaaatacagtttaaaatattattttttcattctcagaccagccggcatttataagttcaatgcttggtattggcaaaagtatgggaagcatgtactcacatgggcttgtgataggagtacaaattaatacaaccttttcgaaacaaaatttagcactatctttcaaaattttaggtgtgcactatttttgaccctgcaactcgatttcagacagtaggcgtatttgcataaaggcacagtggtattctgtttcagaatacacattgcaacatttttatgatagaataaaaggactagtaaaataaagtacagcaactgcatgcaataataacatggaggctatcagaaaaataagacaaatctatatatgctaattaaagacaccttaaaaactattttaggaaaaaacaaggtacaaaataggacataaaggatctgatttgtgtttgaagaaaaatttcaaacatgagtgtttatatgtgaatgtgtgtgtggtgtgtgcgtgtgtgtgtgtgtacatgcttatacaggcatgtataagcaatctgatacatgcctgtataagtattacccaatcttttagtgattatctctggaaaagagttttacttttcattctctacccttctatgacagttgaatttttgaatttttaaatgaataaatgtgtgtgtgttgtgtatttttaaagttaacatacagactgagcgcagtggctcacgcctgtaatcctagaactttgggaggcgaatcacctgaggtcaggagttcaagactagcctggccaacatggtgaaacccttgtctctactaaaaatacaaaaattagtcgggtgtggtggcgggcacctgtaatcccagctactcgggaggctgaggcaggagagtcgcttgaaccaggaggtggaggttgcagtgagccaagatcatgccactgcactccagcctgggcgacagagtgagactctgtctccaaaaaaaaaaaatgttagcatatagcgtagaattcagcttttcttattctaggtagcgatggtgcttttcactgctttgcccaacttaattgacccaagtagaaaagtcttcaaaaaaaaaaaaacgctttagaaaaacactttagacactttagatttatgtgacttcaaaagtcaaaaatggtaataatcctgcttaggcagaagccttgccctcagtcccaaaacatgatggacaagcgggtgacttacctgtggcttttcttgtatcttgcagtctgtcagcaatcatgaaatgtaggcctcagagtggaagggcccctagagaccatccattgcctctcaggagcatggtcattctgcagatcaaggtcctgctctgggagaaatgggtgcacactcactctgcgttctgtccagcccttctgccacctacatttctatgcttttctcttactgctaaatagcttcctaaaggaaaagtgaatggtctttgtgaattcaaacctcattctgttgcttccctatttaaaactcttcaatgagtccctcttcccaatgctctgtctctagttgttctgtatataaaagctaaacttcttcacatgtttctgtttctcttgtttatgcgatcgtttgtcattggccttgtgttggtgatgtatgttctgaatgaataggctccagcaattaagtgactgagatgaaatgcttttgtatctctctagcctcatttcttttttttttttaccactgtgatgcaaacacatggaactactgttctccattgcaccatgattagtctatccgtagtcttttgtgtgtgatctttctgtacctagaacactcgtcttgggcttttgcctggccagtacattgccattcttcaggtctcagctgatttttcacttcttccatggagccccctctgacttcacaagattgcgttgtcctgctcatatgtcctgctcagagcatgctgcatgtctcacttcatagcacctgttatttttttagtatggattttggttttgtttgcctgcaccccattccttgaggacagggaaagtttctgtccccctgttgtgttgaggacactattaagttccctgccattacctggtgcttaacacatagtagatgctctattagtgttggaatggatgagctctagtgagtaagcgcctaagacaacacagaccctaaggtcttctgaacccaaccaagtgccctgtttttgctgctataccaggctgtccttcttcccactgccatcctcctggttctgttctctcagcccaagcaccgtgtgtagcctaatcatgtatatctattctcagagtttgtaggacaggatacgagttaacgacttaacgcccttcaagattttgtgtaacagggaaaggagagaacacctggaatggttcccgcttggagaaacgtttttcatccttcttagtttcagctccaatcagatggattcagcctgtgacagtcaacatttacagcccttgggagcagctccatactcacctcctttgcctgcttaccgcaagctcactgcctcctcctcagattgtgccagacataccaggtttgctgccggtgagaagcaacaatccaaatcctacctttctgttcaggtcccagtaaaatcttcactggcagcattttagaattgccccttccctcttctctcaaagggctgctgttcagctggcaggaccagcttctctgatgcagtgcagttcagtgcaaaccaacggaaagcccacagtttttttgtttttttggttttttttctaggtgtaaacaaacctggttgattgtgaggcaaagaaaaataacaaaaacaagtgagaatacattagattaatttactctttcttttttcccgctcattcataatgtgattgaaatcagaagtaaagaaagtaaaatcagagtgagttccctctgctcagtcacccaccctgatcacaagacttttggaatactgggaggcactgcatttaagtaagtatcagctgtatggagagtatgaggttaagatgatgctggatttaatttaaagtctcctcactggtttgcgtgaaggaagatttttatcaagcagagtgaaagagacagaatcttgaagcttccgcagaggggaagaagacagggccgtgcactgcgagtcagtatgcctccagtccctctggtgggcaccggtccacatcacaggaagcccagctgtggtggctgtcagtgtcagaggggctggcagacagtagtagaggcccagagaagttactttgtacgtatcagtctagaaggaagagattatgaagattagtcaagcctccctttctcatttatcctttttttttttttttgagatgaagtcttgctttgtctcccagcctggagtgcagtggcacgatctctgttcccgcaacctatgcctcctgagctcaagcgattctcctgcctcagcctcattagtagctgggattataagcacccaccaccacgcccagctaatttttgtatttttagcagagatggcgttttgtcatgttggagagactggtcttgaactcctgacctcaggtgatcctcccacctcagcctcccaaactgctgggattacaagcatgagccaccatgcccggccactttctcattatactgatagcaaaattgagacccacatcagcgatctaacctgtcatttcaatgatgtcctgacataagagtaagcggccagcctgccctttaagtaaagcctactcatatgggagtatatgtgctttattaattagcagaagggtatccaggccttcttggaagctgtcttctctctgtatgggtaaatgggcaacttttctagccttccgtctaattgggtttaatatcagtgaaagaatctttaagaaggtgtgcccttaggtgctagggccagtattgtaggtggcaaccaggtacattagtctctgcccttgtggaactcatattcccatgtttgtaaaggagtctgggcctcttatatgtggtaaatgaagtgactgtctatgtagttgcctttgcaggacacaagtccttgccttagtttccctccagccaggactgccccaccgagactattcatagctccaacttaaggtgctttaataaagggcagaaatcatgacaagaaaggacgcttttcttcaggcaatgaattcagcctgattttagaagctgttttggagaggtctctgtaagcatattacattttattccctgcagtacaatatttatacatggataatttgtattgacagttgatagttacatagaggtatatctcactggttctcaactctagctgcattttagaatcaccaggagaattttctttttcgattctgatgcctaaatctctgccctagaacaataaaatcagaatctctaaaagtgaggcccagacatgggcagttttgttattatttatcattgtttaataataaatattacgtaaaagtcagacttttaatggctcatttgtagggaggagaacttgccatttcccaaagtatcaccagcataaaaggtgaatttgtattttgttctctaagtttctggcatattctgaaactgcaatttaagtgactctcctacctctgtcttactcccaatttatatttagctggattcatattagagggcaagaaggggcaaatagaaaaaaagtgatctttatcaaacccatttccttgtgttagaaaaacgatttgttggaaaaagccatcgaggagatttgagattcagcacaaaaaagaattcgatatcacctaatacaagctgagaagggctacctcagggggtccttgtgcacctcactaaggaaggtctttggcagaggcagagaccatgacaaaggttttttttttctttattggacaagagccagaaaaaaatggccccaagattatgctcagccccgggaacctacagaaaccatggagcagtaggaatgggtagctagccgtgttagaagtaaatttgaggccgggtgcggaggctcatgcctgtaatcccagcactttgggatgccaaggcaggaggatcacgaggtcaggagatcaagaccaacctggccaacacggtgaaaccccgtctctactaaaatacaaaaattagctggacgttgtggtgtgtgcctgtagtcccagctactcaggaggctgaggcaggagaattgcttgaacccgggaggtggaggttgcagtgagctgagatcatgccactgtactgcagcctggcgacagagcaaaactccgtctcaaaaacaaaacaaaaacaaaaacaaaagaagtaaatttgattaatgaaatctacctttatgtttttacccaaagtgttatcaggaaagataacgttaaaaaatacacgtgattttcttaatgtcttagtttgagcaagtaattctaactgctctagcaaacacatttttaaatctcagggatttaacacaatgcaagtttatttttgtctgacaaaaatcccccatgtttagccagtgcattccacgtgggattcagagactctgtcttattccatccagtggttccaccagtctctaaagcctagaggtcctatgccagattatgtgaattaaaattagaagagagtattaaggatcttctgggacagtggtgggatggttacagtttccagactcataaatgtaaaacagtgttccttctacaaatattctattggctggggctcattcactttcacacagtaacaaagaatgcttggaaatgtggccacactgtatacccccaaaagaagaggaattagtttggttcaaatttatctagtctctgtcatgctttcatcatcatcatcatcatcgtcatcatcatcgtcatcagctactgtggatcagcatactttcctgcaattttccaaatcgaattttgtggttatgtattaacagagtatataaaattcattttccctacataatatgtattttattcctatatgtgttttctgcagtggtctgatttatatcaatgactaacatatagattcgatttgcaccaactagataatttaatctcttactcctccttgttgacagttggtggggtgcgccttatttttgaagaagaaaatgcttatccagttattcagccaatctcagttgacagcctatcacatgtcaggcactggaaattccgtggtgagcaaaaacagacaagtggcctgctttcaggaagtttctattctgttaagggagatggacagagtgttttaaaagaaaggagtattgtcctaagataattaaaacacaggaacctgacttagacagagattaagacaggcattcctaaggaagtgatacttcactgagttatgaggagtgagtaggagtttagacatctccagacagtgcagcacgctgatttgaggaactgaaagaaggccagtgtggtcagagctcagagactgagggagaagcatgatgcaggatgagttttgagagataaaccatgaaggacttaggccttgctaagcattttggcctttttcccaaaagtacaggaaagcctagccattttattattttataccacccatccattacaggcttttcctgaaaggtctttggcaataggggagctatggaagcaacatcatgagtaagtgactgggggaaccttttccctaagtgttgtggttgctagccacacaccatgtattcaacatctctccaactctcctcatcgtttcccagagctgaaagtaagatgagcacgaagaaaccatgtttagttaagaacatgacccgaagagtgaaaggtatttcctgttccaaataggagcccagtctgcattttctactacatgatttagtagaaagacacattgcatttgaaccatatttcttctgctagccaattccatcttatctacaactttttgataattattttgagaaatagatctagatcacagccttccaattcctaggccaggatactttccatttttctacacagaccccattgcagtcctcccttcttcacaatcttcaaaatatccttctgattgaaccagatatcttattcttcatcccgtttcctgccccctaaaatgacctatctttcccttctaaaacttccactaactttaaaattggagctcaaggcttccatctccacagactctgccctgacaacaaattggttggttttattttcttcccaatgaatagaatagccgttagagggaattgtcttcagctcttttcccctcctcctcctcctcctcctcctcttcctcttcctccttcttgcaaatacaaacacagcagggctctatgcagctggttactctaggctctggtaacctaacatagcaggggaggacagaagtcaatagggtgagaagtctgtttttgtcacggatttgctagaagctattaaagtgttcttcctaagtctgttacttcataggttgagggaagtaatgcatcccacacaagaggactgggatatgtttaaagtagtaggaaggcatttgccactattctagtccatcctgcccatgctgcctaatgtttgttcctacagatcaaaatctcataatcttctagacttctagatacagaagagttggagagatcaaagccttgcctctgacccagattattcgatctcatctggcatatcctacactctagccatcctgacctgccgtgtgttcccctaaagctcccatccttttctgactttgcttttcctcattctgtcccctgcattgaaatgcctttcccacatctctatgtctaaatcttacatggccaattccaacgtaatctaatctctgaagattccctttgctccccagttagaagtagtcactccctgctctgctcactttttgacatatattaatttatatagctatgcatttatatgtgtatgtattatattccttacaagagaagcttttgagagaagggcctataacttttctttctatttgtgtttcccaaagctccttctggtgggaaaaatgctttgaggttgaattaagctcacattgaactctatgatgaaaccatttgcttatgaacttggacaagtttctttacaactctgaaccttctgaattttccaccaggagaatgggaatgaataagtaagaaaacttataagacagctcctggtgtagggcctgactcatgtcaggttcccaggaaggccactttatatccttcatacatttgtatgtctgtgttgacattgaatgtttgcatgacatataaaatataagtagtaatgacaaatttaatagtgaatacttacagtagtgcatttcatcctatgaaacgggcaatctggcccattctatataataggggagaaaatagaaacttagatttactaattagttcaagttggcacagatataaggggatctcagacttcaactcaggcagtcaggcagggcctatactcttgatattcctttcttgatactttctcagtatcaaattaccacataatagacaatgccactcataaatctagcccactctaggaacataataaggcctgttgagacattcagagatgtctccctgatcttcaaagatgaatttttattcttccctaagctgctgtctcttcagtctcaacatcctaagttcattttatctttcctcacaggtcaggttttcagctctaactgtgttcatcctggtggctctgccctggacatactgcagttcttttatgtacctcttatcgtatggggtacaatggctttcggtactgctcagtgaggggagagaaatagatagtgtagtttctgatgtcaaggaacactttagagagaccttaattaatgtagccatatgttgacttcctggagcactcataacaacatgggaagcccacgctgggaagatgctgagtaggaataagagaacaatgctaagagaagggaaatttcaccgtctgtgaagcgtctgtttagattttatgtttaaactttatgaactctgtcacttgctggtgaattttcttgctcagtatcttaaaatacagctgcagtgtgggttccaccctcttcacttaaaagggtgattaactgtttgtgatgaataattatttaattgccagttcagctacatgtgtgtagttgttttgcttctttcctcttcagtgtgagccaaatcttctcaataataaaaataatccagaattagtcaactgccttttatcatgttctcattcagcctgctggagcaagaacattccaattctacatcacctttagcttaaaaagtaaataaatagaagctctcactcagccagttgatagttttactctcacagcctctcctgtaactaataaagtcttgacttcatcttgaaccttttactctatctttggataaaaatttaatcagaaagaattattgctcttttaatacctgtttaacctttacattcgcgatgggtacaaaaccacttaagatttaaagctctcttgttatggacttgtatgctgacctacttttcctcagagatattttttgcaagaattgttgaagcttgacatggggatcactgcaaatgtctcagctttgccattcactgctttccattcctatgtcctccttgccctgttaattattttaacagagacttgctattttaaggaagctctttatcgttactaaatctttttttattgttaaactcctttttctttccagcatagaagtatgtcatgttttctgtcttcagaatgtgcaagtgcttaccttctcataaagtgtgcctgttaccttaattttatagtctttatcacaaaaaggtacgtaagtggggttcagaatagtgtcttgcacttaaggtttaacttaggttttagtttcttcatgcaagcaacttgcatatgtagagaggcagcatgctatatagtgcaatgttcttcttggtttttaattataaaagtgatttcttttctagtaaaaaatcaagttatgcacaaatatatagagtgaaagtgttttcaactcctctctctagaggaagccactagcagttggcatatttccttccagaatttgttgtgtattataaacctatatacgtgcgtatgtatacacacacagtagtacacacattgttctgcaccttgcttctttgttttccctaagaatgtatgcttgatatatttctaaaaataataatgtatatgggtctaagtatttttagtgatatagaattctataggatacatgaaccgtaactcccttagtcatttctctactgattagtatttaacattgtttcttttttttttttttttgccattaaaagcaaatatctttgtgcaattatcttcatgaaatgttgaagctttctttttttttttttttttttgagatggagtctcgctctgtcgctcaggctggggtgcagtggcgcgatctcagctcactgcaagctccacctcccaggttcacgccattctcctgcctcagcctcccgagtagctgggactacaggtgtctgccaccacgcccggctaattttttgtatttttagtagaggtggggtttcatcgtgttagccaggatggtctccatctcctgacctcgtgatccgcccaccttggcctcccaaagtgctgggattacaggcgtgagccaccacacccggccaaaactttctgcaggatatatttttaaaatgggttttccaagtcaaaagtgtatgtatgtttccattttgatacctactgaaatagctctccaaaagtgaaaccaaatttattcttttcaatggtatgtaagaatgcctgattccccatactctcattaaccttgagcatgttccatcttttaaatttttgccaagaagattgtctaaaaatggaatctcattgtttgtatttgcatttttatgatttttggtggatttagcatcattttctatgcttagtaactgcttgcctattcatatcctttatccaggttttttgttttgttttgtttctttttggtttggttattcatgttttccttattagtgtattggtagttatatgagttttaaccctttgtcagtggctaatttggaactcctccacagatccctgggggtttcttagagcagctgactggctggcagagctctccatggccttacctccccttcctcttctccgaactcacacacacactgatcgaacagaatagaccaattattacctgcatttcatgttgggctttgtgcttgagattaaacaaaggttcccggggctaaacgtctaaaaaacattgccatggaatgaagagccctagattttgtcataaagtcatctgtcctaggctctacaatgtagcattttcaaattggaagagccttcagagattattttattaccaacacccatgtaatataaattatacagttaatatatgttgatatacatgcaatactgaagaaatctctaatgcattctatattctgtaacagtaatatgtattttattatttataatagcttcaacatatattgaaaactagaggcacatacgtctataaacagtgctcagggcgtattattttggtgtttatttatttattaggtatttattattttatttagtccatagatgatgcatttatctgagaactcctctgactcaaggcccagcaagaatctgctgcccacagttatgagtagctgaactgggccaagcttttaattctataaatagcgaatctatgtagacactcagctagttagtaccagagtggtacccagatccgtgatgtcttgactcttagtacagtgcacttttccccactttgccattctttgctggtgaccttgggtagatcttcttaactgctcagagcttcagttcttctctcttttaatgagagtaataatgcatgcattgatatcctgactaggatggagttggataaagactgttcttaccttttgtgaatagcatagtatcttacagaattgtgaggaattatccaagtagctattgcccctcatcatggtgttaaaagtaggattgctagtttgaacggtaactgcaggaattcaatgtgttttgattttagcatattcccgtatcatgtagaccagtgttaatatttttagtattttatcttagttcttttttttctgaaagtcttgatttttcccagttttattttttagatttgaaagaaaaagaaaaaggatgtaactatgactcttatgttttcaatctctctgaaatataacaaagtaataactctaaatggtcaacgtagtagtctgagggcattctcttgaatgcttagttctgtgttacttaggatccattcatagagcatattatttatattatgtgaggtttaactcttcattataactcatggaatcaatgatagaaatgcaggttatttatactgtcagtcccaagtatgtaatattaaaccaccaaaattcagtttaagaaacttgcaataagctaccacttggctcaaagcaaggaattaggatggtcaggttgaactttctttatatataaagaactgagtctctgaaaaaggaaaaagacttttaaatgacacccaatgaatgtctttttaaaaaataatagctttaatggctgggcacggtggctcacgcctgtaatcccaggacttcgtgaggccgaggtgggtggatcacctgaggtcaggtgttctagaccagcctggccaacatggtgaaaccccgtcactactaaaaatacaaaaattagctgggtgtggtggcaggtgcctgtaatctcatctactcaggggggctgaggcaggagaatcacttgaacccgggaggtggaagttgcagtgagctgagattgcaccaccgcactccaacctggggaacaagagcgagactttgtctcaaaagaaaaaaaaaagctttaaaatatatattgcatatggataaatttacatatcataaaagtatacttggctaagttctcaaaagtaaacacacttttataatccccaccctaaaaaagaaggaacattagcagttaattacttcagaagttttcttcatgacaacctggttgtatgcctttcttttttcctaaaagtgatcactatcctgacttataataatactatatattagattaaaatacttttgttgtatatgctttttttttttttttttgagacagggtctcactctattattcaggctagagtgtagtggcacaatctcagctcattccaacctccgcctccagggttcaagcaaatcttgtgcttcaaccacacaagtagctgggattacaggcttgcaccaccacagagagcaatttttaaaattttgactagagatggagttttgccctgttggccaggctggtcttgaactcctggcctcatgtgatccacctgccttggctaggattacaggcattagccactatgctcaacttgttgtatatgcttttatgcagttttcttttgttctgttatgttcatgaggttcttctaacattttaaatatggccatagtttatcttcttctagaagctttaataattttaggtgttacttttaggtgttttattgttttgagttaatttttatataaggtgatcaaattttgagtaaaggtatttttccccccatagggatgtccaattgttccagcaccatttgttgtaatttaattaatcttatgcagattgtaaatcagatgcatgttacagaccatataaaccatagatgggtctatttctggattctctattctgttccatcagtctgttaatatatgtctgtccattctccagttcacacactgtgtgggcaattatcattttgcagcaaatctagaaatcaggtagtacggtttgttctgctctttcaaaattgtttggctgttctagttagttcacctttgcatataaattttaaaattcgtttgtcagtttttacaaaaatccttctggggttttgattagaattgttgaatgtaggtgtaaatctagggagaaattacatcttaacaataattatgtcttccagttcatgaatatacatgtctgtatttatttagattgttaatttctttaattattgttttatatttttcagcgtaggaatattgtacatatttcctaaggtttataatgaagtattccatgttttggggtgcttttacaaatggtgatttaaaaatatgcaatttcaagtattcattgctactgtatagataagattgatctttgtatattgcctatgtgtgctgtaactttgctaaaattatttattctagtagctttttttttattcggggggaggtttaatgaaaaaaattatgttttcaatgtagtgcatctttatatatatatatatatatatatatatatatatatatataaaatggaatacaattcagccataaaaaagaatggaatcatgtcttttgcagcaacatggatagaactaggggtcgttatcctaaatgaaataaattagaaatagaaagccaaatactgcatgtggtcacttataaattggagctaaacaatggaaacatatggacatacagaatgaaataaaggtgggaggatgatgagggttgaaaaaatacctattggatacagtccagtactcactcttcggtttatgggtgcactaaaagcccaaatttcaccactacacaatatatgcatgtgagaaatctgcacttgtacccccaaatatataaacattttaaaagatttaaattacattttctgtgagtagaaacagtttcatttcattatttgaagtcatgccttttctgtttcttgcccaattgccctggctagggactttcagttagttgttgaatggaagtggtgaacatgaacatttttgcgctgttcccaatattaagagaaaacattgagtcttttgccattaagtgtaatgttagaagtaaggttattgaacatgctctttattaagctgagcaagtttccttcttttcattagttttctgggaggtttaatcatgaaagtgtgttgaattttgtcaattgcctttagacataagttggtatgataataagacttttgttctacagctggttcatatggtaggtaacactggttaatttttaaatgttgtatcagccttgcattcccaagataaaccccacttggttgtgttgtactactccttttgtgtgttattggatttaatttgccagtagtttgttgaggatttttgcatttgtgtcatgaggtatactaaactgtggttttcttttttggtaatatatttgactagatttgttatcagtgcagtgctggcctcataaaaggaattgatgagttccttcctctcttatattctggaagaatttgtatggaattggtattattatttaaatgtttggtacagtttgccagtgaagccatctggacctggaattttctttgttagaaggctttaatctacaaattttattcttgttaattgacagtttgcatctcttagaaaattggtccatttaatctcattttaatgtctgtaagtactgtggtattgtttccctctcattcatgatatttataattaatgtcttatttcttttttttcttcttggtaagtctgaatagagtttgttgtgatttttttttcacaaaagaattagcttttggtttcactgagattttctctattggttttctgctctcaattatattgacttctgctctttattattttactacttttgcttggcttgggttaagtttgctcttctctttctatttccctaaagttaaagattcagttgttgagttgagatcttttgtttttttctaatatgaacatccaatttcaaagtactgcttaagttgcattctacaaattttgatatattgtgttttcattttcattcaagatattttctaatgtatctagtaatttttttgacgcatggtttatttagaaatgtgttatttaatttttaaatatttggatattttttctaggcctttctgttattgtcttttagtttatttccttgtgatctgtgaacatgttttgtgtaacttaaattcatctaaatttgttgaggtttgttttatgtgctagaaatatggtatatcttggttaatgctctgcacatttcaaaaatatgtgtattctgctattattaggtgaagtgttctatagttgtcaattaggttaatttggctaacagtattgtacaagttctctctattcttactgattttctgtcttctttttcagtaaattattagagggatactgaaactttgagcataattgtaggtttgtctatttctcctttcacttgtatggtttttgttttaatgtattttgaagccatactgttaagtgcacatacattaggattgttatatcatcttaaccccatattcaattccttccttattacataatatgattctttaactctgaaaatattcttgttctgaattttagataatattaatttaactttcttttattagtttacaaagtatttttccagccttttgtttttagtctatcaatgtctatataattgaagtagcttgcttttagacagatacgtctttcattttatccaatttgaccatctgtattttaatttgtgtgtttacactatttacatttgatgtgattattgatatagttggattgaaattcacaatcagcttttgttacttttccatctgctatatttttctcttcctgcctttctttgaattaaatgtttttcacaattccatctcatttacactatttgtttattatttatactcttgattttaatgttagtattaccctttgatttgcaatatacacctttaattaactagagtttaccttcaaatactattatatcactgtctgagtagtttcaggaccttacaattgttactctcaatttacttaccatcttttcgtgttcttgttgtcattcattttacttatatatattctataaatacacagcacattgatactaattttgctttagaatgttatcttttagagcaattaaaaataatgagaaagctaattcatttctgctttttcagcactttatttttttgtataaatccacctttgtgtctgataccgtattccttctgcttgaagagctcccttcaatatttcttcaattctgtcctgaaacagtttttaattctccttcatttgaaaactatttttaccaagtagagaattgtgttggcctttttccttttatcacttttaagatgtcacttcattgttttctcacttgcatagtttctgacaagaagtctgctgtcaatgtctttcttgctttcaatgcagtatgaatttttgttttctgactgatctcaaacttttatcctttgtctcttttctaacagcttgaagctatgtttattagggtttttagttttagttttctggttttagttttagtgtttgtatatatcctgtttgtcagtcccttaatttcttggctcttctatcttcagttggttgtttattctttagaagatagccaatatctcttcaatttttattttgttttggtggtttgttgccttcattcttttatattttctctttggagttctaactacatacaggcttaatatttttctataattctttgatgctctgttctcttacttttcactctttctataaatttctattgacctatctttaagtttactaattctttccccagttgagtctgcttatgagcctattcaaagtattcttcttctctgttactatgattttcatttctagcattttcattttattttcataagacagaatgagaaatattctcatatgacagtctctatatctttgagatcatgcaaattttcttcctttttcactagagccttaaacattaatcatagttattttaaattccctatctgatcaatccaacatctgtcttatttctgagtctatttctgtttgttgctttgtctcttgacagtgtgttgttatttttacttcttggtatgccaggtaagtttttgttaaaagccagacatattatataggataataaagataggctaatatatttcacacctgtaaatgaacatgccttttcttttgttaggcctttagtgtggggtgtttgtgtcaatcttgtcagaagttggccttgatttgaattttttgttgttgttgttgctgtgattccccttagtgcaccacagatttcaaatatctctaatgttactttgtctttgtggtgaggagtggttttccaaaaggactttctcagtatttgctccaccctcagatttagatcttctttttgtgcctgtaccacagagacaacttctttttttgtctgtctcccaaattttgcactgttggtgggaatgtaaattagttttgtggttgaacttgattgctgttactttttacttgatgcttttgaggcagagggacattttctgctgttaccttcagttttagagaggcagtgtggctgtgagtctccgaagcaggctgtttcagtgatcctgcctctccccgggactaaaatcacttcttattcttttcccctacctatgatgagttatcactggtgccctaagagccacaagactcactgttattttcctggggctgaagacctttattccaaagggacaatccgggagaagtatatgggcagggcattaagcctttcccagagctgctgctgttccgctcctgaagcctgcaccacaacagatactttatcagtactcttttttgctttttattttattctattttactttaagttccaggatacatgtgcagaacatgcaggtttgttacacaggtatatgtgtgccctggcggtttgctgcacctatcaacccgttgtctagttttaagccccacatacattagctatttgtcctgatggtctccctccctttgcccccatcccccaacaggctcagatgtatgttgtgcttctccctgtgtccatgtgatctcattgttaaaactcccacttataagtgagaacatgcagtgtttggttttctgttcctgtgttagtttgctgaggatgatggcttccagcttcatccatgtcactgcaaaggacatgacctcattcctttttatggctgcatagtattccatggtgtacatgtaccacattttctttatccagtctattattgatggacatttgggttggttccatgtctttgctattgaaaaatagtgctgcagtaaacatacaggtacatgtgtctttatagtagaatgatttatattcctttggatatatatccagtaatgagattattggatcaaatggtatttctggttctagatccttgaggaatcaccacactgtcttccacaatggctgaactaatttacattcccaacaacagtgtaaaaatgttcctatttctccacagcctggccagcatatattgtttcttgactttttaataatcgccattctgactgtcatgagatggcatctcattgtgattttgatttgcatttatctaatgatcagtgtcattgagctttttttcatgtttgttgactacataaatgtcttcttttgagaagtgtctgttcatatcctttgcccactttttgataaagttgtttggttttttcttataaatttgttaagttcctctagattctggatgttagacgtttgtcagatggatagattgcaaaaattttctccctttctgtaggttgcctgttcactctgatgatagtttattttgctgtggagaagctctttagtttaattagatctcatttgtcaatgttagcttttgttgcagttgcttttggcattttcctcatgaaatctttgcccatgcctatgtcctgaatggtattgtgtaagttttcttctagggcttttatggttttgggttttatatttaagtatttaatccatcttgaattaatttttgtgtaagatgtgaggaaggggtccagtttcagttttctgcatatggctagccagttttcccagcaccatttattaaataaggaaccctttccccattgcttgtttttgtcaggtttgttgaagatcagatggttgtagatgtgtggtgtaaattctgaggtctctgctctgttccattggtctatcagtactcttattctgcctcaggtctttcgtgtgagcatctgctgagatctgaggaaaagagtataaattaaattccgcttctatctgcactgcccaaagattctgtgttttaatactaccctacaactagtctcttgcaactggttaataactgtagttttttttttctgttaccaatagtatggcattcagaggccttaaggcagtaaggcatctgccttagtgttctgcaagtgttcacatcctgtctctcctcagaggcatctatctttccttagatttcaggttacagtagtttccccaactcccacttatcagtagttttgccttctgcagtctcagttacccatggtcaaccacagtccaaaaataggtgactacattacaatagtcatgtagagactattgtctctctacaaagagagagaaagagagagagagagagagggagaccacatacatgtaacttttattacaggatattgctataattgttctacgttattattagttattgctattaatcttttttgtgtctaatttataaattatactttatcataagtatgtatgtataggaaaaaacagtatgtataggggttaggttgtatccacagtttcagtatctactggtggtcttggaaggtatcttccacggataaaaggacactacggtagttggttgttctgcagcctcagttctctatggattcaaaaccagttttagatttgcacactgtctggcttgttttaaattattgtatgggtgggagtggtgctcctttcattttctccatcttgtacagaagccataattattttcaattctatataatttttgattgaatgaaaaataccataatttttttgttctattagtagacatttgaattatttatggttaggttcatgacaacaaggaatgcttctatgagcacatgtcttttggtgtacatatataaaatatttctcaagggtatagatgtaggaatggaattcattaattgtaggagaatacatacgacacacacacatgtatgagttatagggtatatatatatgtgcatataatgatttcagtaaattattgatataaaaattttcaatgaagtataactcatagaaaagtgtacctatcttaagtggccataggatatcatttagactgtaacataagagaactatagatattcacatccccaagcattaactgagaacctgttatacagtgggcatttaggaaatgaaaagtgaaggaaaagttactgaccttaggggtcttgaaagcgagaaaatgattaagtgctgtatacacacacacacacacacacacacacacacacacgcacacacgctcaaagagtagggagagaaaaattatgattggggaaatcaataaaagcatattggagaagacatcatttgatattaacctttaagtatagcagtgtagatagtgcgtaagaattggattatagaacttagtcattatgttaggaaagaaacctatggccttgttttatagcaattactggggatatccaggtcttttgcactggaagaaataatcttagaaccatttattaaggacagacccttacagatcatggggtccaaaactgtcttggggtcgaaaactttctcatcttatagatgaggaaactgaggcttagggaagggaagggacttgcctggggtaaatttttgctagtaaatgtacttaatgagatctctcagttacactgaaacgtttgagtattggaacattgtgcttttgttgttttctttttctttaaatccttaaaaaagttgtggatacatagtagatgtatatatttatggggtacataagatgttttgatatagacatgcaatgcataataatcacatcacggagaatggggtatccatctcccttcaagcatttgtcctttgtgttgcagatcattagaatattgtcttcatcattcttttattccccaccaaagtttttgtaaggtagtaagaggatctttgtggaaagaattcttattcccttacgttcctcctggtctgttcctaggtcaaggttgagtacgtttatagatattctataaatatattttattttcaacattaagtgtagttcatatagttgatgatctaagcaataagaaataaagtaaaatctggataattttggttactctgcttttcctctgtgtgtttcaactacaaaattcctcactacaatgctccccaattccttttattggtgcttgcagtgccagtgggcaaactgaattcttcatgcaaccaaagaattccaaaaacgtatttcttgcagctagcataaatctccagttccacaatggtagcagtggtggattttacccaatgttttaatgatgaatgtaatcagaacataaaaagatctaaatgcatactttgaaggaatttgcaaaaatgactagaagaactgaaaaaagcacaattcagtttgtttctttagcatctgtgtttatctttccccttctcttgtgcatattgaggatgttttaaagattatatttttaaaaccaaataaatagtttccaaaatgttcactgatggggtaaattagcgttctctttgtagatgtaattattaaataaattcaaaggactaaccctagaatgacatttttccctcattcctgggtaatttttgagatttcccctcatgcccaggagctaattatactctctcactctccctctctctctctctctctctcgctgcagctttctgtatgtgtgtgtgtgtattatatctaagaaattttactccaaacatctaacattctgggtacgggtttgatttggggaaaaaattacacttttttttttatcctttagcttttctccttaaaaagtatcagtgagggcagggaaagggaaggagaatggacccaaactaataaaaggattgatcagtgattatgaacaaaatatagcttctgtatttccactcactcagtatgaagtttgctattattttccccaattcctggagccagttattgcagcaaatttagcatttggagcttatagactcatgctagacagacacatatagaatttacgaatcgaattagaaaaatggtctttgaataatataaattgtactccatgtatatttttatatatgaatgaacctactggactccagtgagattagcaaataccttagctatttcattgcaataaaaaccatttttcagtcactcatgtccctctgggttcttcagtgatattatttgatgtatgctttattctgtgccatttattgtactgagtattttgcatgaatgatcttatgtaatcatcagtaatctgttaaatcagtatcattattattcttgtttcattgatattgaaatataaaagtaggttatcataaattaaaaggctacgggtagtgataaaattttattccaggtagtatctccagaatatgaattcttaatcactactcgtgtttattcattccacatgtcactgaatgcctactatgtctagcaaagttctagattctcttgtagttgcattactcagttattggctagataaccctaaacactgcagaaagctgcactctgcccccttgggattgcctggctccataagattattaccgttgctgagtttggggacccacttgagcaaatctagcatacttaaaaggaagtttttattctggagaagttttgttaacaaaacatctattggctgggcagagtggctcataactgtaatctcagcacttcgggatgccaaagtgggcaaatcacctgaggtcagaagtttgagaccagcctggccaacatggtgaaaccctgtctctactaaaaacacaaaaaaattaggtaggtatggtggtgcacgcctgtaatcccagctattcaggaggctgaggcaggacaatcacttgaaccggggagacagaggttgcagtgagccgagattgtgccactgccctccagcctgggcaacaaagtgagactctatctcaaaacacaaacatacacacatacatacagacccacacacacatacagacacacacacacacgtctatttagcatctgtcccaggcagtgcttctcaatagcatgttaatagatgctaaaggacctttagttaggaggtcaactggtctacctctgtcacttagtagacaagaaggttgccctaaaatatacactaagacagtatgcattacaaaaaagccacaataaggacatagcttaggagaaatgttatgatctctcttcaccagtctccttatatgacactggttcaattcagaagtagaggtgaagatagttaatatcctaggaataaatgttaaatctcccttcccctttcctcacagtattatagtcaattctcataaggaaatggccctaagttacaacattaagcttttctattcacttctaataactgaaattccgcccaactgcctcctcacttgaattccatgtactttttttccaaataaattaaatgactttctctaagtcaaatgctattaaaattcttgttgttcctcaaactctgctttcttgtagtatcaggtttattgtgacttgaatgagacttatttgtaaatggatgtattttccattccatcttgctcttgcatacacacacatacactgaaattcagacttttctgctagctcttagaaaacaaaagcaatgtgtgattcatgtgtcacccactgtgggaagttggatgttgcattgcatttgtctctcagtcttaaaagtcaatatggcaaagtcattagcggcagagcccagaagatatccctgcccatgagctgtggagatctggacaagttactttacccaactccaagactcagtgaatgctcttatccgtaaaatggggacaatgataatatgtcttcctccctttgggtatttgatgattaaatgagaaaacacgtcacacagtcaattcagtgcttcgcgcacaataaaagcttaataaatactagttatgattatgtttagccaacatgtgttggcatctgacactaaataaatacttgtccaatggaaatgaccagaatttagtgcccctaacacttcactgtagtatttgccatatggataagcaatctttattatgctatttggatttagttccaaagctaaccccacctccttatattgaagccagctcctaggccacctggataacttttctggcatttcaatgaacacaccaatacaatacaagcataattagactttctggattttagatctattctcaagtatatattgtatagagaaccaagatgttcaaggactgtagagccagttataggtttggttttaaagcacttcatcttagactcatttcctttctggctgatgttagttaaaataatataagcctgggcttaagattgtatctctgagtgagacaaaataatagatgattctatctccctttagaaaaaaaagaaaaaaaaaaagcagcagcagcagtaattgactcttacgcttaggcaagaactccacaatggatttgttggggaaaaaaaaaatgttttcctgcttgtatgtgttggtttagattttctgttgtatgtgtgttgtgaaagaagactttggataattattgcgattttccaagcagctggtcttccaatggcattgttacagggtcagtctattttcctttaatctgaccataatgtcatagaacactggctgtttctttggcaactgttcagggaagactagctgttttctctacctcaagccaatggtggactgcaggcaggttctcctgcaagccacagggaagcagttttcattactggggtctttgtatcaacaaatcacttatttcactgtgattctgttgagacaggatccgaaagtaaatttcataagaaaaaaatgattatacatcaagctcaggtgactttaaaatttttcctttacattgagtaaagtttctggccacttttgaccttttttttcaaatgacattattgatatgaaatcagaaactataactgataaactacaaactgctgtatagacacttttctacacaatggtcattgcttttattctttatctaagcctgaattgtaaggcttccttctctttttttttttttttttttttgagatggagtctcgctctgtcgcccaggctggagtgcggtggcacgatcttggctcactccaagctccacctcccgggttcacaccattctcatgcctcagcctcccgagtagctgggactacaggcgcccaccaccatgcccggctaattttttatatttttagtagagacggagtttcaccatgttagccaggatggtcttgatctcctgacctggtgatccacctgccttggcctcccaaagtgctgggattacaggcgtgagccaccatgcccggcctgaatgattccttctcatcttctgggaggtttttctgacttgctttctcaattccactctcttaggcagagcttatacctcccttcatgtatgttacatgtacatgtattgagtcagtgcatcctcctaatgaaacttttcctgagatctctcttatttactttcttccttttctgaaattctctgctatttagattcagtgccaaagaaattgacatttttatttacttgctgaggaataaacagaactcgaaaggatttgggaacccaagaccaagttttatgaaataactaatcttgtcttcctaaatactataaaaatcttatataatccctaatacttagcatagtgctaagcaccgaataggaatacaagaaatattgcaatgatctgaattgcttacaaaatattgacaacaacttcttcattggtaaagaaaagctgcttttgacctttttttcttcctcaagagtaagtagtgagaagcataaagtacccaagagtttctttgcctttttgattgttgcatggaaacaagtatttgcaaataattaagatgggaaaatttggctccttgaaaaggcaggactgctttcagatatatttgaaatgaacttatacagaagccaacatggttatcagagcaattgggtctatttcctatcatctcttcatgatatcttgtaaaaatgccctgtgttgagagcactggtgatcatagcagtggggttggagtagaatctggtgcgtttcttcctctacagatctcctaatagcacttgccctgttttcacagagccttatcaaagtttgatgtagactccagtgtgtagtagtgggcagtgacctaccagatgacctctttgaacaagagctagtttgagccagtgtatagctctgaatcgatggaagatccattttcaaatttcaaaagggctgttaaaacacttagttctgtattatagagatacacaaatggatataacaaactggatgtctcttctgcagctgtttcaattcgtatgccatgttttctatccttcttgctcctggcaattttctttcctgaagcatatcacaccttcttacatttgacaagcattttcacagctactgccactccctgctgccaaacaaaacccagccctgtttgaattcttgagggctgagggatggagaggagacctgtttgactttgaaatggttttaacgtcactttgtatacagaacaaaaatggaaaaccagatcctgtgtttgtctaaaaactaaaatttcaaaacctaacctgaggtggagaaacagatactacagggcaaggaaatgtctgggctcaccgcaaaggaatgcagcaagggaaccacctgcagacacctgtttaagagtttacgtttttgttcttccacacgattattatcttagtatctcaactggctatacatgcttttaggaaagttgcagggatcatattctaaggcgtatcaaatatgttcagagtgcaagcatgagcagaatctctcctctctgctagtgaggtcctgtaggtctacaagttactaacttcaggcttacagaatgttagaagtaacgggtgcatatcctgtaatcaatcccggtattgagcaaacaggcacaaatgacacccagcaagaaaaatgacttgctcaagacaccacagcaagttcatggttttctgaactgaattccaagtttcataacttctaattaatcctcctttttttcccccagtacagctaatatgctttttgtgaataataacatataataggtgtaatctgtcagaactatttaatagttgatagtatgtatcctcagtttattgaggttcaagctcttctgagtattataatactttctattggtattttctctcttgagctattccctaccttgaatctttcagactagagatttcagaagattacgtagtgtctgtgacttcaactacacatggatagtccacaggactctggactttcacggttccatgtcagttggacaggtgttactctaaggccctgcaaaaatataaagtagtttgagaatcactctcctgttaatcttcagtaaaattctgagctatttatatgtgagattgagaggcagcttggtaggatggaaagagtttagactttgtagttctactgccccaggtttgtatcccagctttatttcctaacagtgtagccttgggcaaattgcttaacctctccgaggctcagtttcttcaaataaaaaaatggaataagccttcccttgcagagttgttaatattatatgaacgttatatatgtgaagtgcccaactccttgcaaatacctaatatacaccagcttccttcccaggcttttgctggtcagatctggtttccacttaactttggctgttggaagataagataatttattatgaagataattgtctggtaattgtcatgagaattcagttgatgataattgaatgatttgtttacctttctgtctaaagagttgcaactcatgggggtcgtgtgtgtgtgtgtgtgtgtgtgtgtgtgtgtgtgtgtgtgtgttacttacaatgtttttgccatctcttcctgtatgacagtatttgattagtcaggtcttaaaatgctaaacactttatccttttcttttaatttcaattttagattttgggggtacatatgcaggttcgttacaagattgtattgtgtgatgctgaagtttgggcttctatcgatcccatcatccacactgtgaacataatacctgacaggaagtgtctcagccctttctccccctccttccttccttccttttggattcccaagtgtctgttattcccatctttacatccatgtgtacccaagttttcgctataaagaaaaaaaaaaccctgaatacctattgcatgcctcactgtagaggctacaggattcacaaaacaaggccccataccctgggcattgataaaaggaaggaaaaatgtagctttcaaaaaaatgaaaattgactttgttgaagggtattgtaatagaatcataaaactgagtgaggaaggaatgtattctaactacacaattagggaatactttgtggaggaggtgggttctggattttgaagacggagtatgatctttgacagatggtgttcggtgggaatgaggaaaaagaaaggtgagcttcagccagggattggaggtggaaaaaatgaacacatgggtggcgatgattcaggcagaggggcaggaatgtgaaggaactaagacataaaagtagaaagacagtttaggcctggtttatgagggggtctttgaatggcaaactcacctttggtggtccacgggaaggtttgttagaactgcaggagtgtgcccaaacctatatgtcaagccactaactgccagccatcagtttgaaaaccgaagcaattaagatcgctgtccatcttacctgaaagggaagctttgcactctaacttgaagtagcctagaaatttcagaaggttacatagtgtctgtgacttcagctacacatggataatccacaagactctggacttattttcactgttgtgtaatagggttagttttgtttttagcagattctcccaaggaagtgtggtaatcacatttctcaaaccattacattaactgctgttagcaataaattattgcttatgtgctaaaagtcaaaaaaagcttttcccctttggaacttctttactatactccctgatatgttttgctgtcctagaaactggtgtttgtgtgtgtgtgtttgtgtgtgtatgtgtgtgtgtgtgtgttcaattgagtcaagaacagaggagaggagactcaggctgaaaatgtcaagttattttgagtcaaatatttgtacatttactttggaagttatcactaaaaaacaaaaagtgtgtgtctctttgtgtctgtatctgtgtgaatctgtgtgcactcattggtataaaaggaggaatactcttctcaaaagtacacaccaatgttcttgtccaaaagcctactttcatatatgtgaatgtgaattcctacattctgtgtgtttgcttctcctcactatagcccatttctaacatatcccaacttaatttcctaaatctgtcctatctacataccacaaagtgcttaactgagaaattaacttctgtgttacagataaatggaagttagattaaaaggataatacattttcatttttagtgttcttaaataatcctttttattgtaaataaatataacgttaactccgataagtccagactacttcactgagttcaccaccgaaatgttttcacaaaatcagcatcgttataccttggcttttataagaagttagtatacgaaacttgtataggaaaatgtctctgtattatctatgaaactgttaataaatatgttttccatcatgtccatgtcatcgtttacatatacgagatgatttcctcttagaattcattctaaacttctttaacagaaattatctttttttgattcatattctcccttttgtcctggttaccagacagcacaagtgaccatcatgtttagatttctgatacagttctctcttccattcctctctgtagcctctgatttttttttcagacttcagttggaaaaatcctaatgaatgtaacttttagttacaggttgaattcttttgaatgtgtatatttaaaataagtaatgcacatagttaaaaagaaacatgtttttaaaacagtggttctcaattatagctaaatatttagaattatctggatggttttaaaactctgatacccaggcagcatcctagatcactcaaatcagaatatctgggtttggtcacggacatcagtattttttttttaaagctgcccaatgtcattccaatgttaagattcattgttttagatattctttattatgatgttcatcatttttacagaaacacatttccaaaaggataaatttcaaaatcacctgtaaacccataatttattataagtcactcttaacacctaaaaatagctaacctgctaacctttttcttttgctttttccttcttcttttaaactaaaattacaataatatatgtgcatatatagtgaatgtattcatttatatattagacacaatttacatatttatgcttatatatatatggcatacatgtacacgttacaatatgtgtatttgttttattccaaatctgttttattctcagagacattttcccatatcttcccagatatattttctgagaacctggtttttaatgcttgtataacattaatacttgtagttagaccattttttttactcattcttctattcttacatattaatgttgcagacaacatccttaaacaacttttgtgtgactaatccaatttttttccttgggaataaattatgatctattgatttatttctatgtgggctgaattttgtccataagaatgaaaatggtagccccctaagatgctgtttgctccctgatatctcatttttctctagaatacgaaggaatggctgttttctgctcttcctaaagattcaggatgtaataatatactgtcacaggtttcagaagcatgggaccttggcaccgaaagggtctctactagctaagttgtcttggaaatgagtgggtccacttcctcttctgatacaggaagaacagggaggtcattaaatgatgacggggctctttgaagtgaaatgaagcaacattggagggtgtagcatgtaaaaactctcttctcggatacaaaaaaaattgagctacttgggctaggagaagtgagcctggatttggaggcttaaggtttcaggaaggtctgagacaaacttaagaagaaatgcatcaagagggttggaagggacagacgattgatgagagcactgaaattccagtgtgatttgggtcacccgtgtgacatggcatatatttatgggatacctggaaaataagggagaaacaagacatctatctctgtcacactttggggaagtatacgattaagttccacactctgtggtggaaagaatgtcctggaggcccccagtctttctcactgtgatgccatgctcatttgataacctcataaacacatttctgttcttattgccttacccattctgatgcactgatcattttttaggccatgtgaacagggcagagcttgtcattatgcctgggacatagtgggcattcagtaggtgtttgttgaatggaagaagcaggcacaatcacagctttcccttctggtgatctgctttatgatacaatttccaggaatgcattgtgtctaaaattggggaccatatgtacaggaaattctttcttatgtcagtgtgaaatccctccaaagtaaatccccctttatggttttttattggtgtttattcttttttaatacagaaaactgtaaactttttattagggcaggtttttttgtgcaaaagccttgtcatgggctagatgacatttcttttcctgtagagatacttggacattttacaattcaattacttccttccaaaagccatatttagaattccagccaatctgtgagccagaaaggagtgagccagtataataatcaaggtaatgtggcaagaaggtgtgaaatttcttagcctttctagaagagatgggtgaaaataaatgttttcagggtcagtaaataactttcccctagtagccagacagaaagcatcttactttgctcaagctggacctttgtcatttgaaggatctcctcctaatgccatctaagcttgagaggttcatatggctgcagcatggtttatcttgctgtttaaacattgtgtccattcaagctccattgtagacctttcttttaaagagagttcaccctgggatattaaataaaatggaatttggatggaaagttggcatcccagttcggaaccaatttttattgggcacagacttggggggagcagaaaaaaacaaacacaaagtctatgttgtaaatgataataaaaaaagaataagtaaaacaaatgaaaatgtttcgttttactaaggcttttttgcattcccatgacttcaaaatacttttgcattttatggcaatctataactgctttagtatagacagacaaagaacaaataaagttacataaatgcagagaataacagaagaaatatgtagaatgacagtggtcagttggtaaagattctattggaggttttggaggtttttgcataatttgtattagtccaaaaatattatgaaattaataataaattttaaagtgtatacgtttcttaatgtcttcaacttgccaattctgttgttagtcataaacttttatattcctccctatgtttatctttcccatctctccggcttgcttttgttattactgttgctgattctcaaaaccattagatcttaagtatattccactaccaaagtcattaattttaaggagaaaatgggaagttagaagccatgattttacttataataatccatttgtctcatactttcatctcaaaaatatgtatttaagtagaaagagagccagaaaaataaccgagagagttatattgtaattctggctctactgtatactagtagtgtgattttaagttggtaatttatcctctgtagcctcagcattgtcttctgaaaagtacgttcactcattcgggtggcgtgagatttaaaagaaatgactcctggtagagtagaatgaagtagaatgtagaatgcggtagcaatagaatgaagacatgagtattgatgatgtagcactggactgtgctatatgatagttaccagccacatgtggcttctttaaatttgagctaattagaattaaattaagttaaaaatttagctccttagtcatacgagccacatttcaaatgctcaagaaccatttatggctagtggctacaatattggacagtgcagaagaactattccattattgcagataatcctgttgaatagcacagacctagaatgacagctccgtgtagggcactgggaattgctgtttggggatggtatcaccttgagttggtctgtgacctgctgggagtaatgcagttctcaaagaactctaactctcctttaaccgcgtgcaaaattgtgaacctgggatgcgtgagggagtggttattttgtgctgaatggtatgtcagctacatcaccacagatgtgagatcagcagacttgcttattctgagtgccgtcagaatcgttaagtaccatatgtccagtgtcatctttggcacatttatctggcttcatctgagttccgaagtgaaatctcacagccgccttcataaatttagccatcaaagaccaaggtgatgatgacataccaagctttagaatcctcaagtagggtgggatattggtgctgggaatgacgaatgaagggacatctgagaatcatgctgcttttatggattagcagaaattcatcttacgtgaccaagagcagctgcataatggctagaaaacatttgccctttctgcttatgttttggttatcccaacacattctatgtgcaatgtctgagtttgaaagttctttttaaactataaaatcatttcccaaagttaggactgattatgaatatcatcaatgattgtttttaaatgtcattatggtaaagtcatagaatagtgaccatctgtgctgcctttgtctttgtataggtgcagtagtcccagcctttctttctctctctctctctctctctctctgtgtgtgtgtgtgtgtgtgtgtgtgtgtgtgtgtgtgtgtgtgtaggatcactggagtatggtggtgaagaaagctgtcacagcacagaagttcagaaggaggtactgtgaaggtcccaaagcattgagcttagctagttctgaaagcactaaggttaactagtcaactcgagagttgggtgtatatactgctaaggaagggttcaacccagggggctcttgctctcccaagacaggaaacatgtatctgaagtgtgaatctattgctattatcctcagtttggcaggcgacagggttctgagagtgagagagtaatggaatgtgtatgtctctgctcttgaagataccaggggcacctcgaaaactcccctccccagcccagggtcaccacagccttaaccgactgcctcctttgcaaacctttaccatgggtacctagaaaaagacatacacacacacatttcagcttatggtttttgttcgtttgtttttgttttttgtttgtttgtttgttttgccagatacttaagatttaagggcaatcttaagggaaatctcttctcccatcttgactgaggcacagagatgtcctgttcccatgctgttgatgctgacagacgtaggacacgtttttttctccgtgtgccaccacactcaagcagaatgtataagatattttctgtctaccaaggatacctggtgacataatcatacctagcctttctttcctccctccgccccctcagcctctcaccctgccctcccatgggtctttatgtgtgctactctatgtagagtacaactcataccggatagcctgttacttattttggttcaggagcagctgcagaggatgaactggagaggacagtctacttgcaaacacttgtagactctccagtggacaggttacctctaaagaaagagaagcctacgctttcctactcactgaagttttttaccatttgcaagtggatccaatatatgtttgttttgggtgaggggctaacaaaatgctctgcggtttctgcaggtttccttataggagatcctgttatcctcgtgtcgattcttgccccattagctttcagcagtaaatagttgagggtctcatctggaaagttctattattagtaccacatggtcagtacattttaagatagacattttaataggcagaaaactgtatacaaggagagatgtgcaatgcagaataactatcaaatgatatctagatatcttagattgctactctaggccatccatggtcttaccccatgggttcctctaactcccttcatcctcccttaacattagctgtaggttttctcatcactgtctttgctcacgttattttctctgccttgaattccctccctcaagctccccacaccagcaccaccagcatgtaccctgttctttaagactcaactcaaatacctctgcctcaaaaacatattgccctaattgtcctggctgaaagtgacagtcatctctggaccccccccactctcatctctgcacctctctatgtcatccttaatcactttctgacttgtgttcttacatagttgaatatgccttatctctactacttgatattaaacttcataatgataataagatcctatcttatcttctcctgtctcttccctgatcaggcctagggtagttcctcccacactgtactgttaagagaatacataatgaaaaagtaaatgaataaatggcagaaaccttatgtggaatgctggtgcaaacagttcctttgactgggggcttttaaaaagagactgattgtataggagatctgagcaattttcatattaatggaatggattattagagctggcatgaacatcaaaagaatctagccacaaccacctctcaggtcatcttcattttcaaatggggaatctaagatttagataggaccattccagatcacatagtgagtgattaatagacctaggactcatacctcatctgacatccaacaccacatgttcttttgaaataaggctggaataatagtgagacacacatattagacacatgattgtgagaagacagttttccaccccacagcacatgaccccatacgtttaagtccctgcctatacaaatagtacagacaaagtaacagcaactttagagggaaacatgactatttccatcatatggtgattctacagagcagaatcagaaacctgggtaaagagaaaagtcctactcagtttcattcttgttaaaagacttaatgactggagttcaaactggcggagtcattggcagcattaaagaagtggggttgaagctgggcaacatttccacaacagggagtggaacagagagacagaaaatattgggagtcttgtgccccatcagtagaaggagatgaaggccagagccaaatggtgggggcaggggtagggggaagattcctttctccagcatgtaacagcattatgggagtgaattcagagcttctgtgtgttctgagccaagtgcctgctggaatgtggactgtaaatctctcatcgtcctcttcactgacccacaagcaacccctgctcctcccatctgcttcccgaccacctgcctttcagtttttctttatataaaaaacgttttccattctcctaccttcctctctgtctacctttgtatggtacatctcatccctcttctaaatatttccatctgaccacatttttccctaatgagacaggctcacaataggataaagtgtaacatttattcatttatctgctcagcaaatattattgagcacatactgtgtcctaggcaccactttagttcttgagtggtcagcagtaaagaaaacagacaaaaaaataataccctggtggagtttccattctagtggggacacaataaacaaaataattggcaaattatatagaatattggaaggaagtacatgctgggagagaaataagctgggagggaaaagggagtgctgggggagaaggagctaagagtctcagttccagagttaggcagcctgagctggaattagaaccccagctgcatgcagtggctcatgcctgtaatcccagcactttgggaggccgaggtgggcggatcacctgaggtcaggagtttgagactaccctggccaacatggtgaaacccagtctctactaaaaatacaaaaaaaaaaaaaaattagctgggcatggtggcgggcacctgtaatcctagctacttgggaggctgaggcaggagaattgcttgaactcgggaggtggaggtttcagagagcagagatcacgccattgcactctagcctggcaacaagagcgaaactctgtctcaaaaaaaaaaaaaaaaaaaaaaaaaactcagctgcatccttcccagtcatgtgacctgggcaggttaagagaactccctgagcctcagttttcttgtctgtttatcaagagtcattagggaaactagtatctccttgggttgttgcagggattcaatgagatgacacatgtaacacaatcattacctcgggcctgtctcctataaatatagtgattgtcacgtttgttatttaaacaatattatatattgtgttttaggtattatgtatgtaatatatagtgtgaatatatgtatgcgttatgtatatagcattatctgacttcgtgcctctagtattacatgcttctcaaaatatctatagttttgtcggtatttctttctcctactagattgtgatcttttatcggcaaagaccacctctcgtttatctctataccccccattgtgcccagcacatcagagattttatgtttggctgctgaatgagaaacaaatgggatactgttcttctaagcacaatcatcttatattagcattcatttttggaactcttctctaattcctgtcatttttgtatcacatcagaagaagagctatattccctccaccgcctctcctcgcctattaatcaccataccttcccacctcttacgggaataccgaactaatggtccttgtctcaatgacctgcctatcctttgtcccttcatgggaatcttctcacagatcaagttactatgatctacaaggccagttcccatagcctcgttccacttacacacgatcttaaccatttctgtccagtgggagtcacccactcacctcctaaaacctctatgcatgccccatacccctagtcataatactcttatacaaatgtttaacactttgcagttgaagacccaatgtcatacatcttttcatttgatacttagagtcactgtgtgaggtacaaacttcagatattaccagttgcatgttactaataaggaatcagaagctcagagagggggaatgaaagaatccaagtatatgtggctaaaattggccacgtcgacacctgaaatcctattatctggggcaatatacatactgggtttgaaaaagttcacacttagcagttgaatgacctgagtcctcaccccagcttggctacttactcaccatgtgaccctgaatagtgccttgaagcctcagggtttttttacttctgtaaaacagtaactcttgccctcccggacacatgggatagtttgaagattaaaagatacattggctgggcatggtggctcacatctataatcctagcactttgagagactgaggcaggtggatcacttcagtccaggagtttcagaccagcgtggacaacacagtgaagccccatctcattaaaaaaaaaaaaaagatatattaagaaacttttgaaagtataaatcatctaaatcatcatgtataaatgtaagagatatgaaataagctctgtgaaaatataatggctgatggcgtccctgtgtgaaagatagaaatggacattttatgtaatttccatacacaccaaacaaaacaaaagatctttagaatttccaagcatgagtgaggttttacattgattgtaaagaatatagaatgcggaaactcatttttaattattaaaacttataggctgaaaaaaagagtaagcactatttaaaaaaaaaaaaaaaaggctcaaccaggcgcggtggctctgtaatcccagccctttgggaggctgaggcgggcagatcacgaggtcaggagatcaagaccatcctggctaacacggtgaaacctcgtctctactaaaaaagtacaaaaaattagccaggtgtggtggcacgtgactgtagtcccagttactcggaggctgaggcaggagaatcgcttgaacctgggaggcagaggttgcagtgagccaagattgcaccactgcactccagcctgggcaacagagtgaaactccgtctcaaaaaacaaaaaaaaaaatgcttccccacacccacccccaacgaacgaacaaacacacttaggaaatagggaagaaggttatgttttgggacaactttctatacactgagaaaatccaagaggtctccacatctacctataaaattcagtgatgctcagagctgacatgtcaatttttcctattacatagtaagaagctcagcattatgggccgagtttattggacactgcagaaattcatttacattgtgtgcttaccctggattgttgttgagtccagctgactgttgcttcacaaattaactgtcctttgagacttggaaatattgaaattgcatagagtttttgtgaaatctcaatcctgtagtattgtgtatattacaacaggtgctcaatagacttctggattattaaattgagtaatatttgtagcaaagatctgtaggctgaattataaagctaatctgtggggggatgccaagatttctctatcattctgctatgtttgccatggtctaccaggagatggcgcctggtaagagttccatattttaatgtattctggtccaaatcactggagttggcaaagatggagaaggaggaactgagcagttcatccccaaagacatgatgacaccactataagtgtgaagccagcaagagtgcaaagactgagagcagcgtggtcatacctagacatttatctggagagcaaaatcaagcactggggctcaaagggttcagtcccagcagttaggagagagaggagtctcctaggagtagttgccccaacagctgctagaaagtcctgatcctttttggtctgagccaaccaggtctcagcccagtcccacttgcctcaatttaaagtgacatttttggtctctagctgggtgcttccccctctgtagcatataacaaggatacactttcaaggcagggagcctggaggacaaggagataaccctgcaggcctggccacccaggctctttccggtgttccatgtacactgcatagattgagtggacacccaggttaaagagatctctcagtactcttggattttcctttaccttaattttgaaattataatattttagacataacttgtgcaggatcacacagtgagtctataggagaactggatgagaacccaagttttctgactttcaatcagctctctctccctacatgtaccttaacatgtatcataaagatgactgttgccatatgggctaagccctccattttctgagtatgcattaccacctccttccctcagaacaattaacagaggatctcataaagatgtgctatatatgtgtcccatagattttaatgagacttcagtaggtgggaaggtgtagtatttattctgggatattggaagagcaagttggataggaccttaaattttctacatagatacttgtggaggacaggctctagggtgacttccaatgacccctgcctcctggtgtttacatctctgtgtaatacctctccttgagtgcaggtgaatctgtaacttgcttctaatcaatagaagaaggcaaaggtgttggggtgtaacttaccatgattacatgttgtgatatacgagtccatctcagcagatagagagactctccttgacagcttgaggaaataagtgaccatatgagagaagctcatgaggcaaggagctgtgagcaacctttaggagctaaggacagcttccagcagacagccaacaaaaagctaggatcctgactcacatacccacaaggaaatgaattccgccaataatctgaatgtgcctggaaaagattcttccacagccaaccctccagatgagaatgctactcagctgacactttgattgcagcctgtaagactccgagtggaggacccagccagagtcatgcctgggccctcagaaactgtgagatagtaaatgtttgttgttttatgccactgagattgttagccaacaatcaaaacctaatacaataataccctttactgttttctagacagctgctatttagaaaagcctcccacccaataaaagagtcccctttatagttttccaagtaggtggttatcagggttctgcttcaccatcttcagtggcaaggaacttccatttcacagggcaaccatgtgtgtattacagaggcttgcatgttgtcaagttcagctgtggtcttcagcgggagcctaggacatgccagggatttcaaggtaggctggtgaggggttcctggttttcttggtcctgaaccatcccagtgccattctaacagttgcaagtctgcctccttcatgacaaaaggactggaggaaaatgtatctggcaagtcgataacactggatcgtttgctcccagctttaccacttggcatcagtgcaaactttcacccagttaaataacttaatgagccctgctctgcatgcttgcttcacagagttgtgacgatcaagtaagacagcatctatgacagtgtttgttggctgtaagtcagcaaatgattgcaaatgatgattattattaaaataatagtcatttgtcagtaaatatttgtcaaagctggtccacactgagggagacaggctctccagggaaactgctgatgcagagataaagaggagaccagccccagtttggaattgcatcactgattctgaattccccatggtacatttcaggtcttgcttcaggaatttgttttttgttttgtttggtaggaacaagaatcccctagagccagttatgttgtcatcaaacttagttgctaattaggcaccaaagcaaacctatgccagtgagacagagttgaaacttgaattcctttctgcaggtggagcgttggatcctagaggcggtgtatacagcttggctattttgatgcttctgcatgcaagaaggtttaagagaatctgagtaaagcaattagcatccctctgtctgcaggcaaaactggtttggacatgcttctctcttcttgaagggctgttagagccttggcagtgtatctgacgaaagatttcactaagcaaaatgtcttcacttacaaatccagccactttgcactctcagtcagcctcaaattcatttattttctttagagtttccctacaaccacgaaccaccaagaattaaattaatccccaagagcctgagcaattatgaggatgttgaatctatccattcaaggatgtcccagcaaggactgttcattcttttaacgtaaactatttatatgttttgattctcctcatttggaagaaagaaataagttttcatatatgtatttttcagggtgtattttatatatctgtttatattacactgttcacattactattaaagcatccccattttattgtaagtttattttgcctgcttcgggaagaacaagaccaagatcccattattaaaaccaaaatcttccacaaaagtttccttttaaaaacttagattaggaaattttcagtcagccagccaactctatagcctttgatacttggtcctacaaagttttcttcccctttggtctgaatgttttcctttgtctgtgcacactctattctcctgccagcatgataatacatgctgctttgatatcaagtggcgggaacatatagaaatgtgctattggtgctgcaatttgtatctttgttttcatcaaacttattatttaccattttaggatttttttgtttctttttgggtggttttttttttttttttttttttggtgtgttttgtttgatcttggttttggttttccaatctaggcctgaggtccagtgctaatttgatgctagtgtgaactctctgagcctggttccttgacgttccattgggtgactattgcagtggttcagatgtggtgctaccagccttccccaccaaggaagttgcctgctttctcatctttgatcctcttcaccaactaaccacaacacaccagtgaaaattttaatttctccattcagttcctcagtttccgccaccaggtggtgagttcctgcgatacagataacctttttgtcttgttcagtacaacctcagtgcctagcacaaggccttgcagaaagctgacattccttaactctttatttctgaaatgaattaatgttcttaggttccatgtctcgtggaccaaataatgcaatcctagatcttgccatagcatctgggacaccacgtatgatgatttaggtaatcagtgaaaatccatgtcagcagctgccaatttacagatgaattatgtccaatggtttggagatgaatgagttttacagttcatagagcatgacaaaattcatcttagccttccattttatagatgagctaactgatctctgagagaggaacgacctctgaatgtcctgggaagagcttgtggcagaagtaacttctacctagtagtgtattttccttactgcctgttctcatttgataacagacccatatatcaattatttgcatccttcaattaacccacaagaaggcaaatttaatccagtgttagataaaataattattcacagggtcataacactattaaagaataagctatggccaggcgcggtggctcactcctgtaatcctagcattttggaggccgaggggggcagatcacttgaggtcaggagttctagactaccctagccaatatggtgaaaactgtctctactaaaaatacaaaaaaaaaaaaaaaatcagctgggcatggtggcagacgcctgtaatcccagctactcaggagctgtagtcctagcattttgggaggctgaggcgggcggatcacttgactaccctggccaacatggtgaaacctcatcctactaaaaatacaaaaaaaaaaaaaatcagctggtggtggtggcagatgcctgtaatcctagctactcgggaggcggaggcaggagaatcactcgaacccgggaggtggaggttacagtgagccaaaattgcaccattgcactccagcctaggtgacagagtgaggctccatctccaaaaaaaataaaaagaatacactatgaggcagtgagatatagggcaagactcatgttaggactgccacagagcagtcagtagtggcaacaagaaaggaacgcccctacgatgtgacaagtctctaccttgatatcaatggaattatgaatgggcagagaggctgtgcccattcttacctaacagggaagctgtccataaataaggtagcaattcctgaatcaaggacaagccttctgcccagtctttatatgtaaagaaacagtagtttcatttgaagggaaaccattataattgtctcagatgtgcatcttgttccagggtacttctttgtatttttgatgaggaaccaaaggctttattatagatcttgtgaatacctgtcagccaggatttagaacaaatgcatttgggcaattttgccttttatttcagataaattttatatgttgtttctgtccagaattgtaggatcatgtttggcttttcaaaactgcaggaaatgtttattttacttttctttaaagaagaagacagtaatgaaaaatgtatcgactgccagcccactgtttttatttctctttgtgtgagctatggcttctccacatcttgagccttaaactctttgatgttgtctttttaagcataacataaaagattattccctttagtctgtaggcttggaggtgggcaaacatgacatattcctgggtattcatatttctataacaataattgatgcaggttttggggctgttgtatttgccgtagccttatatgataaacatttggcattccatgacgtttcagctttgtcaactttccaatcctgtatggagttccctcttattgtttctgtgtgaacaacttgacaagagtggcatccgtggtcagattcttcactctatccctgcaggacttttcattgtgctctgcacacgatggaggctcaatgcatgaatgaatgcatggatgaatttttcagtttgattccgtgagctgcttaattctattagatgcgctccctaggcttttataagacgtttaattggtacatgtttcttatcactttttaatactccataagtgttttgtgttctttgcagtagagtccaaataaatataaattaaaatgtttccaattacagaggaaatattttcagtatcttcccacaaataacactgggtttataaggcttggttcccgggtttcatggtcatgcttggttgactaactttgtgttcatgtggcataagattctaaactgtcagaactacgtgggcttttagagcccatctaaatccttctcactcacagacgagcaagctgacatatttgcctcatttattggcagtgaatgaattaaaatattgtgccttcatcaagatattgtgtgtatattcacaatgttgtttttcataaatatgtagcattactctgttttgtgactgctcctagactggctggttctagggataaagaagagccagagaagaaatctgggcttcccagcagcaccttgggaggccgaggcaggcagatcacaaggtcaggagttcgagaccagcctggccaatatggtgaaacctgtctctactaaaaatacaaaaattagccaggtgtggtggctggcgcctgtggtcccagctactcgggaggctgaggcaggagaattgcttgaacctgggaggtggaagttgcagtgagctgagattgcgccactggactccatcctgggtgacagaatgagactccatctcaaacataataataataataataataataataataataataataatctgtgcttcctgcttaatttctagttttggtattcctactatcaggcccaacctctgtcctttgtgttcacagctaaatttgatttgcgtttggtcagaggatgggagaacagagaacaatagtcaccctcatcagcaactgagaaattcagtctgttctgccaaccttgcttgtatcttttcatataaatcttgaaattgcctctatttcaagtctgatggtcagtgactaattattaaagccattacttgctttttttaaagcctgaaccttgctttccagaatcttttccacctttgagattattttaaatatcatcattactttgagaaaagcaaacttaacaaggatgccttaagaaatataaaggtgtcattgcccaggaggcaagaaagggaggcagaatggtaatgaaatgagacagcccttgctttggttttataagatctgggtctgaatcctggcagtgtgttctttctaactttaggtaattcaggagccctagaaacctcatctctctatctagtgtgggaaaacgtgaaacaactttgggccatagattgctctatgcaaactcaacatatgcaaacttgtcttattaaaaagcctatctctagtggttcctatccctagtcttgtttggttgggtagcttccaattaataacagcttcaaattctggctaatatttgtttagcacttcatggcttacaaagtacttcattattttaacattgtagtattggtaataatatcaaactttctgttattacaataaatgttccttttttactttattattccattactttattactgtttttcagatgtactgtgatctacattttacggatgaaaaaaagattctaggaggataagggactttgtcacaaaagttagcttctaaatgatggggggactcatatgcaccttttgaaactcctaaacccatgttgattccccaaaggctttggtggtcctaaacatttgacataatcagagtctattataaaaaggtatggcttatccagctcctggttcctcactgtctcctctatctcaaaatattctagaaaaaactttactccctgaaaatatacagctttaggataggtgcagctccatttcatactctgattttcattcctcatttgaaaagttgaagcgtaatttcttataagactttagaagttgaagtcaggactggataaagaaaatgtggcacatacacgccatggaatactatgcagccataaaaagggatgagttcatgtccttttcagggacatggatgaagctagaagccatcatcctcagcaaactaacacaggaacagaaaaccaaacaccacatgttctcactcagaagtgagagttgaacaatgaaaacacatggacacagggaggggaacatcacatactgggtggggcctgtcgtgggggtcgggtgcaaggagaaggagaggattaggacaaatatctaatgcatgtggatcttaaaacctagatgacaggttgatgggtggagcaaaccaccatggcacatgtatacctatgtaacaaacctgtacattctgcacatgtatctcaaaagtaaaattttttaaaataagaagaagttgaagtcagggtataggaatcacaatttgcagtgctatctttcacacttcttaccacctgatgaaaatcaccaaatagtatttcttcttttacctaacatctctaggaaagagagaaccctgactgcacctacaagtagggaaaggcatttgagttacgcaaagctgcttttaactctgaaactgtcctacagtgtagcatataaacagggaaaacattttattggtgttttaatagaatcttatctaaatatctggaatcttactgcaagggccgatcattactctaggtagatttcaaggcccacagctccattatgatgtcaacaaggataactgatgtttattctgtagttagagcccccaaggcttcagcaaacattttgctcatcacttgtaggactagcagtaaatgtaatcattgcaagactgagctaacacatctgctaacagggttgttcatttgagtaaacagcaaggtgataaggcgcagggacggaccattggattgagtcagacaggcccgagtacaaaaaccagcctcactacttaaatcttacatagcccattaagagtaagttgcttcactttgggaggctgaggcggacagattacgaagtcaggagatcgagaccatcctggccaacatggttaaacctcatctctattaaaaaaaaaatacaaaaattaactgggcatggtggtgggcgcctgtaatctcagctactcaggaggctgagggaggagaatcccttgaaccagggagtcggaggttgcagtgagccgagatcactccactgcactccagcctggcgacagagtgagactccgtctcaaaaataaaataaaattaaattaaattaaatttaaaaaagagtaagttgctcaactttttaaactttagttttattatccacaaataataaattataaattgctgctttacatatatgatataaaaatgcatcaatccagttaatttggggtaaatggtattattccagtcttacctcctagaatactcagaagacacaacggtgtatcactagaaggagatagttttgttttggtttggtttggtttcttcagtcttctttttcctattccttccttttccaagaaacccacgatttctttctttctttttccagctattgatgaggtcagggagtaatatgttcagatctttgttgtatctttgttccgtttagaaaccagtatctgggaattcaacagagaatttggggtcactggaagctatgttttacctacatacaactacatcttcctcttagacctagagactagatactgaaaatgcaaaaggaagccatattgacactcccaaggataagggaaggcattacatcatcctttgtaatggtgaatcttgtgcatttgtagagggctggactttggcttctaccatattgtttagctctgtcaaccccacacaaggactttatttatttatttagacagagtcttgctctctttcccgggctggagtgcagtggtgcaatcatggatcactgcagccttaacatcctgggctcaagtgatccttccacctcagcctctcaagtaactagcaacacaggtatgtgccacctcatctgactaatttctttttaattttatatagatgggatctcattatgttgcccagcctggttttgaactcctggccacaagcattattattatcctcatcttacacatgaggaaactaccagtgaagtggcttgcccatcatgtgaaattacatatgccagtactagcctgttctgaaatccagcaacattcttttccacctctagccttgtttctagcaccctttggcctccagagcaagctggggttcattttacattaaaagtagagccatctgatgtggcgggcatccaaaacacttgggaaaatgctactctgtttagaactcgcttttcttcctcccgggtcccagtgcaggaggtactgtgtgctatgtgggccatcagactgtccctggccatggcaggagaattaggagaccaccagggctgtagttaactgtaggtccttcattaagaccagccaattgatagcgtgtgttcatgagtccttgtgaagtcttttcatcagccacgtggaagaccccttagaaaaacaatctctgtaatttgtatttttggacatagtgctttaggaaggtggatgtctgaaggtgggctgggtttgaaacatctctcaatgccatgggacagtgtggtacagtgtcctgacaacttaagctcatcctgacaacttaagacactaaattctactcctgcctcttctagtctagttggtcacctgccctttctgaatttgtttttttttttttttttgagatggagtcacgctctgtcaccaagctggagtgcagtggcacgatctcggctcactgcaacctctgcctcccaggttcaagcgattctcctgcctcagcttcccaagtagctgggattacaggtgtgcaacaccacgcccagctaatttttgtattttcagtagagatggggtttcaccatcttggccaggatggtctctatctcttgactttgtgatccgcccaccttgggccactgcgcccagccctgaatttgttttcttaactacccatttatttgcttgaaacagatgacttaaaatattccttcctcctctgaagttgttctttaaacttttctatgtaagaaattgattgagctgtattcctaggtattttattctctttgtagcaattgtgaatgagagtttactcatgacttggctctccttttgtctattattgatgtataggaatgcttgtgatttttgcatattgattttgtacgctgagactttgctgaagttacccaccagcttaaggagattttgggctgagacgatggggttttctaaatagacaatcgggtcatctgcaaacagagacaattagacttcctctctttctatttgaataccctttatttgtttctcttgcccgattgcactggccagaacttccaatactgtgttgaataggagtggtgagagagggctaatttacattcccaccaccagtgtacaagggttcccttttctccacatcctcatttgttttttccagaagacagcatttgctattacctgtcttttggataaaagccattttaactgaggcaaaatgatatctgattgtagttttaatttgcatatctctgatgagcaatgatgttaagcagcttttcatatgcctatttgccatttgtatgtcttttgagaaatatctatccatatttttcgcccaattttacatcagattcttagattattttcctatagagttgtttgaactccttatatattctggttattaatctcttgtcaaatggatagtttgtaaatatgtttccctttcactggtttttgtcttcattttgtttgtttcctttgctgtgcagattaacttgatgtgatcccaattatgcatgtttgctttggttgcctgtgtttgtggggtgttactcaagaaatctttgcccaatccaaagaacattcatctttgtcaaatgagctatagaattaatgtttttcctatttttatttattcattttatatttatttctattttatatattcatataacaatatatttattcataatatcactttgaatatcatttgttttcatcttgcatttttctcatttttcattgaggcctaatttacatgcaatgagatactcagatcatgagtcgtagttttaggagatttggcaattgtatatattacccaagaaagttcccttaagttcccttattcctctttctattcaagtcccatctgccaccctcagaggcaatgactttctgacctctatcaccagaaattatttctatatgttcttttaaatcagataagaatcacaccatatttattttttgtatctggattctttcattttgtgcagttgtctgagattcatccatgttgttgtattagcagtcttcatctttttgttgtttagtatgccacgattataccataattaatttacccatttttcttttttatcataatcttatataagggaaaaacatgggaatacatgaactgtatctttggctcaaatccatcttctatcagttctaagggcctcagggtatttgccatgaggggctgtgacaccagcctggactattaggaatggacctttgcttctcacagcagtcatttattcctccactttttctactagcgtcatgtgaagtgggaagggtactggcccgagagttaggagactcgagttcaagtggcagctctgcgctggcttggcagtgtaactggccactccatcaccaggacttaatttcttcatcagtaaaatgtttggtttggactgaacagtccctttttcatctctgacatcctacggtcccttaaaaatccctcctctgggctgggcgcggtggctcacgcctgtaatcccagcacttcgggaggccgaggcgggcggatcacgaggtcaggagatcgagaccatcccggctaaaacggtgaaaccccgtctctactaaaaatacaaaaaattagccgggcgcagtggggggcgcctgtagtcccagctactcgggaggctgaggcaggagaatggcgtgaacccgggaggcggagcttgcagggagccgagatcgcgccactgcactccagcctgggcgacagagcaagactccgtctcaaaaaaaaaaaatccttcctctgggtacctcatctttttcagttgcccctgcagtccctctctttagcatttctgtgaggaagtatccaaagcattggattacttgagataatatttctggtcctcttcctctctcacactctacactttgcttttctagaattgaagcctggagaagaaatattgtctaaagagcttgctacaagaaaatttccctaaaaagtattgggtcttaaaatttcatctcattttcaagttcttagaatactgttaatttgcaaagctgattatggatggcatactttattatgctttttaatcatacttcaaaactgcactatggatttgttctttctgtcttcctcccatgcttaatcattatttttggtggcaccttctaaactgttgacttattttctttctttctgatttgtagtagatgttgtataatctaagtttaggcagagatagtgaaagtgctggcctgcctgtatttcagccagtcctgggttaatattattcatgtggcaatgtctgttttactttaggactcaacgtatttaatacttcctctcctcctctttacaatacatagaggaaaggcctttgaaacataatttctctccctatgggaaatgctttctataaatttttcattttcaatacaaactgcttcactttacaaaacagtatctgtccctagcatgaaaaaatactggagggatatgaacagtaaaggagaatatttttctagcttgtgttaaatcaataatgtagtgattccaagggaattgagaggttcgtgtatttattcatatattagtcaaaaattcaaaattctatctctaattaaaaaggaatttgagaagtatctaccatttttattgtccatctctttggacatatgctttgcagcacagtggagcggaaggagcgtagacctacagaaatttagagggctaaatttttaatattggcctggctacattgcctggactttgggaaaatcacttaagctctcttagccttagtctttttatctgtaaactgagaataataatgccagtttttcaaggttgcattgaggatcttaggtaatacatataacattcatggaacataaaatgtgaaccaatgaaggtgccaatgcaattacaccttcattaggagttgtcatttctgcggcttctcattagaacatcaaaattagttccttcaatctttactgaggcgcagagctttaaactctaactttgaaacttccaaaatgaagtgtgaaaggtctgaggccttgtgagtttgaaaatgcagttcacacttcattttagaagctccagaattttttaccaaattgagattggattcaggaaatcatattttaaagccctggttcatgccattttctaaagaagtacctagaaggccataatcagaatgcttattaagtgaccacactttgaactgcattgcagataaattacctctgtgtggggagatgtgtcttgagattctgcggtcaaggctcagacagccccagagctggaaacctcagagcatttatgcctctgtcactaaaggatggggttatgggggctggacagaaagcttgagagagatgaaaagttcagtgggcttgagggaggattactgaattacaataatatccacaccgtaaagtgaatttgtacttgcaagagacacattatttatctagaattttagaaagggtctcttttcaggtcactgtgtagattgcctgtgatttgttctccttgattgaatgtgagtgagtgtgaagcatatctaaacaggtctcacagcaagtttctttcataaatctcctctggtatatatgctgtgtacccttgacaaggagaacactattaatggcgacagtatgcactggaactcagagcactgacgtgggaattgggagctctcaggtctgttgtttctgccagagaatgactctgtgaccttgggacaagtggattcacaaacaagctgaaggagatcatatctgtcctagaccgaaagcttatctgagaaagatgctacatgactacaaagaggttatttagtttcttagttcagataaggaaaacactaataattagtccaaacttcgaggctttgtctttgtcttctaagcttgctttcccctgtgatgtccagtctctcctaaaccagataaggattcacactattaatctcgacaaaatcaattctttgcatttgtgcttttattaggtcagtcattagtcaatgaacacttattgcacgcctgctgtttgtgcagacactgtgctagtcaggggatgcaaaagatgagtccgtgctggtcccatttcaaagaactcaaaatatggtggagacaagcacgtatacaaaaccagaacacagtataatgaataccacaggagtatacccgcaaaagttatatgggtgaagaaagaaggattaattagttctgccagagaaggactaattcagggaaggctttggagaacagggcacacatgatcggagactttactggttcagtcagctatataagtgataaggataacatgaagagaggtgccaagggcaagaaagtataagatatgtgtagaggctgggtgcagtggctcatgcctgtaatcccagcactttgggaggctgaggcgggcggatcacgtgaggtcaggggttcaagaccagcctggccaacataatgaaaccccgtctctactaaaaatacaaaaattaggcgggcatggtggcgggcacctttagtcccagctacttgggaggctgaggcaggagaattgcttgaacccaggaggtggaggttgcagtgagccaagattgcaccactgcactccagcctggttgacagagcaagattccatctcaaaaaaaaaaaaaaaaaaagagagagaaaagaaaagttacatgtagagaactgtaagtaatcttatctggctagaatatagggtaccataggggaatgactgagcatgggtcagagttgtaaacatccttatcatgccaatgagttggatttctccagaaggcatagagagatctgtttatagtttctaggtaagaaagagtttatgaacttgcctgtgtcttcgaaatatgctctggcagaatagaaaaggtgatcaaccagagtaggacagaggccacacacatctgccctgaggtcagatacctgtacatttattgtgtttgatagccaaatgattttaatgtaaactagttgcaaacatttaaaatttgggaaattttacataaaaatctagattttcgagcttctattaagaagtagagtgcacaatatctgcctagcaagaaacagctgttgctgagaagtgtcttccaccttcagctagagcatgcagtctgacatttgcttttctggttcttgtatttgagtgtgagactcttggagtaaagcaaacccagggtcagaaagatcactggtgatgatgttgcagttgtactgtcaggactgatgaaaacctaaactaaggtggaagccttgaggaatgaagaggagggcaaggatggatttgctgattgtttagatgtgtcatggatgaaagagatggagaaatcaaagaagactctcaggttgtaattttaggtaactgggtaggattcccatgtagtcagaaacccagaaagaagagaaggctttgggaagatgacagtgtattcaatgtggctttttgtggttcaagactttggaaaatattgattagactgttgaaaagtacttataggtcaggaacctggtcagaaagtattgtgctaaaataatattgttatgacccaagcagttgtaaaaataacttttattgtctaactctcacagtttatcttgaactcttaacaggttgtcaggcaaatatctgttcttgaaaccagaaaaacaaatcaagaaattgggatatttgaaatgcctagagtgggcttataactgtaaatgatattttacaatggaaaagtagaaacagtctttagcagccaatgtgaaataactgggtaatgttatttaatagaatgcaaatttgaaatgagtgataaccattatggagaattttgttaggaaaaaaattaataaagtgaatgtaacacatgaagcagagctggaactaggaagaaggaagtcaggctcctggggaaccaaattaaggagacttcccctctcaggcacttgtgggaccctgacggtaagcatctccttaggtactgctcccatcctcatccttgccttgagtttttgaaaaatatatgttagaaatgtttatgattatatatcacaaactgttattctcaattttatgaaattccctagatatgattacaatagtcatttgagatttatgatcttatctaattgttatgtatgtacccattgtggggtgatacaggcagaataagctctgaatttgagacttgtgaaaaccataagagcctcgagtcttgtcttatgagtctccgggtagagctgaactggctgcagctccaatgagaggcaattgcttgagaactgtttccaccagcatactgcatggaatgggtccctctctgatgcagatcccactgatactgatgtcgcactcttgctgatgcagatcccactgatattcatgtcgcactcttgctgattttgatgggccagtcaatagcagggcagcgtgtcaagatgctggagcaaggaagtcctttgtactatttttctcactgctgtcttttccttatggcatgccattctgtcttagaaaatgtgagacctgaagtagacatttggcatcatctagtccaacctctttgatacacagatgtaaaaactgaggcacagaggaggggaagaactttgctcaaatcaaaaagtgtattaaggatggatgcagtggctcacgcctataatcccagcactttgggaggccgaggcggatggatcacaaggtcaagagatcaagaccatcctggccaacatggtgaaaccccatctctactaaaagtacaaaaattagccgggcatggtggtgcacacctgtagtcccagctactcgggaggctgaggcaggagaatcgcttgagcctaggaggcggaggttgcagtgagctgagatctcaccactgcactccagtctgatgacagaacgagactctgtctcaaaaaaaaaaaaaagaaaataggttccgggtgttgcagcaagtaataatgattaaacattgtttaattaaataattaaacaatgcttgcttctctcccactgaaggaggtagaaggcacagcaccgtggtgagcgaggcccagctttctgctgtgttcctctgccatgcctagcatgtgaccactgtggagtgatgccagacggctgtgccattccagtgcactgaggacggagggacccttttcctctgaggacacatcatttcaccttaacccctttggccagaacaaagttgcatagctgcaaggacgactgggaaatatatttattctgggcagccatgtacttagctacaatttggaggttctaaagaaagaaaggaagagaatggaaacaattttcaaggcctaccacagcaaattggtgccatttctaggactagtatcctatttcctaactcctagtagaatgttttttctataccacagatttttaattctcataaagatgtgatttttaattaagaagcctataagaacattttgaatatgcacaaattcatcattttatatgtccatacgggatgcagtgattcccctttgcttaagatcaatttttgtttttattaatcccttgatatatagataggagtcaggcagacccaagtttaatttctgtctaccaacttgtgactttgggtccatatgaataaaaaaatctatgctttgattttgttttttcctctctaaaatagtaacaacatgtcatcttggggttgttttaaaaattaaatgggatgatattaatgaaagagcctagcccagtgtttagtattgaataggtagatatctaatggtacagataccagtttccttctttctcctcacttccttaggttccctccaacctgaagacaacgtatgtttctcatagataattacaaggaatttaaatccttgacaaaatgattttctggctatccatagcggacatgtctagatacatactctgttcattttaaaagatgaggaggttctgacacaatcagagaactttttaaaagttatggatgcctgagccccagccccagagataatgattaaacaggcctagaggttgttagtttttgaatgaagtttttagtttttatctgcctgagtgagtctgatgtgctattgtgttttacacagatcaatatgatggtagaatgaaacagagaaaacggggaagctgagaggtcacttaggcaggtattgtgattatctaagtgagagatgatagaacaatatggcaaaagatggaattaaaatatttagtgggcaaaattaataggacttgatacctgatgagatataggaaaaataaacttaatacatctttcaacactagcaaaactgtagctcttgaaatttatctgacctgaactaattggttcggggtaaaggagaggagaaattgtgatatgtgaaatatattaatatttagaaaattcttccaacattattaatatatagaaaattcttaattatctggaataatgagccaaactcaacaagataaaatctaagagggtcaagtcaaatttcattcttacctttaaaagttagctatacaagtacatcatataaatgtcatttactttgatagctgtttatattttttaaaaaaagaaagaaaacaagactggtagagaagatagtctgaccgcaagatcaacaataataataataatgtaggaccacagaaaagtaaatgaaatcttggactgcattcatctaaagaggagcatgcagaacagggaagcagcagtgcctggagtgctgagttcagttctgggcgccacatgatgaagggaacctggataaactagaccttgggcagacaaaggtgcttgggagagtgaggtgacagaaatttctcataaggaatgatggaaggtatccctttattccaataaaaagaagactaaggaaaggcaatgttttcagtgctctttagggctgttaaattgaaaaggcaacagatttgtctggagaggacagaagtagggccaatggggaagaagatatttatgtcaaaataagaaagctctaacaattagacctaccagtggaatgaacgaaccaagagagtgagctgtccctggacatggtataagcagcctcaggggctggaaaaacactgactgactgggaatgttgtagagggaatttatagatcagattgattggggaaaatagccccaaaggttctcctctctctgacatcactctatgattctatgtgaagttctagctttttaactatttttttgtataattaaataatttgtctttattgattgagaactaatcattaaaaaagctactgtcttttcatgtctagagatgataagaataatactacatgcttttgaagaaaaggaattttatgcaaataatcccataccagtgtattacgcttttgcagggataatcaagagcttgcaaaatttgaaaccacattttcccctgtatggaggaggaaagtctattttgcatccgtactttatgccttgggcattattattgctcatatgctctaggatttttaataaacctaacctgcttcatgaaattacactgcattaattcaacatggccatgtccaaaatttaatattcattcatttattcaagtatttattcaacaaacaatccctactatatttcatgtgctattgtcagtgctagaaacatcaatttaaaaatgtttaaatcctagtcttcgaagagtttataattaaatataaaaatattgtctatgtgtcaattactgtagctccaaatacctatttactccaaaaattagtgtctgaaaggaacaatcatttattatctcttacagtttggtgggtcagaaatttgatagcatcttgggccaggcgtggtggctcatgcctttaatcccggcacactgggaggctgaggcaggcagatcacttgaggccggggagttccagaccagcctggctgacatggcgaaaacctgtctctactaaaaatacaaaaattagccaggcatgatggcacgtgcttgtagtcccagctacttgggaggctgaggcatgagaatcacttgagcccaagaggcagaggttgcagtgaactgagatcatgccactgcactccagtctgggggacagagtgagactctgtctcaaaaaagacaaaaagaaagaaagaaatttgattgtgtctcaagtgggcaagtttggcttggggtctttcatgaggtttctggtgtgaggtctctcaaaggctgcttctccttacacctgggccaggagtgtttgaacagctagtctggaacaacttggggtcttcaggtatctccctctatctgcatgtggtctctccagctttgggataacctaacttcttacatggtaactgctatagtttgaatgtgtcctttaagttaatgtgttggaaacttaattcccaatgcaacagtgttgagaagtggggtataataagagatgattaggttatgagggctctccccttatgaatggattgatgccattattttggaagtaggttagttattgagagagtaggatgttataaagtgagtttgactccctcttgctctcttgctgtcatcctctcttgaccttctgccttctgccctggaatgacacagtatgaaggccctcaccagatgctggcaccatgatcttggacttcccaccctccattatcataaaccaagtaaatttatgttgttcaaaagtgacacagtcagtggtattgtattatagcaacacaaagcaaactaagatagcaactgaggacttcaaaggtatgtatttcaagagaaaactatatcacattttaagattagcattaggagggctgggtgtggtggctcactcctgtaaccccagcactttgggaggccaaggcaggtggatcacctgaggtcagcagttcgataccagcctggccaaacatggtgaaaccccatctctactaaaaatacagaaaaaaaaaattggtgagcacagtgtcgggcacctgtaatcccggctactcaggaggctgaggcaggagaatcgcttgaacccgggaagtggaggttgcagtgagccgagattgtgccagtgcactacagactgggcaaaaagagggagactctgtctcaaaaaaaaaaaaggttagcattagaagtcaggcagcatcactgctatgacattctcttggccaggcagttgcataggttctcccaagacctcacctcttagtggtggactgttagtatcacattgtgagatgggatgtgttttggtgtagtcatctttgaaaattacaacttgccatagcatatgaacagataacactatacttgggttctctgctatggtgctgtgaaagaacagaagaggagagtgattaacagaagaggtaacattcacatatcatgggccatataatttgatgtatgtaacttgttaaggaaatacgttcaaggcaggggcaacagcagatggaaaggcatgaaagaacaatgagcacaaagtgtttaaaagcttgggttgacaggaacaaagactgagttgtaggagaggtgacaggctaggggcctagacaggggaggtaggacagcatcctgaagggccttgaacatcaagttaaaacgtttggctttggggagcagtcactgtctttagagcacaggcatataaactgatcgtctttggtaatctcttccatctacaatctttctttcctttgatagtaaacatatcatctctgttaaagttgcttcctagcttaaactgaacacagactccaaaccattgaagcactttagatttttttctttttttttttccttttcttttactcaccacaaacaactctagaatggcatgcatttgaacaaaccaaaagtgatttcactcttctaattttcagtgctttttggctaaatgcagagtgagaaattcatacctttttcaagcagtgtgggttctttttcccaatttctgtcatccatctggttctctggaggtcttggaatccaggaaagtgttagttcactgtgctgaaatccaaaaaagactgctaaactgtgaaagaaaatttgcattccagagacactgaaagagttagtccaccacccttttgcaacagcaaggagaaaacatctgtatttcctgcctctttgtctttaagcagttatagaatggaaaaccctatactccctggctgtgcgtttcatacctagttaatctaaatcacttttggcagggtgggggaggaatcaaaacatggaattattttatttctagtgtcagaaaatattacagccaagatactgtttaagggaagcaaattacttcaccagcttccttttgagctcctcatgaggtttaattctcatgaatgggtcctagagccgacatttgacatacacatcagcagtgccctcttcggaagggaaccgcacagtcacagccatgatgttggcatgtctttatggccttcctaagtcatgtgctgtcttttgtcttccattggcagaaatacaattagaaggccttgttctcaacagaagccaaatgattgccaaatctgttcaactgatctctagagaattgaagttagctcatggccctctggctgttctctttgccactcccaggagttataggcttaaagttatccctttcttttgaaagaggatcaagtttggttcaaagaagcttttctatcatccccaggagtacaaagagagcccttccatgaccctagttgtttggctcagaccacttatagcttactgtaatttaggaagtaattgtaattcataaagccaggtagataataaacatcttggcagggttgagtttcaggcagctctgaagggaaccaacatgtgagtggaatggtattgggaacatttctagtctctgcttgcagatcttgattctaatggatgactcaaactggtttaattctgatctgaaatgtgcaggcaggcagtcattactctgtatacacatagctgaaaacatcatcacttaagcatgggttttagacattctcctggatgagttagttacccatggtagacaaatactgtaagtaaaaagagcattctcctaatttctatgttgtgtgattaacttcagatcatttatattcctggagaaatatgtagcactattttttctttaaaagatatattcttgctgaggtagaataaagaacagaaaagttgtaagaggccttagattttaggttatttaatgtcatttaattttgtattcaaccaatacttactgattgcctgttatgtcttaagcgctgccgcagaggctgcaaatgcagtagtgtcttgaacaaactagtgtaagatgaacaataagcatggcagaagcatagtagcaactaaattcatgaagtgatatcatagtgataagcactatgaagaaagcaacaggataaagagacagagtctggctctggagagggggctgctgaaatagtgtggtgatgcaggccatctgaggatagtaatgaaatttgggggatgtctatgggagtagatgctgttggatgaatctttggagtactcccaaatgattgttcattcatttacttactaaaatatttactgagctccttctctgtgccccaggcattgttctggaaactgagggtgatgctttgaacaagacaaagaaccatgccctattgaagcttttgttcagccctcaaatcactccatttcaagggaccaaaagccctattaacttaattcccttattttatagctgacggaatttaggcccagggaggaaatgctttgtacaaaactcactgctggtggctgacgttggcaagactggaatacagcccttgacttctgctttatttctccttgccactgagccatacagagtctctgtaaccatctatgtcagcaattctagtttagtgctggggttggttagcactgtgacccaaagataagtctttttctctatcaaggcctcatgtctactcttaataaaggtaacaaaattgagggttgttaagatggggcttcacaggcgtgggtaccaggggctttgttggaccttgattacggttaagtcaagaaaatggaccttgccaagtataactgccgcaaactagacagagaactgtatgagacttcttattggctcatagacttctctgtacacactctaaatgcatggtatgtaactactccatcacttgataggcattccaggtatgtaaactaaataagatacatggcaagaaaaattacctgctgaagacaaaacaacaaaaacaaaataatctgtatttttccaaactcaatattcaatattcaagggagtatgggtacttgtgtatatattttatacttgtctacttctctccagtaataagaatgatagaagttggctcagttgattagtcagaggctgttgaaccaagatgtagggtcgatccttctgtgtaacagtaattctctccagcgaaaagagctttataacaatatctttatatctatttacattcttaaacagtgcttctcccatttcttataatatttaattctcattgttaagagattgttaaggcagaatacttagtatcccattctatagatgagaaaattgacacccatgtagcttatggaattttgttcaaggtgctgtgaattccagctactctggaaattcactgcctcaatgaaactggtctaaatgttggttaatagcctctatttataggttgctgatagtaggaattatgaaagctggacctaaggcttcctaatgtgaggctttggataggattatctgctctgagctcttagccagaaggcccccatatttatcagtgtgcaacaatcttgttttgacagcgacaaaacccaagtagtgtcacatactcagcttaacaatttttcattggctatgtaagtaattatgttaattttatcatattcttattgttaagtgggacagaacaccagggagatgtgttggtattcaaaaagggacctagtgtggggttgggagaagagcactgcatagaaaccatgccatctgcgtcctggactttttcacaaaatagtatatcacattgggcaaatataccacaataggcaaatcagcttcacaaaatgcagtgtcctagtatgtgaggtgagacagttggacaagatgattcggggaatttttcaagctcaaccaaactatgtatttatgagaggctatgggaaatctgcatgctaaagattattaactgcattctgaataattgcctttatacagaataacggagaaagatatctgagaaacttgttaattggaggacagtgtgaagtagaagaatgagcctttctctttgtactttagaaaacacaggttcaaatcctggctgcatttatagctgtgtgtcatgtaatgcggaaaagaattctaccattctacctcctataccagattgctctggagattagacgggctcctgtttgtgtacatttagtaaactttaaggattgtaccaaatcaaagtatcagttattatttttggtgtataaaggaatataaattacttttatgaagaattaagaaatgtatggatttggggtataataaggtttacacagaagaagagctttttcacaaaattcccaggaaagcagggggaaactcacttagaaatctagaagcccattttatattatgacattatccaattatcccagagtatcatatacacaattccttagataatccatttgttgaaaggacagatataaaatataggagaattaatggtgaagggaaaaaatagaaatacggtgcttcagtgtggtagttacattaaatgatcaaaggatgacaagttaattgaataaatgtcttagccccttgaaatttgtatagggaatttataaaactaacatttattatatagtcaggactgggttctcgctttgataatatgtgaactcatttaaacctcacaacactgcaatgtagacatttcagtctacaaaaaccaaaggccagaaaggtcaagaaaattgcctagcttttcgaacccagatcacctttttcctactgtttcactaattctcttactataatatggcagaccttctttgatgtctgagttaataaatcttcacatgacttatgttgtaaaggcaaaatctatcatttgacttgtctcggaaggaaaggaactcaattcttttctttctctctcaccatagtcttagtcttctctgatatgttcattatgcccatggcatgagggtctgacccacagtcctcagctcttaggccccttccccctgccccacatttttcaaggatcagaacacattcaaaagaagtgttttggaagacctagcatgtcacatgggttatgcattttaaagtaaaatattacctctccgggcattaaggtataaataaactaaatgttctataattgagattttcttttccgatttagtaaagctcagatcacaatcctaaccctagtgcttaagaataaaaaacagggcgtaatttactttgtgaagaatgtgatttttagctcatggcaaaattgaatagaacggcctaattgctgtgatctttttgttctttctgttggctttttccttatggttttagggcatatttctcaattttaaagccagtttatgtagtccaaatacaaacagaaaattttataagaaaattgtttttctaaattttattttgatagtaacacataggttttgtctgtgctagttaaaacatggatgttcggccgggcgtggtggctcatgcttgtaatcccagcactttgggaggccgaggtgggcggatcacctgagctcacgagttcaagaccagcctggccaacatggtgaaaccctgtctctgctaaaaataaaaaattagctgggtgtggtggtgtgtgtcggtagtcccagctactcaagaggctgaggcaggagaatcgcttgaacctcggaggcagaggttgcagtgagccgagatcgcgccactgcactccagcctaggtgacagagtgagactctgtctttaaaaaaaaaaaaaaaaaaaaaaaaaggatgttcatgtctggcaatattgagttccccttcatcagtgctgctcaatacacagatttcgttacaatattcttcctgtgaaatgaatttgtttcagtgcaggcttatctgcgactcctataagagtattagatattaaagactcttgttatagcacaacattaattccaaagtgggttaaaataagttttttttcaagtgccaaatccaatcccaactagaatagattcttaagagtcatagaccaccaccatactgcctgctctctcaccattcataagtaattactctcttctctgcgttcccatcattcattactcgtgcctcaatgatagcaatttgtcatgccctttgcctcgaatcagttgttaatagttgtgtccacctgtctcactgcattgagaacctttgagggcaaggatggcatctttatcttccatctcttcctctgtacctgccaggctgttgaacactttgttccattctttaggctttctgcaatattagagtaagtgaggaggcagctctgctctttagagaggcatataagaagtttgtttaaagagagtttataagaaaactgaggcaatagatgcaaaaagttatgctccaaaagattaacaaaaaaagttgaaattatttcactgaattttcagttctgtgtttcatagctgtcatcttcaggggtaggggggtgtgtcatgacatcaaaaaagtacagtttagagatttgatgctatctattaaattgtttcaaaacgtttcctatctatcaggaaaactttcatctgtaaaagaggaattttgattctaattgaaaaatcacagtcataggggtgggatgctgttaagcttgagattattattttcagtctgtttcaaaacacacattacatgcagatacaaatatagacttagattaagatatagacaaaggacattagaaagaccaagagaaatgttaataaaaagttcatgtctcacaggaaggcagagctgttggaaggttatctagtatagggtcattagaactaccaaggtaaaatgatatcttcacttgcaaagcaaacccaaaagtactgccatcatttgggaagcaatcttgatgaccagaatcaaggtagagaataagtttttattccataattaagttaggcaatagcagtattctgagttcagataatggcactggcatttcaagagaaattggctgagtcatagccctgctcctttactgtaccacattaccattctgttgggaacacctacacttgagctgtacttcccaacctttttcacatcccagttcatgtggaaaatgatggcattcattcagcacacggagtaagtggatgagatctctcctgtcctgttcctgaggcaaccgctcaggaactctggacacctctggtccttccgaatcctcccaaatatggtgcatccggaacccacttgaaacacactgtgtgttaacctgccagttgagaagttctagactggagaattgttttgcatggttaaatagaaaaaaaaaaaacttattttatataaagtacttacctggactttattaattcattaactaactgatatttgtggagcattaattttatgcaagcatactgttgtagatgcttgggatccaacgacgagttttctcttgtcctataggagtttaggagacaaactgtcttaagatcttaacatgttttctctatttatttgcatgtaacttgcagatagcaagcctgaatgtcttctttctatttgaaatacagtgtgtgtctaccgatatacagattccatataatgtgatgtagcagagagagtctccattggacagagaattaggagacctttattgtaactcccaatctgtcactagctgtgttctctatctataccttagtttcttgaatccagcagttggactagaatcatggttttcagatagtacaggttccatcccttcatgcccttcagccagaagtgattttgggctctttaatatgtgctttttttgataaattgtttccctgaagaaaggattatgggtgaatggccaagtaaaagaaggtgaaaattcctgggctagtgtaatctctaaagacttttcaagactgaatgtcttctaactctctctttttttctttttgttcttatctcaacaagacctaaactatctagatcatgagatgtcactccttatctttccaagagtctttcctgtttcacgatattgtttttgtacctaaaaaaggtaaagatgaatataagatcacattttaattttataaaatgaaaatgttgttaacatttccaaatggcagtaatcactttatagtcttctgaatcttcaattacttatgtaaatgaagactgtatatcttgattttaaatactcaaaattgaacacttacatatacctatgtaatatgtaaataatggtaatattcttattctttatcatctcattagtagttcacgtttatgttatctatatgcttcatttatattcatatgattcttcagctcttctgcctgtgagttacaagttatttatacaatatccaaagatagaaaaaaatactaccccattgtatctctgacttaaaaacgttgcatttgggggttttctgtacaaagttgatttgtgatttaattgttagtttcactgagtttttttgtttttagtcacaattgtattgccaacatttcagaaaaatttataagctgtgacttttagcaacagaatctgcttttttctgctactcttacgtcctttcattttaaccatactttcattggagtagcctaaaacatttttttatggaaaaaagtcctcaaacagtgcctgttgcaaaatgaataaaatttggattcttcattcagctttggccaaaggccttccacagctcgttaccaattacttactgtgtgtcatgaactttgtagtccctgggcaaggatgcttactattgtggataccgtagatagagtgtacaataggaataggaagtataagaagtataaggacttcctatactttcccacaggtgttgattgcaaggacacttcttgataactaactgtgtgcaaatctgcttcagaatttgtttcctaggaaacacaacctcagactatggcttcatgggaggagagaggagtgattgcagtttagtcatagaggttgacataaaccactaaatcaagtacattgtgttcagtgtcataggggaagcataatacaatcctatgggagtggaagaagttacttacttttcttggaatacaacagaaaaagatttaggaaagatttttcagaagaggtgacatttgagtttcactttgaagaatgagtaggcattctctaagcaaagtagaatacaagatagtctgggctggtaaaagaatgttgcttattaaagatgtggcagaaagctcagtgtggcagctgggaggaggagtccatgggaccacgatggagctggatcagcagtccagtcacaaagcacgctactgatattgaaggttcataagctggaaggtgctcttttcttttaaatccccagctatcaatgctggcaaccctactagacaaaaaaataaataaataaataaataaaagaaaaaagaaaagaaagaaagaaaaagaaagagagagagagagaaagaaagaaagaaaaagaaaaaagtgatttgaataggcatatttagagacatccctctttcacttatttgcttaaagactttcttttttttcaaaaccgatttatttgtcaaccatttcatgtcatgggttcagatgaatccaatatttgtatgaagcgtgcatctttttgtctggctttaaaataatcatctataacacaaaaatatccctctatgatccttacaattttaccattagcaatttctagaattatcagtggaggtgcatagtaaaggtaatatagtccaggtttctagcaaatgaatgcccctttcaaacctctgataaggggttatccagttgtttttgtatatttctgataatgtaaacatgtatctttttctattgttgttaatactgatttatcacagattaatacaattacagagtttgaattaatcatttttcaaatgagaaaactgagatcgaaggaataaattatttacccaatgtcatacagcagattttgacaaagccagaaggataattcatattcttcacctagcaactttcctttttcatggccacataatgaattccttagctccctctctgcattattaggagtcaggtaactggggtaccagtcccacctctgcatctcatgctctccacaactcaggtccagcacatccattctcaaagtctgcctgctcacctgtggaatgagagtctggactaagggaactcccagccccctcctcctgacactgtgagtttttcctttctcgaaggctactggtaggccccactggagactgaaaggggaagattgcagtaaaaggcgcaggctgtcgaaggataacatgtccttctacatcattcactagcctaggatgccagtcaacttcattcttggaacctttattttccaatttgcgggcattttgcaataggctgattttaatcacattttatactttttttcctttgttgcagaaatgtttgtattacctgttctttgaatgcagcatctgtagaccacaaggtctttccataggaactaagcctgttatattgctgctagttttgagtaaatgagctgaatcttgcagccaagcctcagtgcaaacaaaaacattttctggccaaacattttctggttattcaactccattacagggctgactaaaaaaaaaaaaaaaaaagtaaaaacccacagaggagcaaaacacaagtcctgggaagacaatttccagccacattagctcacattgtcagggtagaaaagaaacaggccctcattcttcaaaccatcatcatctccaaactcttaccctgtgctcttctgctattttaatttcaccacttcaaaatgggaaaaacaaataggttaatagtttccatgcgtttagactgtgaccagaggcatacgaagcaatttcagaacctcaggcaaccacagctttgagggaaggatgatgatggatttaccaattcatcttgggatggattccagagttaagggagtcaggccagcactgtgctgccagagtgggatataaacaatattcattcgttcattctttttgtacacattcatctcaggcttatttctatttcagacagtatactgggtgcattataggacagagaaatacattcttaagacatagtctctgcccctaatgaaattaaagtctggtagaggaaatagacataagcacaaataatttaaataaagtgcacactgaaagtattgtaagcaaaccaaataaagtgctcaggaatgggagagaaagaagcaattcattccaagtgggaccattgaggaaggcttcactggggaatggccttctagcctgtaccctgaaaggtcaaaatggcaaattgcgatacatctaggcattagccaaggcacagaagtatgggagtttcacataggtttgaacaagagtgagtggtctgagatgttatgagaaccataaaggggggttggataccatgtaaagaataagctctttttacattgtgaagccattaagattttattatccagaaaggtacttgtatttgatcacatctgtgtttggaaagaaaactggaagtcattggagacaggggcaaggggagtattataagaagagagatacaaagaagccaaatcataggtcattgctataggttagacataaggacactagttacctacgtacagacacttcttgcttcatagccatttatatatcctcatggtaaaagagcagctacccctgaatttccacatcccattcagttctgcatctttctaataagatccacatcccgggtttattcctgattgtaaactcaatgagttaatccagatacctcagttgtaatatagcattttacatgtgaaacgtggttgtttgctaagagcatggaattaaagggcaggatggaaagttaacagccgatctttctgagacctgactcactaactggtgtctcttttaaggggtgctatatatttttaaagcttagaatatttttaaggccagataaatgtgtttcttaattcactttttcaaaccagctcccttgtacattcaacatttctgtcaagagtttgcaaactctaaacttggagatggtgtgtaaatcaaagctttaaatgatcagaagcctaattgattatgctgagttctgatttgggttctgcatttagcatgctctgtctcagtcatctgacaggctattctgtaaaaagtaggggtcttagtgatcgcactatggtctaagtggtcacactatgtctttgataatgaatcaagttttagaagtaatagtgaagcattcctcaatcggtgaaccagagtggtatagttcaagggtcaacaaactatgcccatgggtcaaatccagcccattgtctgttttttttttgtaaataaagtattactggaacacaagcatgcccatatgcttgcatgctatgactgctttccagctataatagcaaagttgacttgttacaacaaagccagaaatatttactatatgggactttagagaaaagtttgccatcacccatgctgtaggaaacaagggaaggaacaaggatagcagtcagaaaacacatgtcctcagttctggacttgccacctactacctgagtaatactagaaaagccacttgacccatctaattgtgtttccttctctctataacacacttctttggccagtttgttagttaattggccgataacacttgttttctatttgtaaggactgtattaaagctgtagatgtggtttgtaaatggtgataaatgccttccttagagtggtgtgataaggacctgagacaatctgttttgtaaagatgcctgtcatgcagtatggacccccttctgtcccagtctgacgtggtttctgtttccttccccagaatactctggagcagtgcaatgtgtgttccaagcccatcatggagcggattctccgagccaccgggaaggcctatcatcctcactgtttcacctgcgtgatgtgccaccgcagcctggatgggatcccattcactgtggatgctggcgggctcattcactgcattgaggacttccacaagtaggcaacctactctctcgtcaccaccctgccagtccttttggagtctgttcttactgcttggcatctgggcatacattcttctctctcagaactacagaatttcaggatttagtgaggcttttaaaagagcttattgatcccctcctccaatgcaagaattaatatcagacaatccatgcagtcatccagcctggtctctgtgtcaaggcttccccagagcttgtccattgcatctctgggtaattctaatgacgaaaaagctggctcagctatagtgtgtatgtgttagaaagaaacaggatcctggcctaaatatgaacaaaatttgtgacatttggcattgttcaacttatttgagctcttcagtttggtctttagatcaaaccctctctaaagctctctcagctgtgatgacccagagttttctcaagagctaatctgtgcatccctgccactctactgatagggagttatggtggacagacacagagaaccattcagtttcttttactaatgcaagcctctcacatattcaaaggcagtttcatgccattgtcaacatattgatgccattccctagccttttcttccacccaagtcttctctttctcaagttattttttaatagaattaatgaatgcaaattgtgtgttcttttgaggaggattaaaaaatggtgcctcaagatcaaggccagttattcatgggcccaaaataatctgtccccactacttcatttatctcctttttaggtccttctttcctgtattacagctggggtctttatgaaaattaagaaatttaaacagttttgtattgtgcttatttttatttgaccagtttgttacttaattattcaataacattcattttatatatatgtttatatatatacataataatatgtaaatatatttttatatattttatatataaatatatttatttatatacatgtatattattattgttattattttttagacaaagtctcactctgctgcccaggctggagtgcagtagtgcaatctcagctcactgcaacctctgcctcctgactcaagcaattctcctacttcagcctcccaaggagctgagactacaggcatgcaccaccatgcccagctaatgtttgtatttttagtagagatggggtttcgccatgttggccaggctggtctcaaactcctgtcctcaagtgacccacctgcctcagcctcccaaagagctggtattacaggcatgaaccactgtgcccagccaacgtttggtttatatttttaagaactgtactaaacctatagatatgatctgtaaatggtggactcaggtttctgtatgtgtttgctgggcagtggctttgaagacagcctttgaggctatcaaagagatgaagcttgtattgctcaccaggttgggtatccattctatggcttccaagtgtgaagtcttctgggttaattctcaccactgtgttgattgtcaacagccaggaagcacttaccccaaggagtttggagatctgagactcatattttaagaatgaatgtcctaaccactttccaagtagcaaagaaagtgaaaacctcaccaaaagacgtgaggttgaatgaattaaaaaatcccagaggcggaaatttgcaacctgaattagacaaggaaggactcacttttaaagggcagtcacagcataaattgtgcttcacattattgatatttttagcttgtaattacacattgaaaaatccctgcgtcttaagggaagtgaaaagatctcaatggggagtatgttctgttactgtttctctcctttcttagacttatcctaatccaagaaagactgatacttataatcggagcacacatgtttctgtggctagaaaagactgatacattacacccctcaattaaaacaggaaatcaattttgacaaatgccaatttatatctatgccatttatctttcatgtctaggggtagggagcataattagagactggtgactgatgacatcagtttgtgggtctgaaagctcccaaaaagcagacttgagcaactaaaagggggaaaaaaattaaaacccccagataaccttccccactcgttcaatgcatgttaaaacataaattaaaaatgataataatgttgtcttcatgattggcaggtatgtagggagagaagttttttgatcctttctccatttcctaaaggaaaataagaaactgttttatggaactcttatttataagccttaaaattactagaatacaaagcagctaaaagtccagcataggctaatcactgaaagaccaaagagagggcagacaaagggatattcctcctccagacagtttttggggccttgtttgtggtccttttgaatgggtctccttttgtggacctttagaaaatgcatgttaattcagttcaactcacatttataaagaaccctctgtgtgccaattgttgcattaaatgctgaaggagagagatacaaggagagaaattgtgcagatatatatagagaagtcactgtcagcaaggagcttgccaggaggagggcagagaaagtgtgcagacagggagaaagggctgaactccatgagacaggcacaggtaagggcttgcactgtcaaagtcagatcacctggctctgtggtcagaataggctttgtggacggagaatgtcaagagtgttttaagtgggaaacaaggagattcctggcagagggaacaactcaggcaaaaagcagaggcacagagttagtaaagggttctctgtgttcagggagatttgctttgctgtaactagagcagcctgggagtagagattaccttgagatacaggagacccataagaagggatttacctcacctgcttagcctgccttttatttatttatttgtttattttatttatttattttgagatggagtctcactcttgtcacccaggctggaatgcagtggcacaatctcagctcactgcaacctctgcctcccatgttcaagcaattctcctgcctcagcctcccaagtagcttggattacgggcacccaccaccatgcctggctaatttttatatttttagtacagacaaggtttcaccatgttggccaggctggtcttgaactcttgacctcaggtgatccacccgcctaggcctcccaaagtgctgggattacaggcgtgagccactgcacccagccttagtctgcgttttaaaccagtgcttcccaaactttaatgtgcctgtaatccacagagggatcttgttaaactttggattttaattcaggtctggagtggggcctaagattctggatttctgtcaagctcccaggtgcccatggcctgcactttgtgtaacaaggttctggaatactgtttttgagaacttgttaatggaccatcctctacataaacacctttggtcaatgttgactcatatcctccagcctactggacatgcaatcttccacatatgtcatttcagatgaccgctgcaaccactgcagtcttctggaagactatctcccctaccctaacacacacgtacacattttctcatttcacctaaatggttatctttaaaggcccaactcaattaccgtttcctggaagaaaacttctctgatctccacccctcccttttctcaagtttagatttacatcttaatctctgtgttttatagagttttataagtctgctgtagatagcacttaccacagtctgactggtatagaaatatacatatgtgtgtgtgtgtatatacatatgtgtgtttgtgtatatatatatataactttacaataatcatcttgtatcatttttgcaataaggatttgtatatataaattaatagaaatactgcagaaatatatagaactccttctcaggtctgtactggaagtcgttgcttattcttgtattcccagtgagaaaacccagaaaagcagatttctttaactgactctttgcatgtatggaggctttattcccctatctgtgctttcttatcaggaatattaccctcattcatttatgtatttaatcagcatccattagttgattgccagaaatgtgccggaatacaagatgaccaagatcatccctctctgagccttcgctctgttggctgtaaagtagaaatgataaaaatacttcctcataatgttgctgtcagtagaaaattacgtcaagtgtgtacagcacttaacagggcttggcacataataagcactcaataaatggtagctttaatcatcgaaagttgttttcatcaaatttacttttacgattattgtccactcagtgagctaagccttgaaatagaccacctgggattgtgagccctcctcgaattgctatcggaggaacactgtggggactatgagaaccacctcctgcctcttcgctttggtttttctcattatggaaatgaggccaattggtaggaaagaatcattactcagcaagaatacagtttatgtcttcccaaagaggaagaaccttgagattgaacataaagcccaactaatatctttttttatacagaaatatggcagattcatttcattagatacagcccaactttttttttctgcaccagtcacagtggttgttcctggagactcagagatggagcaaagtcctatcttgtggaaacttagagtttagtgccccataaatatatccaaataattactaccaaaatggataaattcaatgacagaattcttatcttagaggagtaaataattctatttggggaaattggagaaggcttatggatacactgaaaaggaaaacatacttctgctcccacagagtttggggaaaggaaattttgcagttgatcccagaagcctacttatttcaccactgatgacccagatttaaaaataatctggtagtccaaagcaattttttgccactgaatataaacttcttgcataaaataccaattataacaactctgattactgctgcagtggtaccatgatccttctaacttttctttcacagcaatcaattgatctgctgcttaattcatatttatttagattgcagccatacagatgctttttgggtgctgccaggaaaattaattacctacatatagaatataatgtatgtagaaatgctttgacaaccgtaacgtgctctgcaaagagttagattattatcattatttctttttaagtctcactacaaatagataaatttttaacatcgtttatcttaaaaccagtaccatgaaaaaactgagtcacagtctgtttttctttttttaaatctcttcagttcttatccaggtccatttcaaataatatgtcatttcataccttcacaaataccatctccaatttccagaagatacagagagatacatggcttatattttcagccaattaacctgtcatagaaaaaaaattgttaggtaccattgatcatattgagaaatactaagaaattaataagtattaaaagtatttaccagcagcctcaaaaacatatgcatatgcatatttatatgtatatgtatgtgtatgtgtgttagtatacactcaccctttaacagtgctaaaatcctttaaagaataaagaatttgatagctctttaacttttaatttttaagcaaaagtttaacacaataaaaaatgtaggaaatgcagacttggccatttttaagttttgtgtaatgtatatttaaacgcactaacctctgcccttttgaaaagctatgtatttgagtcttcttatgtcagttcctagaagtcaaggcaaatttccaagaaagaagctctaaaaggtgggaacaaggcaaagataccaacctcagactatttttctaggacctaaggagtgcatacaaaagtctagaaacaaaagtcagaaacaaataggggctggacaggactttgttctctcctccagttagcctatcccaagcacagggtttgcattcagaatctatctaaagatgaatttcataccgcgcaccatgcaggaaagagatgctagatgctcttcatgcccaagcaattcacacgctcactctctcacctcgccaaatatcacaatatttaccaccgattgatggaagaacctccacagtccctgagtctaactccctcaccttacggatgaggaagcaggtataccgactctcagtttccaccttttccttttacctctgcgtcccacctcagtgtcgacgcgcagtatctaaccagaactctctcttcactttcaggaaatttgccccgcgatgttctgtgtgcaaggagcctattatgccagccccgggccaggaggagactgtccgtattgtggctttggatcgagatttccatgttcactgctaccgatgcgaggtctggttgacagccctgccctgccagtctgtggcaggcgttgaaaggctcgttcgagctaggtttacatagatgtagcaattactaaatctcagaacggccttagtgcctgtactcataggacttgggttttagatttgacactagtattccgagcacatgctgttgaataagtcactgtacctctctcagtctgcttgctcaccggaagaaaggactcaagtccttaactcctccaaatatggctgtgagagtgaaatacaaaattgtatattaaaggacattgtaaattgtgaaatactaaattagtgagaaatggtgttattgaacatttaactttggctctgaggctttggttagaacttcttgttcagagtcatggagatttatttatttgttagcatgcactactaattgctcagtttcctgaacgcctctagagctgcagtatatctgcatgttcttttcagtaaagccaaacttcccgcagagtataaccattgctgctattgtgttctggataccccgttaacttaaatttcattctatgtcaaatgaagacatgaactccattgacctccttgccaccatggtagatagcagaggcgaggttcatagctgttgtggcctttgagagtttatactaaagttagcaaacacacacctcttgatgaagtactatgtatttattttccaaagaaacttctattttctccaaagacaaaggccagcatttaactgttatataacacttttcaaaatggaccctaagaggagctgtcagcggtagtatattcctttacagttatgcagttctttgcatttttttttttgatccattatcttctttgatcctcttaacagcttggtaaggtagaaaaggcagaagttattttcagagtggcagtcggcctgtgtgcattgaggcagactgtagcaaaactgtgggtggtgctcaggaggcctgtcccctggactagcaatctttgctctccacaatgctgtctcctttagaaagtacagcaaaccactactccccacaaactttaggattttattttcttactgcagttgaagtaaatacaccgaacccactggtggcccttctgcttggcagacatcagtctacctttgctctaggccagaaatggccaaaacattccattcctgtacctgtgcatgcattttgagagatccttaaactaatggtaaagggtaaaaaatgcatcggtggttagggacattcttattttctcttgttgagtgggggcagcaaacttctacatgggagccaagatgggtggcctcttctcttcttatacctgtatttcatatcaagtgagcttaggaggattatatttatgtccatttatatttatgtccccaatctctaattcaattacattcaagatatactatgttatatattgggagaaaggatacaggggattagcagaatgtaaagcaggaaggatagtaagtggccacattatggaggccttgaatagaaagctcaatcatgatgttctccacatgtgtacttaacgtttttacttatgtcgtttccatctgtctttactgttctaggattgcggtggtctcctgtctgaaggagataaccaaggctgctaccccttggatgggcacatcctctgcaagacctgcaactctgcccgcatcagggtgttgaccgccaaggcgagcactgacctttagattcagtcacctgttcagccggcactgagaagaacgaacacaagaaaaagataagaaatactagagtaaaggccatcaaactacgcgatagtctctgttcttcatctgctattaaccttgccttagaaacacataaattatgagattttttttaaaagttgttaccaaatacacatttcacattgaatcatgtaggatcttgatgggcctttgttcccaaggacttccacatttttgcacagattatgctccatcccattcacttctgcattcctgtaacttttaatccctatgtttgtctcacttttcatctggttgaatggcttttcttagtgtggtatttgctgtcacatagtttttcctgggtgagtctgccaactcacaggtgcttttaggcttgaaatctccatcctatcatttccgttttgcctgtgactgtaaagagtagccattcttttcccatgtattgaagaggatattcttctcttgctttatactactcacgtccttggggagggaaatgcacaatttttttttgttaggctgtaaagaatttaagctgtaaattacataagttagaacaagcccaaatttaatttgcaaccatcagaattcagaatctatagtgaccagtgatcaaggctaattggaaaagagttatcggcccatagctaataagtagtgacagacaaccaagcttcaatatttttctaaagaaattacaggtgggatatgctagaaaaggcattttggggttatgtttaaaaaaacattattgtcccacaatattaccttaagatttttcttttccgcactacctgaacattgtaatacagacaaacttgatttcttctagaagataacattttcaatactgtcccacttctcatcttaaaaatattgtcatgtttattctaatatccaacacaactatcaaaattgcctttttctctagaggatgaaggctgtgaaaaaaccgttcaaattctcttctttttcttttttattaccaggtccattttgcctgacaattgcaaatcagagcatacaaaataaaactgtgcagttttgtttggtttactttcaaaagagtagaaagcttgaaaagattctgaaaccacagtttcattattctcataatccttctgcaactgaaattacatattgcaggagacattttcatatcatcaatgtgacatttacaccacactttcaaagacaatcactgaaacaaaaattgtctttatgagctaaaaatatgcagaatctctgcctagaatctttattcaaacttttattagccagtgaaacacttgcttgccaactgccaagccatacttattaagttcgaacatgtttcacttaaggagagacacctagcttagtcatggcaagttgccattttgtaaactaaggattttggactgagatttcttaaatctttcttcaaatctcccacaagtatatacttttaaattatggagtattttaagtctacaaaaaggtataaataataatataatgaattcctatatacctaatacccagtttaagacaccaaatataacaagtataattacatcctccaatgtaccgtttccttattccacagatatctttttcattattgtgaagtgatgttcagatttctagttttttttctagtttttaattttaacatcagaactgaaataaaaaattatggatacgtgttttgaattgcaaactattcctcaggaattccaattaaatttattttacttgaataggaatgatcataaaagtgattctttttttgtgactagaaattcttaagccgatggtcactatagctcatccttaatgtatggctcatttgcttttgtcactaaacggttttgtgttagaaccaccaaaattatagcttttaagagcttcctttgaccactgtctttttcttaccctacttctcttatctttgatcgtatatttctcataatgtgaaatatgatgagattcacttaggggcagcatgttagttttgggaggcaatgtcaactgtgtctctgaattcctgtcttccaaattgaagccagaccatgctgatgacctcaagtagcactgactatttgacaatagggctgataatgtaatcggcttgaattttgacttagtaactttttatgtaatactttcggagaaattctctttaggacaaagcagagagtccaatttattgagggatagattgtatctcttaaagtggtcatattattattaattttgccaaaagaagaagaatttattgaatatttatactataaaatgcagtaacattctacttgcttattacatttaaatccttgtgtaactgaatgtttacatgtcaagaggaaaagctgtaagaaaatgctgtcacagacccatccctgtggcatcgtcagcagaatactgcttgcttacaatctttattatgcattcttataacataacctcagagtatctttaccaaaggtttttaaagtaaatctctttttaagatagacttattcttttataataatgaatgtgcactcatacatatgtagaaacatttagatttagagttttttttttctttcacaaggtataataaggaaaggatcctacaatattttattctagggtttcttaaatatatgatttatattactgtcttttctattaatcatttgatttaaacaatgccaagtcactcttttttagttgcatgaaattttgcctgcaacagagagaaaaagattgtattactttaatgattataatcatactgtctgctgatataatatcataattgttgtggtttaaatacataaatagtagaaaaatcagagtctataacagaaagtttgtaaaaatatactgattttgaaaagtatcaggaatataaatatttggtaattctgtgtaacaagagagacatggaaaaggaaaaaaatccactatatcatgggctctgcagaacatatcaaaataggatttcttaaatttttcaacccccagaccatactgactcaacatggagtctcactggccaagaaaattgcctttaaaactcgaaaataaggccaggtgtggtgactcacacttgtaatcccagcaatttgggaggctgagacaggaggattgcctgaggccaggagtttgacaccagcctgggcaacatagtgagaccttgtctctacaaaaaataaaataaaataaaaaccaaattagccagacatggtggcatgcgcttgtttaaaaaaacaaataaataaataatcgactcaaaaataagtcatgtgtcccagcataaggcatcaggttgttagatgctggcatctctgcagctcaaagatgtgggttctttttcttgtcattaacacattgttatttctgtaggagcaacttctctgatcaaaattacttttctgggtatgtgctgattaagggggtggacttatcaacactataattgttccctatgaaagattccacagagatgtttatggtgaggtttaaaggatatgaaactctacatttaaacaagtattttatatttgggtacagaggaagaaagagagggctttttccatggggctatagtagagagttagtggaatatagacaggactctgaaaacacaacttccagccatttttttagttagtaaaaatcctattaatgtgaaccagccaggaataacagtgttatttctattggatatggtttgggcttctcttgtcaaatctgtgtcggctgccccctgatccttccattatcaagttttgaagggtgttggggaaattatggcagctgctagggagatcagggaaacactgatgtaacctcaaagcctctcaccattcctcttggcttggaaaggctttattttttcatatacatttctagaaatattgctattctaccttagtatttcacatttgtagttcaaacaagcgattgtccatctgttgcctagagctatagtacatgtgtgttatgaatgaaatatgacagcatgttccatacccctgctttagccatctgtgggaaaccagcaaactgaaaaagacacctctgcaaaatgtgcctcaagtccatttcttgggatcgctcgtttggtgcactctcgtgggagacaatcagagaacaacatatacttgtgccttattttcaaagaatctatttacactactatgaatattccactgaagagtcaatgatgtaaatgataaccaccaaatctcaaaaatatactcaccaaaaagtaaaaaagtaaaaaaaaaaaaaaaagaaagaaagaaaagaaagagagagaagtcaacttttcatcttaatatattctagtagtatttattttttccttgtcttggaagtatctcataggtctttaaatgagtaaaacatttttatgccagaaggtgatataatggatgttagtgttttttatttgattttacagtagttttagtcagataatgaggacagagacttcaacttgattctttaccaccattcagcatattttttaattgtcttcattgtatttgcttaatagtggtccagacaagttcaaaacttgttctcagtgaggcattaatatggtgcaaccatgaatatttcaggccaagttattcacttgacagataactagaatgaaacttttctcatgaggctgttgtttggttagcatagccttatttcaaaccttaaaaagttacctgactgaagctactatgacttggtaaggattcttcctctcttgctttcttcctcccttcctttcttcctcttccttcctcctcttcttattttctttcctactttccatcctacctattagtgttgctgtacttggattttttgtaaattaaatcaatgcattatgattttagggaattatgattatattcataaggggaaggctaccagaaaatatatgtggcatccataaaatcttcttttataggggcatattttttaggttgtatttattcgtaaagtgaaatgagataatagagtctttctgtttcatgttaatgaattttcatcagggactgaggtcatagattcttggaaaattcatttgtgactgatctagttttctcagctgtatgcaaagtaatctttcaaagactaggttaagattttttttttaagtctgaagcaatgtaaccccaaaaaattataattttaatgatggcattttattttattccattgcagcttgataactttccttatagcaaaggaataactattgtattttcagaattttaacacagattaacacttagcctgtaagactaataatatattgtaatagttgatactaaaatatttttcagcaggttggacagcaccagtttttcttagatcacagactacaggcagaatttcccttcaatccagaaaaaaggacactaatttccttttctatttaattttcctggcccttgtgcaaaaaattgtggactctatcttagttacaacatgcatgtcccttattttgtggagagctgtgtgaaagatgcgttttttttctttttttcttttttttttttttgagacggagtctggctctgtcacccaggctggagtgcaatggcacgatctcctctcactgcaagctccgcctcccaggttcacgccattctcctgtctcagcctcccgagtagctgggactacaggcgcctgccaccacgcccggctaatttttttgtatttttagtagagatggagtttcacagtgttagccaggatggcctcgatctcctgacctcgtgatccacccgcctcggcctcccaaagtgctgggattacaggcgtgagccaccgtgccccgcgtgtttttttctttagctgattgacaggtccccttcaaagttacaaaaaaaagtgctaatttttgctgttaaattctggttgttatttaattgacagaagtctcttgatgcacgaataaatatctctacatctagcctttgttaaaaataaaaattaatattctacaaacacctacatatactagagaggggtgaaacactgcagctaattcctttataatactttcagatgattgcattaagcctttcatgttatgtggcattgttaatttttcctagatacccatccacttaagggccagagaaatccttattcatttaactctggtgggcatttatgtaacatacccaaataaaaacgttattaaacagccacaatcgcattcagtcaacttggcactgaatgtagcttctaaaatcagttctctaccctacgaatggaatgttctaccaagaaagagaagcatcaccatgtcatcttgtgttctacaccactatagagagttacagttgcccccaaacacgaatgctattcccaaataaaatagaatcatgctttgggaggccaaggcgggccgatcacgaggtcaggagatcgagaccatcctggctaacacggtgaaaccccgtctctactaaaaaaaaaaaaaaatacaaaaaattagcctggctcagtggcgggcgcctgtagtcccagctactcaggaggctgaggcaggagaatggcgtgaacccgggaagcggagctttcagtgagccgagatagcgccactgcagtccggcctgggcgaaagagcgagactccgtctcaaaaaaaaaaaaaaaaaaataggatcatggcccttttaaagatctgaatcttctctgttattttcctgatgaatcaccatcccatatcttcttagtcctggccagtatgtagttgcgctcacatacgtctattctagctctgtagctccacaaaacaagtcttaagtccaaatctttgcctcttcatgtctgatatcaccaactcattcagcttttcttcacttattgacatagtgtcatgtcctatcactctctgctgcttctttaaacagtggacacaaacatattttctaattttcagtgtactcagtgaaacttggcagttcaccatgagtcaggctaggttgaaaggctttctttagggttgaaagtaaacgaaattggaatcacccaaagagaatttccccaaaaaacctcagacccagaagtgtaaaagctacagaaggatagaactcccatgtctacagacagttctgttactttttgttctgtactattttggatgttgccaaaatcaaattcatcctgaaaacaggaagcaagctaatgcatatgccatccatgagattcccacttctgggtcagttcatattccattcaaccttttccttttatccttgtcttcttcagaataagacatttttcctccatattttcatattaaatattaacactttataggttctactttaatatatggacactttacaggttatacataaatatttgctggttgattgatttcgagattcattcattctgtgctcaaatatttgtacctagagacgttacatgttagaaaaagtgagcagcttctttctctaatcatttaggagtccatatttttcttttctttttgttctcccaacatccttatctcttactcagctcttcaatttataattaccaaataatcactgttagagaatcagcccctaagtaactttgattctggccaactgtaataagatccaaccacttaaatctgtacttactcaataggaaggaatgtgacatcaggaagagtcattccagtgacattagtaagactttatggagtacataaaatttgataagaaatcttgagctgattctttgacttgatttagaagttgagaaaagagtatttaaggcacaacagggaaacatgggctatactcagagaagaccctctgcattggccaaaatatcatggattctggaaattccttcttaacagaaaaaaaaggcttccaaataatcaggctgaatgggaagaaaaaggcatagaggaagcctgaggaagtatttacttgcttttcccatctctttataattggaagagaagatgatctgccaaaatataacccagcatgcacagtatggacaggaagcagccctccatgaactttattatcacagaatatgagcattcttattgatccacagctacatcttctattcttgcagcaagggtacatgtcctttgaccctccacaaaagaacaagcaggacatctctattttcctattgagtctgagtccattattagaaaggacttcccagccatcttttctacttggtattaaaattcccttacagattcattgctaagtgccaattctttttttttcttttgagacggagtcttgctctgtcgcccaggctggagtgcagtggcgcaatctcggctcactgcaagctccgcttctcgggttcacgccattctcctgcctcagcctcccgagtagctgggactacagacgcccgccaccgcgcccagctaattttttttgtacttttagtagagacggggtttcaccgtggtctcgatctcctgacctcgtgatccgcccgcctcggcctcccaaagtgccaattctgactctacttaaacatcacctgtatcagggagctcattattccttgaggtcttacatttctttcagcacattttgttccaagctacacgactttaaaacagagccagcctttggggcatatgttctctttggtgccacacaaaacctgtagtacatgatacagtgttgcttcccccctccttttccttccatatatatttgttttgttttgggcattgcattacttttttgaatttttaagaatctctaaaattagtctgaaggatgttctgagggccagacattagaatttgtgagtttttttgttgctggttgtactttcctatttagaagacagaccgttctgacagttgttgtgtagcttcatgccttccccagtaactaacccatgaacagtacaccccttttatctgacttgttgataatgaccttaaaaatgttaggaaatgggccgggcgcggtggctcgtgcctgtaatccagcactttgggaggccgaggcgagcggatcatgaggtcaagagatcgagaccatcctggtcaacatggtgaaaccccgactctactaaaaaaaatacaaaaattagccgggcgtgttggcgggcgcctgtagtcccaactacttgggaggctgaggcaggagaatcacctgaacccaggaggcagaggttgcagtgagcagagattgcgccactgcactccagcctgggcgacagaacgagactccgtctcaaaaaaaaaaaaaaaaaaaaaaggttgggaaatattggtgtataatccccatgtctaacaaggaagaagtcaaaagcaaaagatagtggtattgccgaaaactcattatttctagttagttcatctgtggaaaaggatatcgttcttgaggagaggggttctattatgctatagttttctatggaaatgtacaaatgctttcctcattgctctggatgactatttagtttaaataatatacctttgtcatggggaagaccatgattgtggcttcttctaccccaactttgaatgagagagcactgtaagcagaaactgccatcagtctcctgggcaggacctggaggtaactttctgagctgtaaaatagtaattcctaagagagcttacaaactgcttccacacagaaaatagcgcagggaggacagttattagtacccctattctagaagagaaagctgaggctcaagccattaagtgacttgccaaaagctgtgacatagctgggaagtggcagatttggggatataaccaggtcttgcaagtccagtgctgtctccaagtagccacgctcacagctgagaacaccttagaggacaatatcgacttcttacagactaccaagcccccagtcatccagggaaattcagagaccaattgactgccaggtggcaaatccacatgtgtactgcggtctttagagatcatttagagcttgcacacatctgtgtcttcttgtgggaaacctctaggtattctgtctgatcagcactgtgaggaagttggtgggaaaaggccactgataagaacaaacaatgggcagaaggaagcacattgcaataaatttccccagagagagttcctttacattccattcaccaaaaacctctctggaactgtcaggttcagaatatcaaccaagaccatatcatttagaattcattggcatgtagaggtgactcgattcctaaaagaagcctctctcccatgaaccacgatgtacgttccacagaggcagaaaccgccgtaggttagcaatgcattttagtctttctctccattcacatttactgagagcacaccacgtgcatgttgctgcaacaggcatttccgatagagccgatccatgagctaacaatgtctgaaaacaaatgttatggaactgttggcatttctgagatttggcctttgccatttgatagactttgcttcccaggatgctgtcattttgtgattttttataattacaaggaatttggtaccatgttgttttcaaaaaacctcctagaaagtctccatgtatgctctagaagttgctctacataacagttcagcaagcaagtgttccttctcttgagctgcgtccctcaggaagctgtacctttagggtgtgctttccactttttatttcctctcatttcactcctttcgttgtttgctatatcctaaaatatgtgaagtgagagaaaaaatatcatttcttctcattaaatctcctgcattaaatctaagaatcctttaaaataatcacacctgataagtgttttatgcatttccctccctggagtgttatcatccatcaagccagtatcatcatccacctgcttattccttgggactaatgagagccaagttaaatagcaaatgacttctcaccccttcctagtcctcatgcctgaggaataagggcgacattaatgggagcgggagagtggtggctttggttgagatgcacgttcacagactagaaaagtgcctcacctccatggtgtatatgtgccaccttttcttaatccagtctatcattgttggacatttgggttggttccaagtctttgctattgtgaatagtgccgcaataaacataagtgtgcatgtgtctttatagcagcatgatttataatcctttgggtatatacccagtaatgggatggctgggtcaaatggtatttctagttctagatccctgaggaatctccacactgacttccacaatggttgaactagttcacagtcccaccaacagtgtaaaagtgttcttatttctccacatcctctccagcacctgttgtttcctgactttttaatgattgccattctaactggtgtgagatggtatctcatagtggttttgatttgcatttctctgatggccagtgatggtgagcattttttcatgtgtttcttggctgcataaatgtcttcttttgagaagtgtctgttcaatactatgcagccataaaaaatgatgagttcatgtcctttgtagggacatggatgaaattggaaatcatcattctcagtaaactatctcaaggacaaaaaaccaaacaccacatgttctcactcacaggtgggaattgaacaatgagaacacatggacacaggaaggggaacatcacactctggggactgttgtggggtggagggaggagggagggatagcattaggagatatacctaatgctaaatgacgagttaatgggtgcagcacaccagcatggcacatgtatacatatgtaactaacctgcacattgtgcacatgtaccctaaaacttaaagtataataataatgaaataaaattaaaaaaaaaaaagaaaagtgcctcacctccctgtgaggcttgatgaatattgtggccagtgagtggaaaatgattcttgtcgaatagacagagtattcccaccccaggaatggattaatagaagacacaatttgagcacttctcagaattatctagtatgcctgagtagagactcacatgggtggaatctgtgttgtctcatcagagggaataaaaagacaatgaggtggtaaatgtgaaaaaagcagccttttagaaaaacattattttcaaatacctttataaatcatctaatttatcttcacataatataaagaaaaaactaataaaaattttcgtatttcactttacataatatgttctcccatatttagggatcatacaattgtattgtcttcaaaacacacacacacacacatacacacacacacacacacacacacacaccccttccaagaaagctgatccttcagaaaataaatcttatttttaagcacttgggttttcaggccagaaaattaataaatcctaaacctgacccatttttgtaacagctaaaaaggagaagaaaaagctagttaaattttgtgtggatccatttatctcttaaaatatgccaaagcaatttgaggtgggggtggaaacaggtatttatctctcatgcgtgattctctctttatatttctatctgttgggaaaagggtaaagaactattcttggtcattattgatgtattgtgttgccactttgtatggtgcctgctgtgctttatcccgaggcatagcagtaatcgttactatcttgactctttccttcatcacaagagagtaaatatgaagtctgaatgtcgttcctcacccccaaattgtttaactctgcttccaaactagtttaagaaatgcaaaatgggaagagctagcttttcttagatacatttcttccttttttattctttcttgggagacgttaagtataaaagggaaaaagtcagttccttcttctctctctttctctttgggtgacagcaatgctcacttagtaattataaactggaaataggagagtagcttgagcaggttatgatatatctgcccaatgtgtttcattccttcaaacataaactttgagagtaaaagagatttttataatttaaatgccaacgacaggaatggcctcatgttttaactttcaaataataaatggggagttggtatttgggcagagtttgcattttactaatcctatatactttgagcttagtttttagaattgtgtcaaatacatcaacatatcaggattatagtgccaaaaatagttaaagtgccttggtcctccctctgtaggcagcaaattgaaactaacatgggaccatgccatccttctagcataatggagaagtctgaactgaggagtatctttgatgaaagacatttaggaccctagaaactaaatcttgtcaccaagactttatagtaaagtagtagcaaaattatttttaaaagactttcttccttttactacccatttcctctcttgggaaagctgatgagcaaattatccaagactcatttctttattaggcaaagtcagaatatttcccctctgaaaatctgaattatgccctcattctttttcaagaaatatctcaaagagcaaatagaattaaacatgacacttgattgtctgattatttggcatgtataaaattatcatgtggcttaatgtgccttaagtgaaaatttaaacttagacctgaaacctttacagttggatgtagcgttgagcttttgcatgttttctgtataataaaccacttttgttttgtttgttttgtcttttaacctacacctttatcattactctaacagatttagggcttctctttctctacagctaagtaagggaatatgtgcaattatgagacatacaaaaaaggaaagggaaaggactttctaagtagcaaatctgtgccatgaagtagatgtggcgtgaagatacagagcctgaggatagtaattttccctgagccacgcacacaggcttttatttcatgccttttctctttctgtgccgtcacctttgagaaaaacgattgcaccttctccaagtctgcctttttaacagctacagttaagttggcaagacttccccagctctgaatatagccatttgccgactccggcctctttgcgagactgactcaaatctgtgatcttctgttcagcatacacatcagcaaagtgagaagatgagcactaaatataggctctattaactttacttttagatttactgccttcaaaaagtgcctattctgagcaacataaacgttattccttacatatgtatgtacacacggtacccagagtcgtactgtgcagccttcaaaaacataccatcagaaagagtaggtgctgagataaggaaactttgccaaatgaaagaaagtcactcacttccaatatcccctctcaagcggctaccgtgaaacgggctgcaaacacattccctgagcatcccttgctgatacagcttctttatatttatatcctactggatggtagcatattgctaaggtttcctgtactctgcttcaagggaatgtaagctttatggcattgaaacatttaggaaaaaaaaagatgtttaagagaattaatagagccgtagtctgtattaggatgtgtgtcatatgtgtgttctataaactaagcatcggtgggtttagagtgttaaagtgtcagcacattccttctccttttgtctctcaggctaacatgagagaaaatagaaaagtcttggctgtggggattggaagctcagggggccaaatgtccttgccagatccttagagcattactttgactcctaaaaatagtagtgtatgttatttgatggcttttgtttccatagttccatcactgacaaaactgtcaatactgttgatggagcagcagcatagcctagagtgatgcattcttacccagaggtggcaataggagagggtccatgtaaataggacgaggtagacagtgcatgattgtaggagaagggttgaagggaggacatgattccaaaaaagatcgttctcaatgtgtcgtctgactcaaccagctggcagattacact

SEQ ID NO: 95 - DNA, 7053 bp, Homo sapiens
gtcacttttatttgggggtgtggacagctgctttcccaggggagtacttcttacagtgggatttcaagacaagatcggcctgaagaaaaattatatttgtatattttttaaaaagtgggaactttgaggctcagagacagagcagaagacagaacctggtcttctgattccctgtgttctgcttttttcattgttccactggacgctcatcagagggaagatctttttcctcaattgattccaacaatgtctcacccatcttggctgccacccaaaagcactggtgagcccctcggccatgtgcctgcacggatggagaccacccattcctttgggaaccccagcatttcagtgtctacacaacagccacccaaaaagtttgccccggtagttgctccaaaacctaagtacaacccatacaaacaacctggaggtgagggtgattttcttccacccccacctccacctctagatgattccagtgcccttccatctatctctggaaactttcctcctccaccacctcttgatgaagaggctttcaaagtacaggggaatcccggaggcaagacacttgaggagaggcgctccagcctggacgctgagattgactccttgaccagcatcttggctgaccttgagtgcagctccccctataagcctcggcctccacagagctccactggttcaacagcctctcctccagtttcgaccccagtcacaggacacaagagaatggtcatcccgaaccaaccccctctaacagcaaccaagaagtctacattgaaaccacagcctgcaccccaggctggacccatccctgtggctccaatcggaacactcaaaccccagcctcagccagtcccagcctcctacaccacggcctccacttcttcaaggcctacctttaatgtgcaggtgaagtcagcccagcccagccctcattatatggctgccccttcatcaggacaaatttatggctcagggccccagggctataacactcagccagttcctgtctctgggcagtgtccacctccttcaacacggggaggcatggattatgcctacattccaccaccaggacttcagccggagcctgggtatgggtatgcccccaaccagggacgctattatgaaggctactatgcagcagggccaggctatgggggcagaaatgactctgatcctacctatggtcaacaaggtcacccaaatacctggaaacgggaaccagggtacactcctcctggagcagggaaccagaaccctcctgggatgtatccagtcactggtcccaagaagacctatatcacagatcctgtttcagccccctgtgcgccaccattgcagccaaagggtggccattcagggcaactggggccttcgtcagttgccccttcattccgcccagaggatgagcttgagcacctgaccaaaaagatgctgtatgacatggaaaatccacctgctgacgaatactttggccgctgtgctcgctgtggagaaaacgtagttggggaaggtacaggatgcactgccatggatcaggtcttccacgtggattgttttacctgcatcatctgcaacaacaagctccgagggcagccattctatgctgtggaaaagaaagcatactgcgagccctgctacattaatactctggagcagtgcaatgtgtgttccaagcccatcatggagcggattctccgagccaccgggaaggcctatcatcctcactgtttcacctgcgtgatgtgccaccgcagcctggatgggatcccattcactgtggatgctggcgggctcattcactgcattgaggacttccacaagaaatttgccccgcgatgttctgtgtgcaaggagcctattatgccagccccgggccaggaggagactgtccgtattgtggctttggatcgagatttccatgttcactgctaccgatgcgaggattgcggtggtctcctgtctgaaggagataaccaaggctgctaccccttggatgggcacatcctctgcaagacctgcaactctgcccgcatcagggtgttgaccgccaaggcgagcactgacctttagattcagtcacctgttcagccggcactgagaagaacgaacacaagaaaaagataagaaatactagagtaaaggccatcaaactacgcgatagtctctgttcttcatctgctattaaccttgccttagaaacacataaattatgagattttttttaaaagttgttaccaaatacacatttcacattgaatcatgtaggatcttgatgggcctttgttcccaaggacttccacatttttgcacagattatgctccatcccattcacttctgcattcctgtaacttttaatccctatgtttgtctcacttttcatctggttgaatggcttttcttagtgtggtatttgctgtcacatagtttttcctgggtgagtctgccaactcacaggtgcttttaggcttgaaatctccatcctatcatttccgttttgcctgtgactgtaaagagtagccattcttttcccatgtattgaagaggatattcttctcttgctttatactactcacgtccttggggagggaaatgcacaatttttttttgttaggctgtaaagaatttaagctgtaaattacataagttagaacaagcccaaatttaatttgcaaccatcagaattcagaatctatagtgaccagtgatcaaggctaattggaaaagagttatcggcccatagctaataagtagtgacagacaaccaagcttcaatatttttctaaagaaattacaggtgggatatgctagaaaaggcattttggggttatgtttaaaaaaacattattgtcccacaatattaccttaagatttttcttttccgcactacctgaacattgtaatacagacaaacttgatttcttctagaagataacattttcaatactgtcccacttctcatcttaaaaatattgtcatgtttattctaatatccaacacaactatcaaaattgcctttttctctagaggatgaaggctgtgaaaaaaccgttcaaattctcttctttttcttttttattaccaggtccattttgcctgacaattgcaaatcagagcatacaaaataaaactgtgcagttttgtttggtttactttcaaaagagtagaaagcttgaaaagattctgaaaccacagtttcattattctcataatccttctgcaactgaaattacatattgcaggagacattttcatatcatcaatgtgacatttacaccacactttcaaagacaatcactgaaacaaaaattgtctttatgagctaaaaatatgcagaatctctgcctagaatctttattcaaacttttattagccagtgaaacacttgcttgccaactgccaagccatacttattaagttcgaacatgtttcacttaaggagagacacctagcttagtcatggcaagttgccattttgtaaactaaggattttggactgagatttcttaaatctttcttcaaatctcccacaagtatatacttttaaattatggagtattttaagtctacaaaaaggtataaataataatataatgaattcctatatacctaatacccagtttaagacaccaaatataacaagtataattacatcctccaatgtaccgtttccttattccacagatatctttttcattattgtgaagtgatgttcagatttctagttttttttctagtttttaattttaacatcagaactgaaataaaaaattatggatacgtgttttgaattgcaaactattcctcaggaattccaattaaatttattttacttgaataggaatgatcataaaagtgattctttttttgtgactagaaattcttaagccgatggtcactatagctcatccttaatgtatggctcatttgcttttgtcactaaacggttttgtgttagaaccaccaaaattatagcttttaagagcttcctttgaccactgtctttttcttaccctacttctcttatctttgatcgtatatttctcataatgtgaaatatgatgagattcacttaggggcagcatgttagttttgggaggcaatgtcaactgtgtctctgaattcctgtcttccaaattgaagccagaccatgctgatgacctcaagtagcactgactatttgacaatagggctgataatgtaatcggcttgaattttgacttagtaactttttatgtaatactttcggagaaattctctttaggacaaagcagagagtccaatttattgagggatagattgtatctcttaaagtggtcatattattattaattttgccaaaagaagaagaatttattgaatatttatactataaaatgcagtaacattctacttgcttattacatttaaatccttgtgtaactgaatgtttacatgtcaagaggaaaagctgtaagaaaatgctgtcacagacccatccctgtggcatcgtcagcagaatactgcttgcttacaatctttattatgcattcttataacataacctcagagtatctttaccaaaggtttttaaagtaaatctctttttaagatagacttattcttttataataatgaatgtgcactcatacatatgtagaaacatttagatttagagttttttttttctttcacaaggtataataaggaaaggatcctacaatattttattctagggtttcttaaatatatgatttatattactgtcttttctattaatcatttgatttaaacaatgccaagtcactcttttttagttgcatgaaattttgcctgcaacagagagaaaaagattgtattactttaatgattataatcatactgtctgctgatataatatcataattgttgtggtttaaatacataaatagtagaaaaatcagagtctataacagaaagtttgtaaaaatatactgattttgaaaagtatcaggaatataaatatttggtaattctgtgtaacaagagagacatggaaaaggaaaaaaatccactatatcatgggctctgcagaacatatcaaaataggatttcttaaatttttcaacccccagaccatactgactcaacatggagtctcactggccaagaaaattgcctttaaaactcgaaaataaggccaggtgtggtgactcacacttgtaatcccagcaatttgggaggctgagacaggaggattgcctgaggccaggagtttgacaccagcctgggcaacatagtgagaccttgtctctacaaaaaataaaataaaataaaaaccaaattagccagacatggtggcatgcgcttgtttaaaaaaacaaataaataaataatcgactcaaaaataagtcatgtgtcccagcataaggcatcaggttgttagatgctggcatctctgcagctcaaagatgtgggttctttttcttgtcattaacacattgttatttctgtaggagcaacttctctgatcaaaattacttttctgggtatgtgctgattaagggggtggacttatcaacactataattgttccctatgaaagattccacagagatgtttatggtgaggtttaaaggatatgaaactctacatttaaacaagtattttatatttgggtacagaggaagaaagagagggctttttccatggggctatagtagagagttagtggaatatagacaggactctgaaaacacaacttccagccatttttttagttagtaaaaatcctattaatgtgaaccagccaggaataacagtgttatttctattggatatggtttgggcttctcttgtcaaatctgtgtcggctgccccctgatccttccattatcaagttttgaagggtgttggggaaattatggcagctgctagggagatcagggaaacactgatgtaacctcaaagcctctcaccattcctcttggcttggaaaggctttattttttcatatacatttctagaaatattgctattctaccttagtatttcacatttgtagttcaaacaagcgattgtccatctgttgcctagagctatagtacatgtgtgttatgaatgaaatatgacagcatgttccatacccctgctttagccatctgtgggaaaccagcaaactgaaaaagacacctctgcaaaatgtgcctcaagtccatttcttgggatcgctcgtttggtgcactctcgtgggagacaatcagagaacaacatatacttgtgccttattttcaaagaatctatttacactactatgaatattccactgaagagtcaatgatgtaaatgataaccaccaaatctcaaaaatatactcaccaaaaagtaaaaaagtaaaaaaaaaaaaaaaagaaagaaagaaaagaaagagagagaagtcaacttttcatcttaatatattctagtagtatttattttttccttgtcttggaagtatctcataggtctttaaatgagtaaaacatttttatgccagaaggtgatataatggatgttagtgttttttatttgattttacagtagttttagtcagataatgaggacagagacttcaacttgattctttaccaccattcagcatattttttaattgtcttcattgtatttgcttaatagtggtccagacaagttcaaaacttgttctcagtgaggcattaatatggtgcaaccatgaatatttcaggccaagttattcacttgacagataactagaatgaaacttttctcatgaggctgttgtttggttagcatagccttatttcaaaccttaaaaagttacctgactgaagctactatgacttggtaaggattcttcctctcttgctttcttcctcccttcctttcttcctcttccttcctcctcttcttattttctttcctactttccatcctacctattagtgttgctgtacttggattttttgtaaattaaatcaatgcattatgattttagggaattatgattatattcataaggggaaggctaccagaaaatatatgtggcatccataaaatcttctttt

SEQ ID NO: 96 - protein, 606 aa, Homo sapiens
MSHPSWLPPKSTGEPLGHVPARMTHSFGNPSISVSTQQPPKKFAPVVAPKPKYNPYKQPGGEGDFLPPPPPPLDDSSALPSISGNFPPPPPLDEEAFKVQGNPGGKTLEERRSSLDAEIDSLTSILADLECSSPYKPRPPQSSTGSTDPVSTPVTGHKRMVIPNQPPLTATKKSTLKPQPAPQAGPIPVAPIGTLKPQPQPVPASYTTASTSSRPTFNVQVKSAQPSPHYMAAPSSGQIYGSGPQGYNTQPVPVSGQCPPPSTRGGMDYAYIPPPGLQPEPGYGYAPNQGRYYEGYYAAGPGYGGRNDSDPTYGQQGHPNTWKREPGYTPPGAGNQNPPGMYPVTGPKKTYITDPVSAPCAPPLQPKGGHSGQLGPSSVAPSFRPEDELEHLTKKMLYDMENPPADEYFGRCARCGENVVGEGTGCTAMDQVFHVDCFTCIICNNKLRGQPFYAVEKKAYCEPCYINTLEQCNVCSKPIMERILRATGKAYHPHCFTCVMCHRSLDGIPFTVDAGGLIHCIEDFHKKFAPRCSVCKEPIMPAPGQEETVRIVDRDFHVHCYRCEDCGGLLSEGDNQGCYPLDGHILCKTCNSARIRVLTAKASTDL

SEQ ID NO: 97 - DNA, 7067 bp, Homo sapiens
aatgtctcagttctgttcccttcaggcttcgagaccaccgccttgctgtgtcccgtagtggactgagggcctgcaagagggagtgagggctagtggagggccagctgcctgtgggggctggacatcgtgtgggaactttgaggctcagagacagagcagaagacagaacctggtcttctgattccctgtgttctgcttttttcattgttccactggacgctcatcagagggaagatctttttcctcaattgattccaacaatgtctcacccatcttggctgccacccaaaagcactggtgagcccctcggccatgtgcctgcacggatggagaccacccattcctttgggaaccccagcatttcagtgtctacacaacagccacccaaaaagtttgccccggtagttgctccaaaacctaagtacaacccatacaaacaacctggaggtgagggtgattttcttccacccccacctccacctctagatgattccagtgcccttccatctatctctggaaactttcctcctccaccacctcttgatgaagaggctttcaaagtacaggggaatcccggaggcaagacacttgaggagaggcgctccagcctggacgctgagattgactccttgaccagcatcttggctgaccttgagtgcagctccccctataagcctcggcctccacagagctccactggttcaacagcctctcctccagtttcgaccccagtcacaggacacaagagaatggtcatcccgaaccaaccccctctaacagcaaccaagaagtctacattgaaaccacagcctgcaccccaggctggacccatccctgtggctccaatcggaacactcaaaccccagcctcagccagtcccagcctcctacaccacggcctccacttcttcaaggcctacctttaatgtgcaggtgaagtcagcccagcccagccctcattatatggctgccccttcatcaggacaaatttatggctcagggccccagggctataacactcagccagttcctgtctctgggcagtgtccacctccttcaacacggggaggcatggattatgcctacattccaccaccaggacttcagccggagcctgggtatgggtatgcccccaaccagggacgctattatgaaggctactatgcagcagggccaggctatgggggcagaaatgactctgatcctacctatggtcaacaaggtcacccaaatacctggaaacgggaaccagggtacactcctcctggagcagggaaccagaaccctcctgggatgtatccagtcactggtcccaagaagacctatatcacagatcctgtttcagccccctgtgcgccaccattgcagccaaagggtggccattcagggcaactggggccttcgtcagttgccccttcattccgcccagaggatgagcttgagcacctgaccaaaaagatgctgtatgacatggaaaatccacctgctgacgaatactttggccgctgtgctcgctgtggagaaaacgtagttggggaaggtacaggatgcactgccatggatcaggtcttccacgtggattgttttacctgcatcatctgcaacaacaagctccgagggcagccattctatgctgtggaaaagaaagcatactgcgagccctgctacattaatactctggagcagtgcaatgtgtgttccaagcccatcatggagcggattctccgagccaccgggaaggcctatcatcctcactgtttcacctgcgtgatgtgccaccgcagcctggatgggatcccattcactgtggatgctggcgggctcattcactgcattgaggacttccacaagaaatttgccccgcgatgttctgtgtgcaaggagcctattatgccagccccgggccaggaggagactgtccgtattgtggctttggatcgagatttccatgttcactgctaccgatgcgaggattgcggtggtctcctgtctgaaggagataaccaaggctgctaccccttggatgggcacatcctctgcaagacctgcaactctgcccgcatcagggtgttgaccgccaaggcgagcactgacctttagattcagtcacctgttcagccggcactgagaagaacgaacacaagaaaaagataagaaatactagagtaaaggccatcaaactacgcgatagtctctgttcttcatctgctattaaccttgccttagaaacacataaattatgagattttttttaaaagttgttaccaaatacacatttcacattgaatcatgtaggatcttgatgggcctttgttcccaaggacttccacatttttgcacagattatgctccatcccattcacttctgcattcctgtaacttttaatccctatgtttgtctcacttttcatctggttgaatggcttttcttagtgtggtatttgctgtcacatagtttttcctgggtgagtctgccaactcacaggtgcttttaggcttgaaatctccatcctatcatttccgttttgcctgtgactgtaaagagtagccattcttttcccatgtattgaagaggatattcttctcttgctttatactactcacgtccttggggagggaaatgcacaatttttttttgttaggctgtaaagaatttaagctgtaaattacataagttagaacaagcccaaatttaatttgcaaccatcagaattcagaatctatagtgaccagtgatcaaggctaattggaaaagagttatcggcccatagctaataagtagtgacagacaaccaagcttcaatatttttctaaagaaattacaggtgggatatgctagaaaaggcattttggggttatgtttaaaaaaacattattgtcccacaatattaccttaagatttttcttttccgcactacctgaacattgtaatacagacaaacttgatttcttctagaagataacattttcaatactgtcccacttctcatcttaaaaatattgtcatgtttattctaatatccaacacaactatcaaaattgcctttttctctagaggatgaaggctgtgaaaaaaccgttcaaattctcttctttttcttttttattaccaggtccattttgcctgacaattgcaaatcagagcatacaaaataaaactgtgcagttttgtttggtttactttcaaaagagtagaaagcttgaaaagattctgaaaccacagtttcattattctcataatccttctgcaactgaaattacatattgcaggagacattttcatatcatcaatgtgacatttacaccacactttcaaagacaatcactgaaacaaaaattgtctttatgagctaaaaatatgcagaatctctgcctagaatctttattcaaacttttattagccagtgaaacacttgcttgccaactgccaagccatacttattaagttcgaacatgtttcacttaaggagagacacctagcttagtcatggcaagttgccattttgtaaactaaggattttggactgagatttcttaaatctttcttcaaatctcccacaagtatatacttttaaattatggagtattttaagtctacaaaaaggtataaataataatataatgaattcctatatacctaatacccagtttaagacaccaaatataacaagtataattacatcctccaatgtaccgtttccttattccacagatatctttttcattattgtgaagtgatgttcagatttctagttttttttctagtttttaattttaacatcagaactgaaataaaaaattatggatacgtgttttgaattgcaaactattcctcaggaattccaattaaatttattttacttgaataggaatgatcataaaagtgattctttttttgtgactagaaattcttaagccgatggtcactatagctcatccttaatgtatggctcatttgcttttgtcactaaacggttttgtgttagaaccaccaaaattatagcttttaagagcttcctttgaccactgtctttttcttaccctacttctcttatctttgatcgtatatttctcataatgtgaaatatgatgagattcacttaggggcagcatgttagttttgggaggcaatgtcaactgtgtctctgaattcctgtcttccaaattgaagccagaccatgctgatgacctcaagtagcactgactatttgacaatagggctgataatgtaatcggcttgaattttgacttagtaactttttatgtaatactttcggagaaattctctttaggacaaagcagagagtccaatttattgagggatagattgtatctcttaaagtggtcatattattattaattttgccaaaagaagaagaatttattgaatatttatactataaaatgcagtaacattctacttgcttattacatttaaatccttgtgtaactgaatgtttacatgtcaagaggaaaagctgtaagaaaatgctgtcacagacccatccctgtggcatcgtcagcagaatactgcttgcttacaatctttattatgcattcttataacataacctcagagtatctttaccaaaggtttttaaagtaaatctctttttaagatagacttattcttttataataatgaatgtgcactcatacatatgtagaaacatttagatttagagttttttttttctttcacaaggtataataaggaaaggatcctacaatattttattctagggtttcttaaatatatgatttatattactgtcttttctattaatcatttgatttaaacaatgccaagtcactcttttttagttgcatgaaattttgcctgcaacagagagaaaaagattgtattactttaatgattataatcatactgtctgctgatataatatcataattgttgtggtttaaatacataaatagtagaaaaatcagagtctataacagaaagtttgtaaaaatatactgattttgaaaagtatcaggaatataaatatttggtaattctgtgtaacaagagagacatggaaaaggaaaaaaatccactatatcatgggctctgcagaacatatcaaaataggatttcttaaatttttcaacccccagaccatactgactcaacatggagtctcactggccaagaaaattgcctttaaaactcgaaaataaggccaggtgtggtgactcacacttgtaatcccagcaatttgggaggctgagacaggaggattgcctgaggccaggagtttgacaccagcctgggcaacatagtgagaccttgtctctacaaaaaataaaataaaataaaaaccaaattagccagacatggtggcatgcgcttgtttaaaaaaacaaataaataaataatcgactcaaaaataagtcatgtgtcccagcataaggcatcaggttgttagatgctggcatctctgcagctcaaagatgtgggttctttttcttgtcattaacacattgttatttctgtaggagcaacttctctgatcaaaattacttttctgggtatgtgctgattaagggggtggacttatcaacactataattgttccctatgaaagattccacagagatgtttatggtgaggtttaaaggatatgaaactctacatttaaacaagtattttatatttgggtacagaggaagaaagagagggctttttccatggggctatagtagagagttagtggaatatagacaggactctgaaaacacaacttccagccatttttttagttagtaaaaatcctattaatgtgaaccagccaggaataacagtgttatttctattggatatggtttgggcttctcttgtcaaatctgtgtcggctgccccctgatccttccattatcaagttttgaagggtgttggggaaattatggcagctgctagggagatcagggaaacactgatgtaacctcaaagcctctcaccattcctcttggcttggaaaggctttattttttcatatacatttctagaaatattgctattctaccttagtatttcacatttgtagttcaaacaagcgattgtccatctgttgcctagagctatagtacatgtgtgttatgaatgaaatatgacagcatgttccatacccctgctttagccatctgtgggaaaccagcaaactgaaaaagacacctctgcaaaatgtgcctcaagtccatttcttgggatcgctcgtttggtgcactctcgtgggagacaatcagagaacaacatatacttgtgccttattttcaaagaatctatttacactactatgaatattccactgaagagtcaatgatgtaaatgataaccaccaaatctcaaaaatatactcaccaaaaagtaaaaaagtaaaaaaaaaaaaaaaagaaagaaagaaaagaaagagagagaagtcaacttttcatcttaatatattctagtagtatttattttttccttgtcttggaagtatctcataggtctttaaatgagtaaaacatttttatgccagaaggtgatataatggatgttagtgttttttatttgattttacagtagttttagtcagataatgaggacagagacttcaacttgattctttaccaccattcagcatattttttaattgtcttcattgtatttgcttaatagtggtccagacaagttcaaaacttgttctcagtgaggcattaatatggtgcaaccatgaatatttcaggccaagttattcacttgacagataactagaatgaaacttttctcatgaggctgttgtttggttagcatagccttatttcaaaccttaaaaagttacctgactgaagctactatgacttggtaaggattcttcctctcttgctttcttcctcccttcctttcttcctcttccttcctcctcttcttattttctttcctactttccatcctacctattagtgttgctgtacttggattttttgtaaattaaatcaatgcattatgattttagggaattatgattatattcataaggggaaggctaccagaaaatatatgtggcatccataaaatcttctttt

SEQ ID NO: 98 - protein, 606 aa, Homo sapiens; identical to SEQ ID NO: 96

SEQ ID NO: 99 - DNA, 7057 bp, Homo sapiens
gtcacttttatttgggggtgtggacagctgctttcccaggggagtacttcttacagtgggatttcaagacaagatcggcctgaagaaaaattatatttgtatattttttaaaaagtaggtgggaactttgaggctcagagacagagcagaagacagaacctggtcttctgattccctgtgttctgcttttttcattgttccactggacgctcatcagagggaagatctttttcctcaattgattccaacaatgtctcacccatcttggctgccacccaaaagcactggtgagcccctcggccatgtgcctgcacggatggagaccacccattcctttgggaaccccagcatttcagtgtctacacaacagccacccaaaaagtttgccccggtagttgctccaaaacctaagtacaacccatacaaacaacctggaggtgagggtgattttcttccacccccacctccacctctagatgattccagtgcccttccatctatctctggaaactttcctcctccaccacctcttgatgaagaggctttcaaagtacaggggaatcccggaggcaagacacttgaggagaggcgctccagcctggacgctgagattgactccttgaccagcatcttggctgaccttgagtgcagctccccctataagcctcggcctccacagagctccactggttcaacagcctctcctccagtttcgaccccagtcacaggacacaagagaatggtcatcccgaaccaaccccctctaacagcaaccaagaagtctacattgaaaccacagcctgcaccccaggctggacccatccctgtggctccaatcggaacactcaaaccccagcctcagccagtcccagcctcctacaccacggcctccacttcttcaaggcctacctttaatgtgcaggtgaagtcagcccagcccagccctcattatatggctgccccttcatcaggacaaatttatggctcagggccccagggctataacactcagccagttcctgtctctgggcagtgtccacctccttcaacacggggaggcatggattatgcctacattccaccaccaggacttcagccggagcctgggtatgggtatgcccccaaccagggacgctattatgaaggctactatgcagcagggccaggctatgggggcagaaatgactctgatcctacctatggtcaacaaggtcacccaaatacctggaaacgggaaccagggtacactcctcctggagcagggaaccagaaccctcctgggatgtatccagtcactggtcccaagaagacctatatcacagatcctgtttcagccccctgtgcgccaccattgcagccaaagggtggccattcagggcaactggggccttcgtcagttgccccttcattccgcccagaggatgagcttgagcacctgaccaaaaagatgctgtatgacatggaaaatccacctgctgacgaatactttggccgctgtgctcgctgtggagaaaacgtagttggggaaggtacaggatgcactgccatggatcaggtcttccacgtggattgttttacctgcatcatctgcaacaacaagctccgagggcagccattctatgctgtggaaaagaaagcatactgcgagccctgctacattaatactctggagcagtgcaatgtgtgttccaagcccatcatggagcggattctccgagccaccgggaaggcctatcatcctcactgtttcacctgcgtgatgtgccaccgcagcctggatgggatcccattcactgtggatgctggcgggctcattcactgcattgaggacttccacaagaaatttgccccgcgatgttctgtgtgcaaggagcctattatgccagccccgggccaggaggagactgtccgtattgtggctttggatcgagatttccatgttcactgctaccgatgcgaggattgcggtggtctcctgtctgaaggagataaccaaggctgctaccccttggatgggcacatcctctgcaagacctgcaactctgcccgcatcagggtgttgaccgccaaggcgagcactgacctttagattcagtcacctgttcagccggcactgagaagaacgaacacaagaaaaagataagaaatactagagtaaaggccatcaaactacgcgatagtctctgttcttcatctgctattaaccttgccttagaaacacataaattatgagattttttttaaaagttgttaccaaatacacatttcacattgaatcatgtaggatcttgatgggcctttgttcccaaggacttccacatttttgcacagattatgctccatcccattcacttctgcattcctgtaacttttaatccctatgtttgtctcacttttcatctggttgaatggcttttcttagtgtggtatttgctgtcacatagtttttcctgggtgagtctgccaactcacaggtgcttttaggcttgaaatctccatcctatcatttccgttttgcctgtgactgtaaagagtagccattcttttcccatgtattgaagaggatattcttctcttgctttatactactcacgtccttggggagggaaatgcacaatttttttttgttaggctgtaaagaatttaagctgtaaattacataagttagaacaagcccaaatttaatttgcaaccatcagaattcagaatctatagtgaccagtgatcaaggctaattggaaaagagttatcggcccatagctaataagtagtgacagacaaccaagcttcaatatttttctaaagaaattacaggtgggatatgctagaaaaggcattttggggttatgtttaaaaaaacattattgtcccacaatattaccttaagatttttcttttccgcactacctgaacattgtaatacagacaaacttgatttcttctagaagataacattttcaatactgtcccacttctcatcttaaaaatattgtcatgtttattctaatatccaacacaactatcaaaattgcctttttctctagaggatgaaggctgtgaaaaaaccgttcaaattctcttctttttcttttttattaccaggtccattttgcctgacaattgcaaatcagagcatacaaaataaaactgtgcagttttgtttggtttactttcaaaagagtagaaagcttgaaaagattctgaaaccacagtttcattattctcataatccttctgcaactgaaattacatattgcaggagacattttcatatcatcaatgtgacatttacaccacactttcaaagacaatcactgaaacaaaaattgtctttatgagctaaaaatatgcagaatctctgcctagaatctttattcaaacttttattagccagtgaaacacttgcttgccaactgccaagccatacttattaagttcgaacatgtttcacttaaggagagacacctagcttagtcatggcaagttgccattttgtaaactaaggattttggactgagatttcttaaatctttcttcaaatctcccacaagtatatacttttaaattatggagtattttaagtctacaaaaaggtataaataataatataatgaattcctatatacctaatacccagtttaagacaccaaatataacaagtataattacatcctccaatgtaccgtttccttattccacagatatctttttcattattgtgaagtgatgttcagatttctagttttttttctagtttttaattttaacatcagaactgaaataaaaaattatggatacgtgttttgaattgcaaactattcctcaggaattccaattaaatttattttacttgaataggaatgatcataaaagtgattctttttttgtgactagaaattcttaagccgatggtcactatagctcatccttaatgtatggctcatttgcttttgtcactaaacggttttgtgttagaaccaccaaaattatagcttttaagagcttcctttgaccactgtctttttcttaccctacttctcttatctttgatcgtatatttctcataatgtgaaatatgatgagattcacttaggggcagcatgttagttttgggaggcaatgtcaactgtgtctctgaattcctgtcttccaaattgaagccagaccatgctgatgacctcaagtagcactgactatttgacaatagggctgataatgtaatcggcttgaattttgacttagtaactttttatgtaatactttcggagaaattctctttaggacaaagcagagagtccaatttattgagggatagattgtatctcttaaagtggtcatattattattaattttgccaaaagaagaagaatttattgaatatttatactataaaatgcagtaacattctacttgcttattacatttaaatccttgtgtaactgaatgtttacatgtcaagaggaaaagctgtaagaaaatgctgtcacagacccatccctgtggcatcgtcagcagaatactgcttgcttacaatctttattatgcattcttataacataacctcagagtatctttaccaaaggtttttaaagtaaatctctttttaagatagacttattcttttataataatgaatgtgcactcatacatatgtagaaacatttagatttagagttttttttttctttcacaaggtataataaggaaaggatcctacaatattttattctagggtttcttaaatatatgatttatattactgtcttttctattaatcatttgatttaaacaatgccaagtcactcttttttagttgcatgaaattttgcctgcaacagagagaaaaagattgtattactttaatgattataatcatactgtctgctgatataatatcataattgttgtggtttaaatacataaatagtagaaaaatcagagtctataacagaaagtttgtaaaaatatactgattttgaaaagtatcaggaatataaatatttggtaattctgtgtaacaagagagacatggaaaaggaaaaaaatccactatatcatgggctctgcagaacatatcaaaataggatttcttaaatttttcaacccccagaccatactgactcaacatggagtctcactggccaagaaaattgcctttaaaactcgaaaataaggccaggtgtggtgactcacacttgtaatcccagcaatttgggaggctgagacaggaggattgcctgaggccaggagtttgacaccagcctgggcaacatagtgagaccttgtctctacaaaaaataaaataaaataaaaaccaaattagccagacatggtggcatgcgcttgtttaaaaaaacaaataaataaataatcgactcaaaaataagtcatgtgtcccagcataaggcatcaggttgttagatgctggcatctctgcagctcaaagatgtgggttctttttcttgtcattaacacattgttatttctgtaggagcaacttctctgatcaaaattacttttctgggtatgtgctgattaagggggtggacttatcaacactataattgttccctatgaaagattccacagagatgtttatggtgaggtttaaaggatatgaaactctacatttaaacaagtattttatatttgggtacagaggaagaaagagagggctttttccatggggctatagtagagagttagtggaatatagacaggactctgaaaacacaacttccagccatttttttagttagtaaaaatcctattaatgtgaaccagccaggaataacagtgttatttctattggatatggtttgggcttctcttgtcaaatctgtgtcggctgccccctgatccttccattatcaagttttgaagggtgttggggaaattatggcagctgctagggagatcagggaaacactgatgtaacctcaaagcctctcaccattcctcttggcttggaaaggctttattttttcatatacatttctagaaatattgctattctaccttagtatttcacatttgtagttcaaacaagcgattgtccatctgttgcctagagctatagtacatgtgtgttatgaatgaaatatgacagcatgttccatacccctgctttagccatctgtgggaaaccagcaaactgaaaaagacacctctgcaaaatgtgcctcaagtccatttcttgggatcgctcgtttggtgcactctcgtgggagacaatcagagaacaacatatacttgtgccttattttcaaagaatctatttacactactatgaatattccactgaagagtcaatgatgtaaatgataaccaccaaatctcaaaaatatactcaccaaaaagtaaaaaagtaaaaaaaaaaaaaaaagaaagaaagaaaagaaagagagagaagtcaacttttcatcttaatatattctagtagtatttattttttccttgtcttggaagtatctcataggtctttaaatgagtaaaacatttttatgccagaaggtgatataatggatgttagtgttttttatttgattttacagtagttttagtcagataatgaggacagagacttcaacttgattctttaccaccattcagcatattttttaattgtcttcattgtatttgcttaatagtggtccagacaagttcaaaacttgttctcagtgaggcattaatatggtgcaaccatgaatatttcaggccaagttattcacttgacagataactagaatgaaacttttctcatgaggctgttgtttggttagcatagccttatttcaaaccttaaaaagttacctgactgaagctactatgacttggtaaggattcttcctctcttgctttcttcctcccttcctttcttcctcttccttcctcctcttcttattttctttcctactttccatcctacctattagtgttgctgtacttggattttttgtaaattaaatcaatgcattatgattttagggaattatgattatattcataaggggaaggctaccagaaaatatatgtggcatccataaaatcttctttt

SEQ ID NO: 100 - protein, 606 aa, Homo sapiens; identical to SEQ ID NO: 96

SEQ ID NO: 101 - DNA, 17687 bp, Mus musculus
  misc_feature (1)...(17687): n = A, C, G or T/U
gagggccattctgctttgacacgggcatggccctctgacaaggtggctctagagaatgagcctgtctgctcctcccccaccctctaatgggctctcctgggactgcagtgcagagcccctccctccatgaggaagtcagtgctgtgaggtgcagcagaacacctgggacccagtgacagtgacttgctatgcgccctctgggtaagttatttcttctccctggctccttcctctttcagagctggagaggactccttgtagctataaaggtttgatggtgattactgcagaactgcagtgtgtgtgtgtgtgtgtgtgtgtgtgtgtgtgtgtgtgtgtgttaagcttgctgtttaacagggtgctaaggtggcagggaagccatccttccctctcccccccccccccagctccacannnnnnnnnnnnnnnnnnnngccccccccagctccacacgtgtgtgtgtgtgtgtgtgtgtgtgtgtctctcattactgtcaggaggcgttaagatggccccatggagatgagaacaaaccccttaattaggcactgttcccacatctagagaggaaccagcctgggcccggctgctctggcattgtggggagcctagtccgtgggggcaggagggggcaggagggggcaggagggcacaggagggcgcaggagggggaggctgcggccagggcatctgaaggactcagcaggtttacacttcgctgacctgatggatgaatggggccctgtccacccacatggggtctggaatcttcaattacggcaattacatcaacaggtcggaagggcagcactttccactgaagaggttcagggctttaaagaaaaatcctaaagccaccgttttccctgctttcttttaaagggactaggctgatcaaagacgacccccatctccagtctaattgggccataggtagaaaagaaagacacggccgagttttctgtgagaggtggctgccatacgctcgctcacctctggactcctggctcctctcctattcaggtttgtgtttgtagaccctggttgcccatgctttgcactccgcatctttctgaggataagacctggagccttcccctctgaatctcccagcatgcatcgcagtacaatcaggatgcgtctggactgaggtcagaaggatggatgccatggaaaggtcattttagtctttctgatcatgtttcccccttcagtaaaatcagcatactactgtccacctgtctttgctacagtcccaaagggtccagctgcaaccacataccccaactaatccagcattttctttttcctcagacacctgttaggtagttaaactgaagggaggttcttgcctcagcagcaaatgggtggtccctgagaatttgctagaagtgtagctcttgggcctaactctaggtaagtaggaatctgcctcttacttaccaagctctccaggaaaactgtggacacattaaagcctaaggagggcttttgtggactgaaacttgacacactgagcatgagggagccggtgggagggagcctgtagctcattttcatctgaaaacgaagatttattctttcctacacgagggatgctttgaggcccggaatgaagcagtttatcattgcaaaggtatttcatccagctagtgggtcattcaattgacggacatttgctaaacagcactgtaaggaaggcttgaggcttgtgaaatatattctctgcttaggaacaacttgaagaggtccccctgaagttcagaagaactccaacaaagtgcagcgagcgtaggacttccctgaggaagacgtaatagcttctgtcggagtgaatgcggcccaagcagaccctcctagacggagggcaacacaagcaaaggctctgtagtttttaagaggggggaaggcagcacacctgggccccagggtctcacgggaaccagcagaaccatagcacatttgcagatggtaccacagcttgatcagtgaatccaccacaccttgactgttaaatccaatgagagtggttgtcctgggttagttctgtggcgatcactgtctggtttactttaggtctggcccttcatcggagcctttcgtatgcaaggtactattatgtttattgtactgttaatttatttgagaggcgtattccttcaaactcctcatggagtctcatggctgaggtttattggtggcttcatattctacttcttgagaattttaagatcatgctaagctgggtgtggtggcacatgactttagtccagtacttgggcagcagaggcagtcggttctctgagtttggagccagcctggtctatagagtgagttccaggacagtcaaggctaaacagagaagctgtgtctcagaaaacaaaacaaaacaaaacaaaacaaaacaaccatcccctcccccaaatcttgaagattagggaaataagggaataggccaccaggtatgttatcaatgggtgtggactttttgaaaaagcatgggattatccccatgttaactgggcattgtgctataaacgtgtgttgcttgtcatcaaagctgttgtgtagaaacatgggaggtttgcctcagcctctctcccctagcgtcacctgagtatgtccacagcagcagtgggatgtgtgtggctgccaggcttaggacaagggacagaaatggagatgccatggtggatacaaaaaaatatgacttcttaggtgccccctacgaggtagcttgcacaccggatcaaccaagagtgtaaggagcatatctcccgaagggctaatgtgatgtggagtctttggtcacagccagtgagacagggagtgggttcattcatgtggctgcatgaagatgcaaagtcacttcctgtcaggggcagtatgagtagaaaacaaggcctgcaagaagtgaccagagggtgagctcttggtggctcctccaggccaccatgggtcttggttcctcgtggaatgcagtcatagcaaagacttaggtatcaggacttcttggtagttgaggacagcagtgtgtgctgtgtagccaggttcttcttgcttagttctcagtgactgagctaaaggcaaggactttgttttgcttgtattggatagcacccttggatgctgagttaaaatttaaccaaacttgcaaataagggttatctgtccatccctggcttggacatcagggcaaaggcttctttcttcaccactgccctcagcgtgcaccctctctctatttggacgcagagtgaggtgtttccctgtcatcaacccctgtcagtatatagggacgtaggtgaacagtgtttaagtaacccaggaccttgagctccaagtggatctttgctgtgaatgtggcaagcagcacaatgccatagacagagcctgagattaggaaccaggcctggctggattcagatatgagtctctcatctggcaggatgcttggacttcgctttcccaccactgaaggcgtgatctgcccttgctgcatcacgaagactgaaggaggcaggacagtccctcagtcgttaggtagctaagaatcttggtgtgacccagcctcccaagagcctagggctagagaaccagctgccttctgttcatgaagctgtgtcagcgtcagagctgggaacaggagaatctagcatagacctcacatcagctgaataaagaaactgaagacaggaaggttccaccctgtagccccatggccacatatctatccttagaaatgtgtatgtatgcatatatgtgcatgtgtctattcagttatgacacacttattgggtttacatattccagtttcaggagagccaacccccttttctggcatctgaaggcaccagaaacacacaggatgcacagacacacatgcaggcaaaaacacccatacacataaaacaaaaacaaataaatcagttggttttacacagctgttctgagagccctccctgtatgtaggatgtcttattttagtcaggatgggctaggtaacactttaacaacaaacagtccccaaatctgtggctggaagcaacacacacccattcctcagggttttgctcttcagtaaagaacctgctgacacctgctcttctggcctacacccaccctctcaacctaactcgcagaaacagctgcaacaggggaagagagggtggagggtcctgcatctgctaggaagtgatacctgctgcttcatgcttcgttggccagaggatgtcagattgccacacccaacttcaacaggcaaggagtagcagactcctctgggaaatgagatagggaaataccaagagccctatgatcgataccgctgaaagcagcagtctttacatccaacctctgatacctttttttttttttttttttttaccctgagctttagaggaaatggaggctgagttggtcttgcccattcacctgtgggatttcatctggaaagtctgactgcaaagtctgtcacccatgatcctttgtcttacaagtggctgtattcatgacaggagacggcagaggatggatggcaaacatgcttcagggtgtcagtggctgggtgccacagcctttgagagaaagccctgctggaggaggcgactctcatctctagatcttgaagaggccagatttggatcccgagagatgtttattctttccattcttacccccccccaacccccaccacatcagtgtgagaaccaactctaaagttcggttagtccgtccatccatactcttggcttactgccctctggcaggagacgcctggagggatggggccttacaaggaagctctctggactgggcttgaccagggagctttcctggaatgtgccctagggagaaatcagatacaagggccaagtaggaactggggttggttacagagttagtgcaggacccctccttccctctctgcctccctccctcccttcatatctcttcctgttcgcccctctcttttcctccctgcctccctcttttcctcagccctcctgtctgtttaggctggtgctgagtctgtgtgtatggagatggagttggggtaggaagataggtgtgggggaaaatggttgaagcagggagaggaggaaaagttttggtccctggggtcttatagggaaaggtccgagtgtttggctagaaactcaaggagaaacctccacagggaggctgtgaccccatggaggagtgtgtgtaaccggaggaaaagaaaataagcctcccacaaggtgtgcagcctgtgggtcatgggggagtgccaggctgccgctcaggctcatgctgatgagtcaggaacagaacatttgccagcttgctgcagcctgaaggctgctgcctggggctggccctgtgcacctggcctcacccacagctgggttccagcaagcttcttgccctcccctttcctccaggagccatgtttgggagggcaactggaacagaagccagggtttttggcctcctctctggcttcctccccgactcagagttggggagaatttgagggtcagggatagaacagtgcttccaagatggtttggatacctggggagtaagaggagctcgggccacccttgtatacactcaacagctagccacacatgtgtcccttccaagttcatcagctgccagtgttagggtccaagaatcgctgaaggaagactcccccctcccctcaaatagtatgtaaaagcaaagagcatttgttctgcagaaattaccagcatgcaagggtcaaccattcatcaaaaggggtgaccctcagagggactctgaggtcccctttatagacagggctaggggaattttccagaagggttagctaagttctattatgattggtagggagcaaggcagtgacatgaatgaaattctgattggctgctacgttagttctattacaactgctgagaccttgaagagtttcagaggccggctcagttctggctttgatgtctactccagctctgagtcccagaagctgactcagctctagatcatcttccctaagtcaggggccatcagtgactaaagggaccatcggcattggctccctctgaggaccccagactgcatccctgggaattgaaacttttctcaatttgctgaggttttttggacctctcaccaacaaagagcctgactaatgttcctcaactaggaacactgttgtgtgtgcctttctgggacccacacacaacactatgcaattctttctcaaccctttatcttgcttctcttccatactgttggagaatatcagcacacctcagaaggcatgtaggccagcagttgctaagcccagtggatcatcacccaggaagctcttaaaaacatggtctctaagctcgggatgaggctcatcgggtagggtacttacactcataagttgggcacgttggtccatacatgtaaccctagcccttcaggagggtaggtgcaactatatactgagttcaagatttcaannnnnnnnnnnnnnnnnnnnnnnnnnnnnnnnnnnnnnnnnnnnnnnnnnnnnnnnnnnnnnnnnnnnnnnnnnnnnnnnnnnnnnnnnnnnnnnnnnnnnnnnnnnnnnnnnnnnnnnagagagagagagaaagagagagagagagagaaagagagaaagagaaagagaaagagaaagagaaagagaaagagaaagagaaagagaaagagaaagagaaagagaaagagaaagagaaagagaaagagaaagagaaagagaaagaggagattcttagccttggttctcagttctgacatttcattcctgggcaggaactgattttgcaggtctcatgccctgtgggccatcccttgggaggtcacagtggggacgaagtgtgttaagggcttggtcttggcaacaaactttccatgtggatttatggcttgcattaagggctagttctccagacctgctgagagaaccagcattgcccctccatctcatttctgcaggttgcctggatgcaggcctcccgcaaggagccagtttctgtactggactgcagccaatccatgaaggggaaggagcccatgggttggccacagtgtccttctggatgcctcctttaatgtggtaaatcagaaatggggcccccagggcttcagtctgtttggctcttaggaaatattgccagtcctacctctgtccaggcctggctataggggagggagggtggattttgtatgggctgagactagtgtctgcatgggtacatagatactttcattttcttttctttctttcttccttcctttctttctttcttcctttctttctttctttcttccttccttccttccttccttccttccttcctttctttctttctttctttctttctttctttctttctttcttcctttccttctttctttctttctttctttctttctttctttctttctctctctctctctctcttccttccttccttccttccttccttctttcctttccttctttctctctcccttccttccttccttccttcctttctttctttctttctttctttctttcttccttccttccttccttccttccttccttccttcctctattcctttatttttgagacaggatctcattatgtagctctggttgtttgtttggaactcactatgtaggccaggctggactcaaactcacagcgcctacctctgtctgcttctcaagtgctgggattaaaggcatgcaccgctatgcctgggtccattttcacttattaattttcagtcctttatagaaagagagtaccagctttgctgcagatacccaggtctttgaacgataggacttgaaggcctggcaggcagagaatgatgggtaagccttctgcacccattgacatacaggattcagagggggtgtagctctgaggatctgtggacctcaaattgtgtgtatgcatgagtatgtagacatgtctattacttggtgtgttgtgtgtatgtgtgtatgagtgtgtgtgtgtgtgtgtgtgtgtgtgtcctctataccctgcctctgcttctatggattcaaccatggctagaaaatatttgaaatctgttctgaatgtgtactaatttttccctgcctttattatttcctaacaatagagtataaatatcatttatttatttatttttaaagatttatttatttatatatatgagtacactgtagctgtctttaggcataccagaagagagcatcggatcccggtacagatggttgtgagccaccatgaggttgctgggaattgaactcaggatctctggaagactagtcagtgctcttaaccacggagccatctctccagcccataaatatcatttatataatagtcatacagtatgaggtactgtaagtaagctagatatacctgaaagaggatgtacttaggctttatgcaaattctatgccatttaaataattcatacatttctctttagagacaggaggttgctatctgagttggtctcaagtgcctgggttcaagcccctgcttttggaacagtgggattccagccacccactgctcctgtgcctttttatataaggaacttgaacacccacagatgttgataccaatctcctgcaaacaccaagcgatggcatttaaaagccaatctagcaaatagggtcaaatgttaccgtaatgtcacatgggctcaacagctatagacattcactatattttatttttggtattttaaatatatttggtttaattattttctatgttttactgtgctttaaaacttgcttccaaatttaaaaaacaaaaaacatgtaaagggcgctgggcatggtgactcacacctttgaccctagaactcgggaggtagaggcaggtggatgtctgtgagtttgaggccaacctggtctaccagcaccgccaaggctacaatgaaaaacaaacacaaaccacagagggtatgtgtcttgttcaaagacacagagcaagctaacatttggaagccctgtcaaggagagtctcacctgtcgcatctgacagtctctggacttgactcaactgaaatgccagttcttgagagagcaatggtcatttctcatgctcttcctccttgctctgtgacagacagaagtggattgtttttcacttgacctgtgctgctcttgctggatgataagtgccatggggacagtgtctcattcccagctgtaccccgagggcacatagttactgaaaagaatgagccacagagcgaactgcagatacacacacacacacacacacacacacacacacacacacacacggacacggacacacagatgccaatatacctctcctctattctcttttaaagtttgattgctctgtgtgccatgcagatgtgaggagcaaggactgagagggcctctggcagggaagcatgatgtctctggaaaggatgctgggaaccagggagggtggcccttcccggccacccacccacaaaggctcttttgggaaagaacgaagctctagcaagcaggtgtcatggggatcccagagatggggcagagagagaacaggaatgagagtggaaagtactatctctccagaaacaaaaaagccctttagggtcaccggatatgtctgtctgccctgggccagtgctaagcttccctcttcttattgtggatgagcatcaacaacacagatctgacctgcatctgctcctgacgcacagctgtgggaagtgggggcaggagggcatgggagccacaggcagggcaggcttacggccaatgtgtgcattaaccaaggcattgctttttcaatacccatctcatctggtactcaaaactcacaaagcgcgaagacaaaagtcaacgggtgtattatgagtcacaccggtcttctctctctcctccctctcccgaaattcgtctagttgtccctgctgatattctcacttctcaggatgactcagacggaaggtttaagcattcacaaccagctgtgtgtggcacagggttccacatatgttgcttgtaccctgctctgatcatttaatgatgttctcctcctaagagagtctgtgacagtgtctgtggttggcttctctctctctctttttttttttttttttttttttttttgcctccataatgttctcccatgtgctggggaacatgcccttagtatctgaggagtcaggttccagccttttggaggagtcttttgttgtcgtagtaacagggagtatcgaggcatgatgggatatgaaggaaagtgagccctgtgctttgctaccgctaaccacaatgcaattccacctctgaaatctggctggtcttgccaagattggctacaaaagtaaaatgcaaactagactttgaagagttaattttaaaatgtaaaccatcttatttaatatattttttttaaaaactgattgcaagtcaaattgtattttaaatatatcagcaatacaaaatatgtgacaaatcaattgcacctgttcttgcttttgtaatatgtaaaactatatgattctaaatgctggaggtggtgtaggtgagtccgtgcatgcatgtgtacatgcgtgagtgtgtgctggtgtgtatccaacactcttccattgagctaggctcctctagagacttggtacaactgaaggtgggaggagctggtggggcaggaaggattagcaagaatagcttagctgcctttatctataaatccaaggctcaggacacagggctgatgtgtctagggcctgtgggtactaccatcagaccaagggacacctccagtttcatcactccatattaaaaaaaaaaatcacctagagaaatggctgagtgaaatttctgcatacagggaaccttcctagccagggcagcctcctcccttcagccctttctagaataggtaatggcccaaggaaaaatggcccagcaggaactcactggcaccaaagactcacattgtccagagccctctctctagttgcctagacaggggcctgtgatctttcttggcctcttctccatgggcctgaagaagccagagtcagccctgagggaggcttgaggagcctgcaggctgggctcagcagcctcagcccctaaatcattcatgcaggggtgggacaggccaggcggcacgaaggggattttcatagattatattgaaagaattacaatggttcgggaaagtaaccgggttcccacagtgtccggtcactcctgtgggggctgtgggagccgggcctgcctgcctctttctctctgagcagcagcacacacagttttttaataattaagtaactttaattgtcctgggaaagcttagcttgccttggggcatgctgcacaaactcataatgttaccaagagagattaacaaatgaggactgagaaatgattctcttttgaaaaagcgcctcactgttaagccttattatccaaagtttagaacctcatttatctgctttggggaggggggtgatgggaaggggggggcaagggacagacacccaagacccagaaactaatgcacatgaaattaaaactccatgcctctgcaatgcagccttgagaacatcagacaggaaaatgttgccatttattgattgcattccggtgactgagggaaaattcaagacagaagaattaataaataatagcattaataaacatccattcttcttcagtgcatctgttgcttagaagagatctcaccttagcgtttgggggtaacttcttctctctggttcttttaaagaaaattattctaaattctgtgataccaccagtgtgattggcacacgaacaagcagtaaataattgatgaacgaatgagcacagcaatgaaaggaggaaggacctcaggaaaaaaaaaaaaaggattgtcctcccacaaatatacatggtcaatatgaaggacaagcaataggagagcattacagttcgcacacaaggagcccaagctgggagacaggacatcaagcgtgtgtcacactagcggtgacacagctggggaggaagggtggagaagctggaaaattagggtaagaggtctgaatgtctaattaatagcccctaatagtttgattcccctggactgcggctatttcctaaccaaaccctagccactctgtggcacggccctggagtcttcttccgttcacatcataagtatttgtatcctaaatggtaagtatcccagtttttgtgagcatgggtgcaggctttccttctcaatagtcgatctatactgactggctgtgctcatgttccaaggaccatgaagctacactggtagttctcaacctgtgggtcctgacccctttgaggggggggtcaaatgaccctttcacgggagatcgtcagaaaacacagatatttatttaatttatgattcataaaagtaacaaaattacagttaggcagtagcaatctgtaattgctgcttcaaaagaattatgaaaatcattttatggtggtggagggaggcagtcatcaccagagcctgaggaactgtgttaaagggttgccgcattaggaaggttgagaatcgatctagatggacagagactttttggctttggatctggagtttcaattattcccttctctctgagcctctgtttccttttctatgagatgggcatggagatgtggactctggtgtgtgtgtgtgtatgtgtatatgctgtgtatgtgtgacagacagcagtagaagttgctggtagagttttccagggacttctatggggagatcattttgaggggtgcttctttccttctatcatctgaagcttcgggtgtaccccagttctcactctgtgtgcctcagatatggctcaggtggcccctccttatgagtactagagtaggagccaagaagccatttgtcctatagtgtcaccttgaccgtgcacagatgtccttgcctgacattgccttcccggcctgtcagtcagtgttcacagagagtcaggtggcttaaacaagaagaatggccgataacactcggggtctatatgcgtcacaactagggaaagtcattgtcttccaggttctttgtgctcttgtgtcacctaagggccttcagggagccacagcagagctctacgacatggaggtcctatgcatctggaaaccaaggctgtgaggattgacgcgcctggtaccaggaaaagctcccaggtgcgtggctggctgggctctgcaaggcgagctgactgatgctgagcacctgtcagggagagcagtttctgaaaagaactagtattactactaaggaccccagccgtccaacccactcccagcatgagctattataaagaatgtgtgtgtgtgtttcctttatcaaaatggtggcaactcacgcagaagggctgctgcgtggtcatttcataactcctatacttgttactgggccactccgtacaggaacacagagagcagtgccagtctttgtaaatttcttcttttgttaaatttttacattttattttatgtgcattggcgttttgcctgcatgtacttctgtgtgagagtgtcagatcttggaggtgctgatagttggaaggacagaggtgccatgtgggtgctgggatttgaaccctagtcttcttaatagcagtcagtgctctaagctgcggagccatctctctagccccacaccaatcttggtacatggcccattagcatttccttttatttaactgttaattttttcttttttcttttatgtgtatgggtattttacctgcatgtttggatatgtaccacatgtgtttatccaggccagaaggcattggatgccctggaactgttgtgagatactatgtgggtactgagaactgaacttgggtcttctggaagagcagccaatgctcttaaccactgagccatctgcccagtttcccaaaatgattagcccaggttggcattggactcatgatcctcctgcctccatcttctggcatatcctatcagtgtgctacaacaactggcttaatttttttttgcctactgatagaccttgggtggttttgagtttgtttgtttgtttgtttgcctgtttgcttgttcattgttttaatgacaaacttgacattatctgtcactgtaatctggtgcagtgaagattgtgggggacagaactctgagggataaatgtttctgtccttagtttgctaattaattgtttgactttgggcaagtatcactgccattgtgggctttggtttctgtcagacgggaccactgagccctgtctgttgtctagtgtccctcataagattcctgtctcttacccccctgagactccccaagtcccagatgcagtgggggcaccaccgaaagggacagtcccagctacagctgtgggtggggcagcccggctgggtgatggggtaagcctctctccttgctcagctctgtgatgcaacgctggattcagacaagtttggccttgctttcccctgggtccagcatgattcaaggcctgtagcgtggcttctcaactggctgatgagctccagacacctctcttggcaatggtcttaacgaggtctctgggaatgtctggttactcatgtgttttgcaagggcagcaagagctgagagagaaggaggcagctagtgtggcttccttcctgagttaatgacttcagcctcgtgaatgactcatccattctgtgcccaggagagctgggtggttgagctggggctggggtggcaggaagatgggtgacgccagatgtgggggcgtgtccttatcctccttgcatggctttgggtcttgatgctctctttaagggtgtcagaatgaggctaggtgttctactcagacacctctctccgctgtctactcagaggtcacaaacttcctctctagtctcagcttcagtcacgcaggaaaaagctaagtgcttcgggaggaatccaactggagagggacgagtgcctgttgtctgcttaggtacattctgctctgtacctaagggggcctttttcacattaacctttcacccagagaactgggataagatctacattcaggtgaactatagaagaactacttcttcgagggatgtccacactacctggctggcttcttcaccccttgtatctcagcctattgtagactccagcgccaatgggagcgggactgtatatacctgctttagagcggcgtgtgaagcctcgttctgttgttctttccttaagggtgcatctgccaggcctgctgctggccctgctccctgtcttccagtgggtgttagttattgtcagtggcacgaggacatgcccatgttgtcatatccctataagctgcatgtgggcctcacatatcaggtctccctgtcccctgtccccaaagtcctaagatgtgcctgtttagtctgggaacgggttctcctggttcctcttcccctaggttcatgttgaattctccctgaacacgtagacccttcgaaaaaaatggttcccttcccattagctctttactgggatttgtgacatcccatagtctgtcaaggatgggaaggacaccatgtgacatgggtgctcgattgctgaataggttgctatcccaggcaagcccatcttactcttaaaactgaaactgctcttgccctgtctccagtcactcacaggacggagcctggagagtgcaaacctcatcaggtatgagcagatctgtggctccatcagcgtcccgccccaaacatgaagactgcaatagtattgcagaaaccgtcccataagaaagaaatcttcgtgattcaggacaaggcatcctgcttgggctttctcttgggctatccccacagactgactttatatgttcggagtagacaaaggagactctagccaggaggtagggaagcaggcctctactgaacgggaagtgaaaaacgagaagcctagggctcagtataaggtgtcctgaagaatgatacccccatctgagccttgggtctgggcaactgcctcttctgcttcctgtcccccaccattctgaggaaccgaaccaacatgtgtgttttctgagacgaggggaaagccagtgcattgcacactagggtcaccacgctggctggctcagagagtacccccctcccaagctttctaatcttttctgttctgttctcgattccccccccccaccccccttcccctttgctgtgcttttaaactccaaattactgcaatcacagggcatgggtggtatttttctctttagaaatccttttccaggcaagtacgtaaaagatgttttcatactttgggctgaaagggaggagagggataaaaaaggcttagttcccaagttgagtatttctctgaaaacagccttgtgaatgtgaatgcttggcctgtcaggcttacttcagagaatcatggcatcctgcctgctgagcctgaagacctgacaagctggcgagggtgtgtgtgtgtgctcggggggagtcccgatggctaagctaaggggatctgagaagggcaggaaagctgtgtgccacatgatgggacaacagggagcattgccgggaacacttgccgggagcacttgccaaaagaactgggtacgatctcataaaaggggcttcctcagactcaaattgtacaaagacacagacaaagccagatgccagcccacggatacccccaggactgctctgcaggagcacgtaggcactgccacataggcatttaaaccagctggtgaagcacatctgtgccaacatcctctaacagtagtgacttacaaagaaatggccctgtgcaggttgctttgctgaacctaattttccttccaccaagggactgggagcggggaggggcaggggtagcaaatacttctggaaaaccaccaaagaactgcagaacaaactgctgggtcttacaggggaagtgggggtgggggctgagtcagacttgctatcctatccacaggtgggaggtagctcatcgtttctggatgacagagcacaacgcaggatccatgctgacgaagagctagacccaaaccaaaaggagtgtgaatggtcgtctttctaaattgtacttcaagcataccaggtgactgtggctgaaacattcactgtgtctgcagttccgaggaaagcccccttactgcccccctcccctaccccttacttgatcttgctctaggattcatttttgactggagagagtgccagtcacaccatcggtcttttagcctgttgagtggtgatttctaatatctatttgcttgtttggagacagggtctcacattgttaactctagttggccaggaactcagagcaatcctcctgcatcagctccccagtgcttggatttcatgcatgaatcaaagcatagctgtttgtttgtttgtttgtttgtttgttttctctagtcatcagtgcctcttgccatgcagagggggctaaggaaggctcaggaagctgacggggcctgccccaggcctctgtcctacctgaggaaggagctgagcctggagtgcagctcaattagccgtggagatgaggctcttttcacagagtccagcatgacctgggactgaattagcctcagtaggcatgccgccatgtcaggagagggagggattccagggggaaaggtacaaggagaggcagattttcccttccctctccaaagacagtaaaggcagtctgcttctctgta

SEQ ID NO: 102 - DNA, 618 bp, Mus musculus
gagggccattctgctttgacacgggcatggccctctgacaaggtggctctagagaatgagcctgtctgctcctcccccaccctctaatgggctctcctgggactgcagtgcagagcccctccctccatgaggaagtcagtgctgtgaggtgcagcagaacacctgggacccagtgacagtgacttgctatgcgccctctggggactaggctgatcaaagacgacccccatctccagtctaattgggccataggtagaaaagaaagacacggccgagttttctgtgagaggtggctgccatacgctcgctcacctctggactcctggctcctctcctattcaggttgcctggatgcaggcctcccgcaaggagccagtttctgtactggactgcagccaatccatgaaggggaaggagcccatgggttggccacagtgtccttctggatgcctcctttaatgtgggccttcagggagccacagcagagctctacgacatggaggtcctatgcatctggaaaccaaggctgtgaggattgacgcgcctggtaccaggaaaagctcccaggtgggaggtagctcatcgtttctggatgacagagcacaacgcaggatccat

SEQ ID NO: 103 - protein, 116 aa, Mus musculus
MRPLGTRLIKDDPHLQSNWAIGRKERHGRVFCERWLPYARSPLDSWLLSYSGCLDAGLPQGASFCTGLQPIHEGEGAHGLATVSFWMPPLMWAFREPQQSSTTWRSYASGNQGCED

SEQ ID NO: 104 - DNA, 1212 bp, Mus musculus
gagggccattctgctttgacacgggcatggccctctgacaaggtggctctagagaatgagcctgtctgctcctcccccaccctctaatgggctctcctgggactgcagtgcagagcccctccctccatgaggaagtcagtgctgtgaggtgcagcagaacacctgggacccagtgacagtgacttgctatgcgccctctggggactaggctgatcaaagacgacccccatctccagtctaattgggccataggtagaaaagaaagacacggccgagttttctgtgagaggtggctgccatacgctcgctcacctctggactcctggctcctctcctattcaggttctttgtgctcttgtgtcacctaagggccttcagggagccacagcagagctctacgacatggaggtcctatgcatctggaaaccaaggctgtgaggattgacgcgcctggtaccaggaaaagctcccaggtgggaggtagctcatcgtttctggatgacagagcacaacgcaggatccatgctgacgaagagctagacccaaaccaaaaggagtgtgaatggtcgtctttctaaattgtacttcaagcataccaggtgactgtggctgaaacattcactgtgtctgcagttccgaggaaagcccccttactgcccccctcccctaccccttacttgatcttgctctaggattcatttttgactggagagagtgccagtcacaccatcggtcttttagcctgttgagtggtgatttctaatatctatttgcttgtttggagacagggtctcacattgttaactctagttggccaggaactcagagcaatcctcctgcatcagctccccagtgcttggatttcatgcatgaatcaaagcatagctgtttgtttgtttgtttgtttgtttgttttctctagtcatcagtgcctcttgccatgcagagggggctaaggaaggctcaggaagctgacggggcctgccccaggcctctgtcctacctgaggaaggagctgagcctggagtgcagctcaattagccgtggagatgaggctcttttcacagagtccagcatgacctgggactgaattagcctcagtaggcatgccgccatgtcaggagagggagggattccagggggaaaggtacaaggagaggcagattttcccttccctctccaaagacagtaaaggcagtctgcttctctgta

SEQ ID NO: 105 - protein, 59 aa, Mus musculus
MRPLGTRLIKDDPHLQSNWAIGRKERHGRVFCERWLPYARSPLDSWLLSYSGSLCSCVT

SEQ ID NO: 106 - DNA, 39600 bp, Mus musculus
  misc_feature (1)...(39600): n = A, C, G or T/U
agccttctgagacagagagcagtgtagctcccagaggcagaggcagatgcagctgggaagtgggaaccagcctgggtttgcaggactgaaccaccaaccccatcttccctggagccagcacaaagggttcacagcatatcctcagccagctggcccagtcctggtaaacacctcgttccctgctccctcgcccttcctccaagaaacaccccttctgcctcagcttggaggatgcttttcggcttacacccttgaacccacaacccaagctcttgggggcggggggcgggggggcgaatcctgacccagtcagcgtcagcacagcccgcagcacctggctcgctttcctctactcagaggccaaaccctcagacacaagagaaaccagagctggctcagctggccagcacacaggcttcctgtccaagtgtttgcggctgggcttcctgctggcggaagggtggcctgcagctctgctctgacatccccgggtggcggccaggcacgtccagctggcacccgacagggctgctgtggcttcactccttgcagctgtcagttggtattcccagggacgctggggtcaggctgtgagaactgttcaagggatcctttgcgagcagaggaaaccgtgaataagaccccaacgtgcagttcaggcttgtcccaggcagccagccagagcatggttcccagacatgccacactccagacggatggacccctgggatttccagaagcccacctcttctatcacctgtacacctctacctgtgttccattgtgggtacaccatacagcttccttgcaccccaagaatgctggtgacagagtccaggcaccaagacaatagccctatcctggctttgatctccccatcctgagggatttaccgctgtggaaaaatcagctactctgtcgcaaatggaaaccaaagaatgaaaatatctgctgggcctaccatgtttactcccccacatttcaagggctgtgacatagaaaatgaagctacattcattccagaaagatccacggagttggtccaagcatggcagggaggcagaactcagttttaataagggaaattatgctgtctcatagaggggcgagccgtctgctacctgacctgcccaacagtgttcacagactgttcagaaagcacttgggtagatgaactcagacctagctcctgaaggaacggctttcccacaacgcctgacagaatgctccagaatctcttccaaacaagggtagggaggtgaaagagacattaaaaaaaaaaaaaaaaaaaaaaaaaaaaaaaaaaaggacagaggaggggcttgcagactttgaagagtaaactactcctttgagggagggaggcagtgggcaagccagctcttgaatacgtttgttgtttctgtggtgaggattccaggtgcccaccccagagcgtgtctggatgataaccatggtcgagcagcgaggacggacagctctcctgggtggcacttgtttaccgggacaagcaagttctctatacgttccctttgtcattcatttctatagaagcccgaaaatgagagtccccatttgaacaaggacacagagcccgaagcgcgaggataaccactgcatctgagctgattcttaagtcagattgagtccagcgtcatccacgtatgcacgtcaatcagcctgtctcacagcctccgcagatctcgctgtgatggcctatcaaaacatctggtgttccgttaagcaccagacactactctatcttctggaaaaaaaaaatgtgcaggaagcaagtcatcttcctaaaatagtctgtcccttccctcctcattcaggacagaggtgacatttgcactattagtgattaacaactccggccaaccttcaaaggcagacgtgctgttcagttctggcgagacattggagggaagctatgttaacaggtctgtgacctgttcagcctcagatccaggccctaccagcccaccctccactgccgcgtcctctctggccggtagcctggaatgacagcagcttcctgtcttgtcagtctcaggctgctgtccccacgtgtccctatcaccttccacacccgcatgactattccctatctcctgaggtttcggatgggttatgttttcaacgcggactctttctggctctgaatcagcgtgacatgttaaacctcagcccagaaacagtcaaaatggcgggaggaaggagcaggtctggcttaacaaaaagacaaatgcaaggccccgggtggagcatgggagagaaagatgagctacattggtggcttgtaggtgaggtgccatgttgggagttaggacacccactctcaggcctgcctgtaccccatcccttctcacacctagcttcagaaggctgagccagccctggcagcctctgaagccatgacacaagagcccatgcttctcaagttcatgggccagatcctatgactcagggctctgggcaggccgagcttccatatccacgtcacctcctccatcaggacttggtgagaaggggcctcccacagtgacatcatagaaggaagcaggtgtctttccactcatcccctcccccaggcctggagtttctgggacacagaagggactcttagccctgcctcctccagccccacgcaaaacatctcctgcctcaccagagtgagggtctgcctgggatgccaaacagcctcgccctgacatagtctgtggaaaaaggaaaaatctgcatcaaaagaagaaagctagaccctcagctccaggttcacatggccccatagcacaaccattgctaaagctgtcacttgttctatgtcatttcatctgtccacagtggtaaagagacacgcccaagtgcccatgggctccagctttgcgcatttgttctgagtcctctaccaggtgctggcagtttgcagagatgagtaacctgaggtcctgctttaaaaaaaaaaaaaaaatacgaggtttgtatccaagatccaacaactgagactttggtcatgtgacccttgccacctctgcattctcgtgtataaaacggacaaaataagcagcaagttgtaaacgggctcctgtaggtaactaatttggcacaggatgaccattctctaattaataaatatacacttacgcgcgagcctggggaagcctctggagtgaaacgcactgctaagggcttgcttctgtaacaccaagcctgtcacacacaaagcctctcgccccagaataagatttttaaaagagaaaaagaagaagaaaaaaagcttgttctttctcgtttgggtgatcgttagcagcctgacctcggaggcatcccacgcgcactctctgtccccctgacagcctggcccgcacccctcccggccggatgtgcgcgcagagggccgaggttgggagcgtttccgggacggctgggtcacagtgtggctctgcagtgtctggcagccccacccttcctggcagccaaacctcctcctcctccggcctctgaaagcctgccagcacccgggagggagagcaggccctggagacacaaggtccagcttcgaggggagggcaggagcccgcagaggggacctggcgctcctcccgccctcctgacctgccacgcacacgcatcttaacaagtgccgagtgctcctcctagtggaaaaggaaggatgcgcgaccccggcttgctgcccttctctgggctccttcccaggcctgatagatggccacaccagcaagtctcaccccacctcacagtgccaaaggcccattcatatccagtgccatttgagtgtggaacacttttaggacccattttacagatgagaacactgagtcggtctcaggccgaactgcaactgttttctttgcatcagtgtgctactctcaaaattaaccacaagcaagacctgtctcatacccatggcccatgcttttccacctggtcacacacagacgtcataccatcttgagaacagacctggatctctctttgccctctgaccttgatcactagaaactgagtgctctggggatatcctgattaaaagctttttggctgactgatcactgctgccccttcagagccagcccctccccttccaacaacccacctaacaccaccaaagcaggagtcaggggctttctgctcactgtgggcagagtgagttccaaaagttgcctctagataactctaccatacaccagctgcttagcctggttcacaggctatagggagtggggattgtctccagccctgtccaaagaaaccacagaggccttcaggctgtcccctggaaagtctccaagcccctgtcctcatccctgcccatggtggagagagggcattttggagtaagtcactcatcaaagaggggaggtgacccttgtcctgttcagaaaccggctgaatgaagaagccacatgctgccttgggaatgtgtgtcctggggagcagccctggaggtctggagaccctagatgggaggttcttggaagccacaggaggaggaatgtccgctgcccaccatccccagctgggatcctgtcacgggaccgccctgggcctgagctcaagggcagagcaggcaggcagtgagctgtgttttctgggaaggcagccagtccttgttgccctccggcttccgggcactgagaatggtagagcaagcactggccgcctcagctccctccagtccaggctgagtgggcacaccctacttctggtgccagggagccacaaacactcagctccttgctctcgaggggaggggaggcacagtggagactcagaaacacaaaatgcaagtccctggtagccgatcctaagcgagtcctgactcctcttcctggttaaactgtctgagggcaagggagaagcctttggcttggcctcaaaagatgccaggctcagccaggttgtggtgacttgtgcatttaatcccagcactccggagacacatgggaagcagaggcagatggatctctgagtttgaggccagcctggtctactgtgatttccaggacagccagggctccacagagaaaccctgtctcaaaatagatagatagatagatagatagatagatagatagatagatagatagatagatagatagatagatagatatgcagagctctatctaatcctaggtagtatgccatgtacctgtgggcacatgtcatttctcctaatcctagcttcagttagatgtgctaaccttcctggttgcttaaagccccacagcctaaaatgtatgtggctacacctgaagcacgactctcctatgagggctgcagtttcttggtgtcaaagacttgagtgccgccttatgtaatagattgctattgaggaaatgaagacagacttgggctcttgacagatattatgtgagactccgaaaaggaagaggccgcctagtccctggtagctgtcacagcaggtacccttgactactagggacaaaccacacatgagtctggaactcatcagattcctcactagggcactcagcatgcccagaagatcccagaagatgaagtttgagggtctcaagtcgtttctcaagacgacttgtctttcaactgcaaagggctctcccgtgagaggggctacactacagctgcctggcaagggccctaaagtgaagatttgtaaagaccgggttcagattccttgagaaaagaaccttctaaaggctagtttctagcagactagactgaggtcataggcagtgcgcttccagtcacgaggagtgtttgtctggatctgtgatggtgggggggtgagtctacgaagagatggtgagtgaagagcctccgcaaatcctgcccttgtcctggggattcctggcttctctgttctccatgggctgtgaggccttccctggttttaattagcaagtactgcctgagaggttactcagaacacgagcgcttggctagatcgcactgtgcagaccgcctgaagcgttacacatcttgtacacattattccaagtaggagggactgggtatctatcaggacaggcagtttaatgggttataaatggttctgctcccacgtagccctccgtacatctctctctctccctttgctgtggaaaaggagctcacgactaaggccacagagcctgtggccttcgaaggaccaggacaaacaaaaccaagtataaagagaactcacgccggagtgtggctggccagcttttcagggctgggtggtccccaggttgccacctatgagtttggtgtgtggtgctcacctgccaaaatccacgctcccgtcagattaagtcactgagagaagatgctaggcagtgaccggtttctaagaagacactaggcgatttgaggggggggggtggctacaacgccaatggttgccgcagagctttctgtcatcaagtcatccctatcagcctggaaccaggccagcagatgggcagctgcagaccagctgttggcctgagaaaaaccagcaagcaagagccgtgacacggagatgcggtcttcatctaagagggagcccagcccagaccccccagcaaagtgcagctcatgtggaagggtactgggtttcttcaggcaaatgcatctcgacacctggattatgctgtgtcttgttttcatctagctcacaatagccaagccctggagtagccgtgctttttagaggtgtcatggtcgaacatcacgcaggagaggaacagcagagggcaggacaggaaggagctccccagaggcagaaagcatctcatctgaggcctgtcctgcagcacctccgaagcaggtcagatctagatcaatacccttccttccgccacaggtctcttcccactagacactgctacacacgaactagaaggagatacgcatgatgtggcacatcctgctatggagacccaccgtgtgtggtcttctctctctctctctctctctctctctctctctctctctctctctctctctcattctctctctctctcattctctctctctctctttctcattctctctctctctctctctctctctctctctctctctctctctctgctggcctcagcaatcccactactcatgctatctctctagctagcctcttccttctgcagccaggatgaaagtctgccttcagctctagggccatctccaggaagcctttcctgcctgctatgtcattacctagtgtatttctttagagagtgtcctcttgtgtttgtttgtttgttcttcatatgtgtagtgtgcacatgtgtgtgtgtatgcacatgtgtacatatttctttttctccctattaacatttaaatgtcagtaaaacagactgttgtggggaaaacccaatctgggggctattgccaggataagggacaggtgacaaaggccagaacagagtggcagggtggggtagccttgggaaagtgcatgcaatagtaaaaaaaaaatatgatgtcttaagctccaatgtcaaatcctgcagacaaacctagattctctccttcatcagctcccttcaaactcccattaaggatgttgtcaggccagaaggcttctgtgtgtgtgtgtgttatatgtgaatgtgtgtgtgtgttatgtgtgaatgtgtagtatgtgtgtgtgtatatgtgtgtgtgtgagtatgtagtgtgagtataatatgtatatgggaatatgtgtgtgagagtgtatatgactgtgtgtgtggtatatgtgtgtttgtggtatatgtgtttgcaagtgagtgtgtatgtgtatgttgtgtgtgctgtgtgtttgtgacgtgtgagtgtatatgtatgtgtatagtatgagtatgtgaatatgtgtgtgaatgtgaatgaagtgagtgtgtaaatgtgtgtgagtgcatacgtgtgtgtgtgtgtgtgtggtgtgtgtgtgtggtatgcgtggtttatgtgtgtgtgtttggtgtacgtaagagtgtgtttgagtgtgtgtgtggtatatgtgtgagagtgtgtatgagtgcatgtgtgtggtgtatgtgtgagagtgtatatgaatgcgtatgtgccatgatagtccacccacaacacagattcctctctcatctaagtacctattggtgcgctcagtggaggccagaatgactctgttcctggacctaaaatccctccacgtggacactgaccgacaccaagaaaacctcctaaagaactgtccgtccgtctgtccgtccgtccgtccgtcttgccttctcttaaaagccaaggatgggaaagacacacattgccctgggaggtgccgttaaccaggaaatatcctttcaacaattcacctgctcaacaatcagctgaatggcttgattttggttgtgattacagtagacgcccatggcctggcctggttgggccgcagagttggtaggatgtcaggatgggggtgtcagactctgcctctgggggagtccctgcccctctcccagcctcagtttcctaaccataaagaaggggatggaggttggttctaaggaaaatttcgcctctgacctttccctcgtaaccatgtatgagcctatctctgccttctgcccatcctcctcctgcagggtcaggcatttttacagcccatgtctctctttatatcatggtgaagaagaggaactgtgtgccactgaattcaccagtgagagcgtaggagtatctgatgggagaaagccctgccagccctgtctgccaatgctactcactgggccaggtacagtgtcagcatctgccagtagctgatagtcttggctggctggcaagagacctcacccatcccacccacctcctctgcccttcttctctggccttggatggctctcgggagttcccgacaaggcagcatacccacagccaaggtccccgtgcaccactgcaacctgcagaatgtacaaaaatccactctaaccagacggtgtaccttctgccacccatggtgggggcagtgggggagggaatgagtgacacagcctgagatgggggagaggcagagggggctgctgtcacctttgtctccaaggacagctgagaactgtcatgaataaagattaatagtgacagaagacaggctgaagtaagaaacatttgcaggctctgtggcaggagagaaaataagaaaattcctcctgctctcaggctcaaggtcttctcctggccaaaccccagcctccgcccagccactcacctcaacattgacaagcagctggccatcactggatcatccttgactaagcctcaaaccccagctttcagccagttccctctctccttctctcccctgagggtcatccagagagaagcagaacttgcttgacctgacctcaagaagctaggcccccaagggggggaccactggagccttacccccctctccccagcccccacaggaagattcttgtttaacacacaatgagagacacagaacctggagggcacagggcagttgcccccctccccaagatcttggccgctggcccatcagggctggcagtggctcagctggcctcagcgcactcccctggaaagaaatccctgctactcactccttgctcctaccctccagctggcctgcagtaagtcagagctattggctcaaatcctttttctttttaacctttccctcaccaccaccaacactgcttctggggaaaatggtttgtaagatattctgctaggcctctttaaatgtctttattctttgggaaaatgctttaatataaaggtcctagtttctacaccattcagacagaccttttcagagtctccagtttgggacaagaagattcagacctccaaaatcccatagcaccgtgcagagagtcaggtaaggagccaaggacctggtaaagaactaccctttactacccaaggtctagcccttccctgaagcttccctgagtccattcatcacagggaggggccaggacctttgaacctcacatctaaggcctaaagaaggcaggtaacaagtttggggacccccatggatgagcagaaggaccttttaagtaacgttaacttctcactgggaaggacggtgagttcacatctgcctcctggtccctacggggcaaatttttacttccctctcctactatgaggggaagaaagtgctgggactcggacactctggagacagcttctggggttgagtacaaccacaacttccaggcagacgtctccctaaggggtcctttccttggatctgggctgggattcaaactccagccttgatgacttgcaagcctcggttgaaaccacatggcccagggtagagcttctcgagtggagggaggaggagggcacagttcacagtgagcgtgggcagctgcctcagccctggtttagctcttgggagtcctgtgatgcctagatcctggagctgtttagaagctttgcactttaacccaactctgagcaagtagtcagaatagattctactggctcctgcgggtgtggcttggaagaaggcaccagggcaccctctatcatcctcggccctgatgctctttggacttctaacaggaactgaacggacacttccagtggtgagaatgagccacggaaagatggtgccatctcagtcatgaccaatcaggtaaagattcagctgagccctccccacaggcaagcacagggggccctggatcctctctccagcctgctccagaggtccccaaggagtccactttgaagcatatcttgcccgatgggttccctctgcctctccctaccttggggcgtgtgcctgcatacttaagcaccatctgtaaagggtatctggggtaccgagcctcgcttctaaggtccaatgataacaggtaacaagcttggggaaccccctggtggaagttactacctttggaataacttcaacttctcactcattccttgagtacctactatgggccggtcattacagaaggctagagagaaacagtaggaaagaccttcattctttgcaggcctggcccttgtaactggcaggcgacccctggcctgaagatgggggaagggtgaatgaaggatggacgagcttcattagaggtctggtgggaggagcacttgcttatttggggcaccccaggaaactctcacatagatgacactgagacgagacaccgagacaagaggatgtctgacgatgacattgatgggaaacagggatagttctcgaccagcagttctcaacctatgggtcatgacccatttgggggtcacatgtcagatatcctgcatatcagatgtttacattatgatgtcataactgtagctgtgatggtttgtatatgcttggcccagggagtggcactattagaagctgtggccctgttaggtatgggcttgttgaagtaggtgtggccttgttggagtgggtgtggccctgttgaagtaggtgtggcctggttggagtaggtgtgtcactgtgggtgtgggctttagcccctcatcctcgctgcctagaagccagtattccgctagcagccttcagatgaagatgcagaactcagcttttcctgcaccatgcctgcctagatactgccatgttcctgccttgatgataatggactgaacctctgaacctgtaagacaatcccaattaaatgttttgtttataagaagagttcttggtcatggtgtctgtgcacagcaatgaaaaccctaaccaagacagtagcaaaattacagttatgaagtagcaacaaaaataatgttatggttttatggttggggggtcaccacagcatgaggatctgtataacagggttgcagcatcaggaaggatgagcaccactgtgatctggacagacagtaggacactagcctcagctccccacactccagttggtggattcgctacaaagctgttctggggtcgtttccttaccttcgagatgagaaaaggattcctagctctgatcacatatttatcacaagcatatcttggcatcgttatctcggaggggcaacctttgccgccccccaatcctggccttcaggatatgatcagacccctcacttctgtctctcagccttggccattcctcttggctactgttgcatgtgcctgagagaggatttatggtatcaggctcccactatggaagccaacatcaagttaatggaatggggaggctggagaggtggttaagggtattgactgctcttccagaggtcctgagttcagttcccagcaaccacacggtggctcacaaccatctgtaataggatctggcatcctctcctggtgtgtctgaagacagcaacagtgcactcatatacataaaataaataattaaaaaacaaaaagttaatggaatggatcttgcccctggagcaaaggctctagaaacttaggagcctgcagccacctcacttatcaactccaaggaaacccaaaacagaggtgaaaaaggcagacagtctgagctccttcctccaaggtgacttccttccttgcttacctgtgtggagttctgggtggtctgccaacagcagttgggatcagtgtgttagtgggtaaagaaaaggtgcccatcacgagaataccacaaagaggttttcctgggttctgacaatgcacaagacccaaaatctctacaacagaagctttcatgactgtggctacaggtgacacagaggatacccaggttgaagttgaggctggctgtcacacagggatatacaggtacaagtctaggggcctgtaccagcctgtatattccacctatggccctctcagcagacgggttgagatcatgcctgcctcccactgtggggatatccccgtgggtgccttaccccttgcagccttctcaggcaggtaggggtgaactcagacatcccagacctcaaagcaaaggcataaagctggagctgactacttcctggctgcctgcccagccttcttcttgagagtcagttcagcaggtatgaaagggggcagactcattggcagctcacagggcttcctctgcaggaactgacacttggtaggacttacaggacctgggaacagggtcacaccaccgtcactattggtccaagccacaaagaaagaaaggatacaagtaggacttaagtgatactgagagatcctctatctgctacaaatatcacatgacctcggggctagaaaggacttcccaacctacagctggggccatggtgaacccaatgactcgactctaaaaatggagacactggttggcaaaataatttccccaaactccaaattgtgggactatgatagacagcctattttagttaaatggggcttgctccggtgacccagtagagatctctacaagggacagaaaagtgagccacagtcccagagtcaggtgcctgacaccacagaggccccaactccataattctgtgactacaagtcacacagacaatgtcccaagcttctggaattctgtctaaactccacccccacagttacctgactatagccaggtatgctcctcccaacagttacctgatagcccagccactatgagaggggcttcttggcccctcctgactatctttaagcttttacctttcttactctctagccctccttctctgcgcccccccccccccccatgtggccatggcctgtctctctctctttctaccttctctccttccccctacctttctacaataaagctctaaaaccatagactgtctctgttcatgaaggcccaccatacttgaataatgggctaggctttttcccaacgagctgcgtctagcctcccaccagaaggccattctgtgcttcagccatggaccagaccaagcactctcacccgcgtgggaactatcaagtgccctctctccctgccctctcctcccttcagccccagggcccctattctgttctcagcttttccaaggtgtccatcggtgtatgggatgcccaaagctgggaacctggtgcctaggactgccccttgtccaccacccgccgagctggggtcagtggcttaacacagccaggcacccagcctgggccgcttggaaagtgtacggtagtcctcccatgtccacctgtccagagcactgaaactctggcgagacacgggttctctcccactccctcattcccccacacccacagccctggaccaaatgatgtgcaactatagaaaaaaatcaagaatagtgacagacttagtatcatggatcgctggagagaagaagagtgattaaagcccactgtggaggctcgagtgggaatggccccagttggtgaaactgtttgggaaggattagggagtgtggccttgttggaggaggtatgtcactgggagtggccattcccattctctgtaatggacactttttcttacctgctgacacactgatcccagctgctgttgacaggccacccagaactccagtcagctaaacaaggaagaaagtcacattggaggtggaagctgaggctgtttacctgtttcatctctgtcttggcttttcttggtgttgatgactgaggtgggctgtaggtttctagagcctgaggtttcaaaagcccacaccaggcccaggctatctctctctcctacctacccacctaaagttctcagctactgctccagcctgtctgcttcccaccatgatgacaacagactaacccctctgatactgtaagccagccccagttaaacgcatcctttagaagagttgctttggtcacggtgtctcttcacagcaataggacaatagcacaagccacaccggactccagtcaaacttggtgggtgtactggctagttttgagtcaacttgacacagctggagttatcacagaggaaggagcttcagttgaggaaatgcttctatgagatccaactgtaaggcattttctcaattagtgatcaagagggaaaggccccttgtgggtgggaccatctctgggctgatagtcttaggttctataggagagcagactgagcaagccaggggaagcaagccaataaagaacatccctccatggcctctgcatcagctcctgcttcctgacctgcctgagttccagtcctgacttcctttggtgatgaacagcagtatggaagtgtgagccgaataaaccctttcctccccaacttgtttcttggtcatgatgtttacacaggaatagaaaccctgactgagacagtgggtaagccctcaagccccacagggatgtctcagacctctcagcaacaacaaggccatggagcctcctggctgggagagcaacagaaaaacttactgtccttccttccttccttccagagagtgatgcaccacaacagccccacacggaagcctgggaggcagagggatgggactccagacctgagcccacacagctgtgctttaagcagtaagccaagccaagaatggggaggtgaagaggagctggaacagacccaaggagcgagagctgaagcagctgggccaggaacgactggggaacctggaggaagtctgggagaggtccaggttcagcaggcctggattcccaaccacaaagggccagggtcacaagggacctctagtaagccaggaggcaaagcacatgaagacggcagagaccctgacagctgggtacagaatgctcacagattaaaagagggcagatggtaaaaaagctatacctcaacgactgtcaggttccttctttccataaactttgcttaagttcatataaatcaatcaatcaatcaatcaatcaatcaatcaatcaatcaatcatgctcacttcacggtggaaacatttatattaccaagtctggctgccagcacaaagtacccctttggctacagctcgatcacagcattagtgtgctgagcctaacgcaaacctcccaaaagatttcaactcaccggtgctgatgtctttttaatgaaggctcatttctcagctccagctgaccagtatcaacgatcctgaagaaaaggtttcacttcagtggctctaaattcaaactacagctcaaacagccctgatggggtctttactgcactctgaaacatcacacctgaggtttccatgatctgcactgttcatgaggatcctatagtccagatttacacaacaagccatcaagctctgaagcctcaatggctttcccggcccaaagttccaaaagcctttcacaatcctccccaaaacatgttcaatctgtcacagtgatagtccattgtgccaactcccgtcttaggtaaggttttattactatgataaaacatcctgacgaaaagcaacttggggaagaaaaactttatttcatctaacacttcctggcgatgggtcatcactgagagaagtcaaagcaggaactcaaggtagggcaggaacctgggggcaggaactgaagcagaagatacagttgctcctcatggctttctcagcctgctttcttagagaacccaagagcacgtgcccaagggtagcacccttgtgtacatccacatgttagggatgtcttcaatttttgatcttgaatttgcttcccaagtgctgggcttccaggaaagcaccaaccatgtcatgcttggtttatagagttgtttgggatcacagctagggtgtgtggttgacagccactcttgacagtggagcagcactctaagcaaaaaaactttttttttttttcgagacagggtttcccctggctgtcctggaactcactctgtagaccaggctggtcttgaactcagaaatctgcctgcctctgcctcccaagtgctgggattaaaggtgtgcgccaccactgccctgccacctctaagcaattttaagaaagtgttttctaaaagatttaaaatgtgcagtatttttgaaataaatttccttagtaaaatattcttgctaaaaaaaaaagtagggtaagatttgtttttacaaaagctagctaaaccttaataaaatttgttctgtttggggctgtacgagatgtctcagtggttaagagcactgactgttcttccagaagacctggatttggttccccacacccacatggcagctcacagctgcctgtaaatccagttccagaggatccaatgctttcccatggcctcagtgggtagtgcatgcttgcggtgcatagacacagttaggcaaaaacatccatgcacatgaaataaaaatgaagtctcaaaaaaaaaattccctctgtgcaggaagagaacctgtgatgtgttgtgatggcttacacctacagtcccagcacttggaaagttgagacaggaggattcccatgagtttgaaggtagcctgagtggtataaaaatttaggatagccttctcgtaataaacaaagtgagccttttactcacatggttattattgattagtaagaaagatacttgttggggcgggggagggggcagtgttgctggtgagatggctcagtggttaagagcactgactgctcttccaaaggtcctgagttcaattgccagcagccacatggggactcacaaccatccgtaatagaaactaatgccctcttctggtatctgaagacaatgtacttatataaaataaataaacgaagccgggagtggtggcgcatgcctttaatcccagcactcaggaggcagaggcaggcggatttctaagttcgaggccagcctggtctacagagtgagttccaggacagccagggctatacagaaaaaccctgtctcaaaaaatatatatatatttataataataaataaacaaaggaggagaaggaggaagaagaagttgaagttttatatcctagaaagagtgctgacaagagccgtggcttccttcaagtccttgttctcccagctactcaatgatggagcacacttgctgtgtaactgttgcatagcaaattgtcccccaaagcagcaacttcaacaacaaacacttgtttctctgaaggggattatcctgatctcttgggtacaaggtctctcctgtggttacagtcaatgtgccttaggcctgcagttagactgagatagacctgtccccaggaccactgtggtggccggcagacctcagtttctcaccgtatgttctttccatagtccatcatggcttctcaaaatggtagttgacttttcccacagattttggagatggtggcacacatgcctgaattctagcacttgggaggcagaggcaggcagatctctgagtgtgaggccagtctcgtctacagaagacagagagagagatgaaaaccaatgtcggcagctatcgctccctaacccagacttagtatggcttccctccaagctagacacccttccaccacagtccagtctccaggaggcattcactaaacccaggccacagacaagaagacccctgtctctgaagaggataaaataagattgtatcgatcccaatttggtaaccacctcaccttggatttagcacagggcattagatccagtcatctttaaaggtactgggtctgtgattatggcttccctacccctcagagcactaggtatggcatgaaaagagcatcaagtttgtggatctttctctaagctgaagagctcacctcagaggagaggaagggctggggagtgagcgagaagatggctctgagagttctacatagcaggacactgtcattctcatcccatggagggcctgctgtcccgcgccctgagcatagagtctgacccagctcccatctgtagatacgaagagcaatgtctagccacctcaaggatcctgggccctagcgatggctgaatgtaaagtctctctagcagagatcaaagattttcatggcttccctccaagctagacacttaggggtgagacagtccagttgggtctcttcaccatgaaaggaaggggaggaaaattaccagttaccagtctcttcaaaggataccagtgtgagcctaacaccgatagctgtctctgagttcaaatgctgactgtcattgctagctatgtccataacctctttgggtatgattctttgtaagcaaagtcggcatgcgaagagaatctggactggggagatggctcagacacaaaggggcatgttgggcaggcatgaggacttgagtgtctgaagcccctgaaggtcacaaacactgcaaatgtcacagcactcccacatcaactatacatcaacagagatcctctctgatttgtttatttgcttaatttttgggggggggttgttttgttttgttttgtttttgtttgagacaattttttttcctgtgtagtcctggctgtcctggaattcactctgtagtctaggctggccttgaactcagagatctgcctgctcttttgggttaaaggtatgccccatcaccaccaggctgatcctctccaacttcaaaagacctgcactgggacaccaagatggctcagcagactaaaaggacttgctacacaaacccgacagctgaataattcaatcccctggactcaagaaagaagaaaagaatcaaattgcacaagttgtcctctgacctccacatgtgtgtgtgtgtgtgtgtacaagtgtgcaaataaattaataaacatagtgtgtcgtgacagaaaactttcagaaaactacttaccacaacaatctagaagctcacgacctgtcccagaagctaaagaccacagggccaactcacagagggacagcttacatctgactggagccactctggccctggctgccctctcctttgtgttgcaacagcaaacagtttagattgtgagtagccccaccctggaaggaagagcactccctgtttttcgttaggtgaagcgtccttggcaatcccttttggttcatttacccctatcaactcttgatttggtttaaggttaaatcaaaaaagacattttggcctgatagtctgtgtgtgaagaatcaggaaaaggaccacgtttgccaaaaaggctagacagtcctggctgggaggaggtgcgggtaccaagttaatctggaggcatggcagggtgtgtgtttatgactgacaggatgcagatgtctgccatgcatccgtagatgaataacgtccatatgtgtgcatgcgttcctgcttgcctacctgtgtatacacacgtacatacatgtgtgtgggtgcctgggggaatgtgtatgtatgtgtgcgcgtgcacacatgactacacatgtggtatatgtatgtgtatgtgtgtgtgtgtgcatgcacatgtggtatgtgtgtatgtgcatgcacatgtggtatgtgtgtgtgtgcatgcacatgtggtatgtgtgtgtgtgtgcatgcacatgtggtgtgtgtttgtgtgtgtgtgtgtgtgtacatgtacatgtggtatgtgnnnnnnnnnnnnnnnnnnnnnnnnnnnnnnnnnnnnnnnnnnnnnnnnnnnnnnnnnnnnnnnnnnnnnnnnnnnnnnnnnnnnnnnnnnnnnnnnnnnnnnnnnnnnnnnnnnnnnnnnnnnnnnnnnnnnnnnnnnnnnnnnnnnnnnnnnnnnnnnnnnnnnnnnnnnnnnnnnnnnnnnnnnnnnnnnnnnnnnnnnnnnnnnnnnnnnnnnnnnnnnnnnnnnnnnnnnnnnnnnnnnnnnnnaatttagaggcacatttcttctcatgccagcctccagaagccaattgcatttgttggtcaggattttatgtttcttgtgctatgcctcacaatcccatcctatggtgaagtcaacaccccccccccaagaaatcagaccacagggaccacctcaaaggcatgaggtgagggttagaactgccaagaaccccaagggaaagttgtggggctcaaaatcctgacccttcacctctgaagacagtggggtcagctcctccctcacccccaaactcccagtctgcatttgtaaatgagccttacaagcagacatctgccggtctctggcgcctgaatgcagggtgaagaccagaacacaaatctctgtgttttcctgaggtgttttagccagattcaactctcctgttttgtacacacacataagtcggtgctaagaggattactcgtcctggtcctgagtccttcccagaggccctggtcaaaagagacccttgttaaacagcgttttctctaattcctctgcctttttctcctggccttaacgtgcagacgtgtagccagttcttaaatccacccacctctgactcgggaataaagacggcatccagctccattctcctgctgcccagcatccttcggagagctgaagatgaacattagtgtttggttcagcagcgtctgaaaaaagaaagggcagcctggtcgaaccctccacgccccggagaaaaatgtagcctttttgcctgtgtgcagtgaatgctttctggagagttttcattagggccggggccgctggtgcagaaagcttcacagatgttgacattttttttcatccccgggttaagatgtcttccataagcttttattcctcatttgttacttctttattatcagggaggtttcgccgccttccttctctggtttctctgaagagagcagcggaaacccagccacccattattccgcccttttctctggcctccagaggcagcctgggcctcgggcccctttgtgcagaacagcaggtagctgaggcaggccgggtcattcctcagacccttttgtgtagcaatccccctcctcccccaactcagctcagggtgtgtaaaaggtcaggggtggccaagcctccatacctgggcttttgttggttgctggagtccagaggcagcgtcttgaaaagcagccttgagaagcctctgtctcctggccgcacagctgccctcccgtccatccctggaatggggctaaggagacaccaccggatgagtacagatcttctgtgtccaaaactgccttgggacaaaacttcccacggagagagattggtcaagatgaattcagtctgcggtctccgaggtatagaggaaagtattttccaatcaacatgtagaagaacccttggtttttgacaatctttttccacatttgtcaaatggtgcacgcacacccgcccttcgcacttcatacagttttcctgtagatctagtgaggtcatgtagaaactgctttgccaaccctaagattctaaatagcatttttcattttttttccacactatcgcccgggtagaccctcccttgaacaaaaattatatcatctgatagaaattaatgtttctgaaatatgtaagtcgcctgtccaagcttgatggccctaaggtgacacagatctcagagcaagctgggctctcgatggcaatgagttcttcaaaaccagatgtttggtgccttagaaaggggacaatggggggggaaacttatgtgttctcttacagagggagtgggggtgtcaagctgcttacggagggagagagaaaaggggtgtcttgttgcttgctggtactggttcagtatcagccaatcacactgtggctgccaggagagtcactggaaaactcacctgcttcatgaaatgaagagactttgggaccagaaaggtggagacatccttccagacaatacaccttaaaagagcatcaaaacttgggagacagaggccagggccaagctgggactagagatccataacagaactggtcggacttgaggctgctacacccacgtgggagctcaaggctggaatcgggctcactctgtgtggcccgggcactgggtgggaactgaggaggagagacacaaatagacgtgcctggagcagaagaagtggtttggggtttggtggtggtggtggtggtggtgtggtttgcttggtttttttggttggttggctgtttttcgtttggttgtttttatggtttttctagaagaggtgtgtgtgtgggggggggggggtctctgtgtagccctggctggcctggatctcagcttgtaagccagactggcccccaactcagaaatcctcctgcctctgcttcctgggattaaaggtgtgcgccaccaccaggcaaatcaaggtatttcagtcattctgaattgtctaaaaaggaatgtattgctttatcgggttgtgtacaggacgtcaccgaggagacttctgacagactacagtgcccttgggaagattcagccatgaagcattcgcttagggcttactctgtgtcagtcccaacaagccttgtaatcctaaaaatttcccattccttgaactatttaaaaaaacaaacaaacaaaaaaccttttattttctagtgattaggttaaataaagccaatccccatttctggtgatggccaggtgacattgcactctgtggacagaagaggacagacagtgagtgagagggctcagctggttgaagggcacactgctaagcctgatgaacaacattcagtccacaggccccacagtggagggaagaaccaatcccacgcttatgtcttctcacctccacacacgtgtgctatggctcagcgcacaagtccgcacacgcacacacaaagccaaccaataagtaagtacatgtgacttttttttttttttaaaggaggcagcatttggtagaactcctactctctgaagaatggactggcatgattgcagcttttagatgaagccagatgcgggtggtcatgtgctcattggggaggaaagaactgggggggcgggggggggggaatgaaagttttagttgtaggcagcaagcaaaccacaagaacagagggaaaaagtaagccctccacagagagagccatgaggttcccaacagcccgcttgctcccatctctgctcaagcattgagctgtgtatttacggggaaaccaactaagctgttaaagaaagagctgcttctggtgtctgctacaaaagactcagatgttgcagtttgaatccaaccgagacaattgcttgattaaagaaatcctatccagccagctgtgctagcacggcctttaactccacattcaggtggcagtgaggaggaattttgtgagttcgaggatagcctgggatacccggcaaaatcctgtaccccaccaccaccaaagaaacaacacacacacacacacacacacacacaagaatcatccactaaagaaaaatagcaaaatctagaaactgtacttactctgataagaaccataaaaaaggatgcatttccctgacaaagcagcatcaaatgagacagatataattaggaggcaggggatttagagaatggattgtaataatccataaaagaaaacacattcataggaaattattagatgggaatggaaaatgaaaatgagaaacactgaaatccccaaactaagaaaacacaagatcaggaaaaaaaattgatccccatgttgtaacaacaggatagacttgacagaagaagaaaatggacttaaatatgaaacgaagacattgtatccagtgtatggaacaaggaggcagagtggctgcagagactgcacagcagttaagagcacctgacctactgattctcctactgccctgtgctggtatcacaggctacaccaccacagcacacccagcttgtctcacacaaacgcttcaaaatggagagaggcaggagcatttcttaatttgttctaagaggttagcattaccctgacaccaaaactacataaaactacaaagagattacagaaaatcaactctccatgagtccagtatccctcacaaacatccacataaaatcagatttttagggtggagagaagactcagtggttaagagcactgcctgctctctggaaggacccatgctcatttcccagcaccctcatagtcggaaccattgtctgtaactccaattcctggggacctagtgcccccttctggcctctgctggcactgcagacatgtagtacacaactgtacatgcacataaaataaataataaatcttctttcagaaaaatcagaactttagggctggagagatggctcagtagttagagcactgattgctcttctagaggtcctgagttcaaatcccagcaatcacatggtggctcacaagcatctgtaacatgatccagtggcttcttatggtgtgtctgaagacagctacagagtactcacatacatgaaataaataaataaatcttttttaaaaaaaaaatactgctatcatgctcaggttttaaaaaatcagaactttagacgataaaatcaaacaagatattagaatgttaaaaggtgacacagcataattatatatctttagcccagggacacatgactgaggttcatcatattaataaagaggaaaggcatgaatatatcaatacatgacatactggtgacttttttaaaaagagaaaaagtcctcaacttaataactcacatgcacatgaaaatatgtatgacatatcctacatctttctgtgtatacggtatgccatatatatgtatatatactacagccaatatcctacttaacagcaacaggtgaaaccctttcctctcgaatcagaaacaagcaaacaaacctgtaaatcctcaagaataagggagtccagcaagatagcagaacataaaataaacgtggaaagccggagtcttagtcagctaactaaccaacacagcttgaggagaaaggataaatttgcttacatttctggatcattgttcaccattaaatgaagcagtcaggacaggaactcaaacagagcaggagcctggcacaggagttgatgtcaaagccatggagatgtgttgcttgctttcaatggctttctcagcctattttctgtttgtttaatgtaagtacactgtagctgtcttcagacacaccagaagagggcatcagatcccattacagatgattgtgagccaccatgtggttgttagaactaaactcaggacctctggaagagcagatatatggaagaggatagatagatagatagatagatagatagatagatagacagacagatagatacctagatatatatattcctgagctagagtactgaatattaaaaatttccctacatcttataatacaaaaacaacatatatgtctgtgaatatgcatgtgtatgtgtatgtatgtatatatatatatttcttccttttggactttttttttcttttaatgaaaaaacaagccataaactagcagaaaatattttcaaagcctctacctttggggaaaggttcctttcctttctgtaaaaaaggagagagaaaaggtgatatagacatgactggacataaataagatataaattaaagccacagtgagaggctaccatgtactcactagacgaataattgtttttaaagtcagttttccaagtgtacagagcaagtctactgcaggttgcctagagactacaatgacttccgtacagctcaaaggaaactcccggagtgatgaaaatgtctaactgcactgctaatcacatgacagtatatgcttgcagaaaactcgttatttatgtaaaatatgactatgattatggaattatgcctgcaaaaaccctttaacctaagaaattaaaaatcgttattacaaactactttttatgattctgcttaatcagtaggaccatacagaactggaccaaaaccaaataggaactttatgacttcccaagtcaggcattttgcggtcaggcttttgaagtgctacaaaggtcaaagccatcttactgcttttgtgaatcccagggaatccagggctctaactgaggccacaggagtcaatgagctccgggctaaacataaaaatggaactgggaaataggatcttacaggttccttagggaaacacaaggtttatacctttgtgtagacgggcatgcagggtgtttggtgaggctcagtttccaaccatgtctgccattgatggactagcctgttgtggattggatctaatgctacgcatgttaattcattccccccaaattacacaggaatccaccgcccctagttggttttgattggtaaataaagttgctggctgccaatagttgggtagagagacagaggcaggacttttagcattcccggggaaggaactcagaagggaggaggaagtggaatccctgtgccagaaaaggaataagatccaggtttgagagctgcagaagagaaagcatacaatcatgtaagagctgggggaagagtggctccgccccctccccgctgggtctatggcagcaaagatggaatatagattttagtaacaattcaggagtatcagaggacaggcgttagcaacatagatgttctggagtggcccagccattgtgctgattaaggcgtgtgtgtgtgtgtgtgtgtgtgtgtgtgtgtgtgtgtgtttcattcatgaatccagaataccaaagcaggtagcaaagaactcatgccataactgctacactagcctgcctccatttcaggcttaaaacccttcctccggtaaagacaaactaggttcttgactgtttatggttaaacctctgcttctcaaggattggactataccccatctgaaaccttaacatgcaggtggttctgtactgcctgttacaggaaactgcaaccaagtctttgtttcaaaaagttactgaaaccatcttgtttccctacttttgtttcaaacgtttgtcattgctaccttgaattaatgcctgttgttgcaacctccttgcaatcctgtctttgtttcgggagatcattgtgactaacttgtgcttaagctctagtcctgtaaccctattttgcctaccaaatccctcatttggaaaccccctacctctgagctataaagaccttgtcttccttgtgtccagtggtgatctcctgatccccacctttagggggagacagttgtgtacatgaatttttaaaaagcttgcttcaattaattgcttgatttaattaatttggtcataataatttgagccaggggcctttctgctcgaatctgtaaaattagcaccacgccactgcttattgaggaaatcatctctgtcaggatttccatcagtcttgggaggcagtaaaggcacccttagtggacatccctaaaatatttcaaaaaggagtcataattctgtgtgtcatctcaactggactaaggactggccagatatctggtaagatatctatctatgtctgtgtgagtataacaccagtaggctgaataaaaccacccctccctgtgtggtaagcaccctccagtccattggggacccacataaaaccacataaggaagaggacaaactccactctagagcgagacatcctagacactggctctcccggttccgggccttgggtatggatcaggatttacactatcactaaccagatgtcggctccacccccattctctgtatctgaactgaacgccagctctgcttctcctgctccctccaggaagactgagagcgaagggaaaagcatcagctcaggacctccaggacccaattctcagcacaaaggagattgatttgccccagaaggacagagggcaggggataaaagacaaaggcaggagagagaggaggtgggagaggggaaggaaacaaggaagagggggagggagtacttatcccagagggacaaagaactgcctctggatagagaggagacagatgtagtgcataggaaaatggcagtttataaaagtaaaatgggaaaccctgtgtcaggatgaggtgtttaattttaattgggcatgttaatcaggtgagccaaagatgtctttttgattgttgaactttattgctttgatagctggacctccggtagtcacactccggagtggggagtagccaaataagggaatggatctcggggctagttattcttaaccttaagaatgtgatctaacgggttttagtgagacagaggggatggggagaaagtcaagacctgccagaaccatgtttgctatgctggagctggctagagtcccttgggtgagatttgtatttccataactgcatgagataacttgtagaataggcacagatatgcgcgcatgtgcacacatacacacacacacacacacacacacacttgcacctaataatgcttccatttctctgactagaatttacatttaaattactgtaatactgtcattgtcacacagattggaaaggaaaaccagggcctggtgagatggctcagcggttaagagcactgtctgctgttccagaggccctgagctcaattcccagcaatcacatggtggctcacagccctctgtaatgagatctgatgccctcttctggtatgtctggacacagcaacatatgcataaaataaagaaaaaaaaggaagaaaggaagaaaggaaggaaggaaggaaggaaggaaggaaggaaggaaggaaggaaggaaggaaggaaggaaagaaagaagggaaacccaaattggctttcactgaaataaataaacatgaaaatgttttcttttcctccgtttcctcatagaaagtaacacaatgcagggccttggagaacaagaccttccagaccacaaagcacgctctttctctccatggaccagtggactatcgcactgctcccatgaggtgtgaagacagaatgcgtcctgctcaatacctaaggaatcaggctacaactgccacctaagctgacagcttacactcctgtgacagagtggctggaacataaataaatatagtctgaagggcaggaagagaagaagaaatggtgtgagcaggtctctgccttggagttttaaccatgagctttttatcaacatgcagaaagagggcaggcaagatgactcactaggcaaaggcctggtgccctgtgtttgctccctacaacctaggaaaggtggaaggtaagaactgacaccagaagattgtcctctgatgtccacacatggaacccacgacacccatgggatcacccacatcttatataccaataatcagtacaataatacagtgctcgccagatgtgatgctggacactcattctctcactatctgaaaactatggcagggagatcgcagctgaggcccagggtctagttgctgtctatttgcatagtgagacagtcatgaaaatgaaaaggggctggggagatggttcagcgagtactcgtggacctgaagccaaggctacataaaagccagccgcaggagtgagtatactcccagtgttcccgtcgaaaagtgggaggcagaataaaatgagcatccttagatcccaggccagctagcctggtgtgcaaaagagagaaacaagagactgtgcccccaaggagatgactggcaccagaggccatcatgaagacatgcacaactgcacttacacatatggacattcacagacacaagcacacggaaacacacacacacatacatacacacacacggattgattgagtgattgattgattgattgattgactttttgtaaaaatgacttgagtatggtgaggcatacatgtgtgtggtagacaggcgtggggatcagaagtttaagatcattcttccatccttagcaaatttggggctagcctcagatacatgattccaaaagtaacagaaacagaaagaaacaaagaagggaaaaagaaaaggcacaacattgcctgtgagcctggaaagttggtttgaccagaccaacaagcttcacccagtgttaaagtcacacagtctggcttttcctgctaaggagaaggctgtacctggccagtgattgattgattgattgattgattgattgattcatcctcaggttgaaatactgaaatcttaacgccagttcggatctctccttttccctcatccttctttctgacattgggtcacaaagcatcaacactggggacctctagggatgctaatgacgtgttctcgagggtttccgtttccagctcagccttgtgccattttctgagagtaggttttagcctggagagtgactctcttgttctacaataaccaaaggtagccgagccacctcctcaagtcaagcatcgagttcctgagttcctacaacacagttcccgacccctacgccagctgggacctaagactcccatcttaagatggaaagccatctaccgggaagattccacacgaattgcaatatccctgaacttcccaaaccaagaaaaggcagcttaaaggagccgatatcaggctctggtggccagctgtcacaccccttgcctctcatcctctctacagagatacccctactcccttcttgccaccctgaggattactgcacatcagtccccttaaagatccaatatcaaaaagaagaggatagagttcaccttttataggtcgctggccacatcatgccttccctctcacagctcagtccattctgcctcattctcctcccacacataatgctatcctccccagaccagcttggactaacacagcactctgaagccagcaggctgctgcctgggtggctcccagcaggaactggatgaaggcagatggggttacaggtgctttttatccggcttcccaggagagccccagctacctgctgctagaactttgtctgcaaatttttgttttcattcaagtgagggatggaggctaggagacaaggggcaatgtgacagataacttgattaagccccaggacagatgacaggagctcagtggcctctgctcttttccttaacctctccaatagaagaccacaggtttttccagtgcctgacccgttctctcttccaccacgtttcctgcagaagcctgggaatttccaaaatgctgggcttctttctggaactttaaataatagttctcagacccgtggggtccagtgaactgtggaaaataccaggaccacaggacttgcggggattttatgagtctggaaatgatcctccagcccaagggtaaacggcaacacatttaccaaggactaaaactgttttgtttaaagacgggttcaatttttcgaagtaccctgctctcctgggggaaatgtctcctgactgactgtggtgtcttcatctgatggcattttgttgagaacacttctgaccatctaattccagatacttggatgtaggctgaagtgaggcctttacgagttaccatgtccacatgtatcagatcattgcttctgaaagagacagagtcgaagggacaaacaaggaatagagcacgcatctgacttgatggtttgttgtttgtctttgtgtttgtttgtttgttcgagactatgcagctctggctgtcctggaactcactatgtagacatatctggcctcaaacccagagatccacctgcctctgcatgcatcaccaggcccagcggttgccatggtgaccacctccacctacccctacccccacccatgttttaaaaatccatctgacataaggaacacacaaggccttttagagttttaagagggtttaaaaaaaaaattcaggagaactgataagacccaccacacctgtgatcccagcactcaagacgctgaggtgagaggaacgcctcaaattcaggccagtctgatctacatagcaagtccccgtatcaaaaaataaaattaaacgatcccttcaacaaccccctcctattttttaataaaaaaatttttttaaatgataaactaaaggaatagagttgagcactggctccttctgagatggcccctctgggcaatgtgaatgctgttagcactactttcaaagtaagaaaggtaggccattaaaatgtaaagaaatggtctttgaaattttcagtcatgatttactgccggaatctccctgtaagagagctagagaaagctacagtatgccaacatcgcccagtttctgtttctgtcacggggatggaatgtcttttgaactgctaaagtagataattccatgcctggaagaaaaaaatgaagggaggagaggcaggagcagaacggaggggagaaaagatcccctggcctcccgataattgcacagttgttgcgttgggggagcgtggcgacgtgtctcccaggcccagcggccactgtgctcattactctaggtgggctactagaaactcctaaagggtctacacagtgcaacgcttcacgccgtcggggcagagagggnnnnnnnnnnnnnnnnnnnngggttttgctttatcaaatggagcaaaagggaaaaagttacccaggcactgggcttcacttcttttctactttaggcctcgtgagcacatccatccaggtgaacctccttctctttccctcttgctagtagccctggtacaaggctgccccatactcacaccccaagaagacccacccaggtccctcttgacttacatagggagctgccccagatgggtctggccctctcttgatgggaaagctctagggtcctaagcccaggaagaacttacacctaagctgctgcaaaagattcggcctctagttattagaatgtctcacacgctggagggcaattgcagacccaactgagccagcctcctcgtgacacaggggtctggccagagtccacagggcagaaacaagggatggacaggcaagaaatacaaacccgcagtgagactatccacagtcccatagactgtcccatccaaatggccttccttctcattacagtggtcagtaagaagacaaggggttacagagggcagcatccacctgggcaccgggcagactttccccatatgccagccgacagcctacttagaatgaccccctaagagccaggacagtatgggacagtggctcctgccagcccttcagttgacttagtacaccctgcttcatactggtcactttactctagtgatgcccgactagccacagcacatcagctgtggcaggcaaggtccccccaaggagaacattctcttctttctctttgtctttcattgagataggatctcatatatactagcctggcctcaaactcactgtatagccaaagatggtcttgaactcctgattcttctatcacaaccttcccattactggaattacaggtctaaaccactatgcctgctggtttaaccttttaaatatacctcttcttttccttggttgatttctggcatgcctgcctgccttagtcactgcttctcataaaaggaaacgtttaactgagggctgactcacagtttaagaggtttagtccattctcatcatggtggggagcatggtggtaggtatggtgctagagaagtagcttagagctataccctgatctgcaagcagaggttaagagagaagcagagagagagagagagggagagagagagagatgcagagacagagacagacagagaggcagagacaaacagaggcacagacagagaaagatggagacaaagagacagagacagaaagacagagagaaacacacagagatagaaacagaagcagagtataaccttagcatgggctttgtaaacctgaaagcctaccccagtgacatacttcttccaaaagggtcacannnnnnnnnnnnnnnnnnnnggtcacacttccccaatcctcctccaaataatgccacttctcagtaactaagcattcaaatatatgcacctatgatgctatcctcaactagaccaccacactgcctaatcactaacaaatctgaaagtactgcccactctaacaggtgaatactttccccttccgtttatatgccagccttactttttctacagaggtcattgattcgttgtataaaaaaatgaattataagaaaacaaacaaaaaagccagacaagatggtatatgcctataatctcagcattttggaaggctgaaacaggaggatcaccagtttgaaatcatctttgtctctaattatttaatccatttgaagacccattggctgaatgatctgagaactcaagatattacagataatggaactttcaggcgagagtaaaatagatttaacagttgccagatgctgaggcaaccgacagtggcagagacaagaaaggccttgtacacagttatgcagtgaccctgttctagtctacaaatgaggttctttcacttcagcagcctttgtgagtatgcatgtgtatgccctatgtagccttgtttgccagtgcatttgtagggagaggccacagggcaatgtctctgtatcatcatcaccatcaccaccaccatcaccaccatcaccatcatcatctgtggaaccatgaaaggcagtccagtttctggttgagctaggtttgaaaccccagggactcctcaggtgaccctgcaggggataaccctgcaaaggacggtaggcatttaccatgttcctggacaccaggctcctgacatgaggcagcggctctccataggtctgtggccatcagtcacataatgttgtaattccctccacaagtagaaaatgtgaccacaggtcatgtagcctcaagacagatctccattttaatgaggtacctaaagacctggagggcttagccaataaactcctcttcccatacactccttcctgcaaaaggtatttaacctcaggtccgccctgagaaagtggggtacagtttcactcattaccactctcctccatgacaataaataccttaaaaccatggactgtctcttttcaccggattcgccgtggagagcaatggagcaggtcttcctctaaagagctgcatctcatctccctcaggaggcctccctgtactcccagccacgtcctccaccaagccaagctgcctgggccagatccagtctgtaggcccccactgtgttctcaggtcttccacggcatccagtggtgcctgagtgcccaagagcctgagaaccagagtgttccggcctctctgcaggcccggagactcctgagccagctctggcaatccccggggacctcagactgtgctccccaacccctgggtcggtgtcccgcagcttcacatagcctgacgcctgcccagcgctggcatggagtaagcacagtccaaacttcctgagtcctgcctcctgagccccaagtggatgctggccaccttttaacccacaatcatcatcattatttattgttttactattataattattaggttgctttgtagatcaggctggccttgaactcgtagagatctgcctgcctctgcctgcgtggtgttttggctagacgggctgcccagtaagctcccagagatctgtctgtttctgccttctcacctgccctacccaggacgggggtaacaagcaagacacaacttgacttttagctagttagaatctgaacttaggtccctgtgggaagccacatgtgccattgcaaggtggcgctggctaccgctggccaccaagtataagtttgggtagacacccaatgtgtacatatgcagtaaagtttttgccaagacatttcctggcccgggcatgataatgaagttttgagaatataactaatcagatgtgagacatgcaaatgaggtatgttaatgaggttttgtgaggtactgagagagtataaccaatcagatgtgagacatgcaaatgaggtagtaagcataaccaatccgggtgtgagacacgcctctcctaggcctatataagcagcaccagttctgggcttgggatcttttcgcctctgcaatcaagctctcccaataaacatgtgcagaaggatcccgttgtggcatctgctttgctggcgagtcgggcgtgcacaagaggtcccctgagccaattcttgttaatgaattacttaacaatgaaccttccccctctcaaagtctcaagctccatccaagactgatactccattgttcctcaggaaagtatgctgtcctattaaacactgggagatttctgcagttttctggaggaaaatgtgccccacgatgatttacccctctgggtggcacgaatgacagctgagctgtgggaaggctctggaaacacttaggtctcagacaggtgggatcaggcccaagatggatgacgccatcaatccttgactcttccggagggctgactgaaaaggaggcagaaggcttccgtaccaagaatctccaaatgtccatgaggctcacagtcctgcttaggcagcctgaggtctgaaatttcccaagggccagaaccccgactctcagggaacagaatctcaggggcttctcacagaacacgcttgtggacagtccacaaggtctcaaaatgagcagtattcatatgcacagggaaatgaataggagagaggagagcatttgtattcattggctgtggtttgtaaggtcttgggaggaagccaccaaataaaaaatttaacatctatttaatgctttaccacactatatgtaaaacagctggtttttaagtctttggtttttttttttttttaaagtttaggtttctttaaaaaaaaaaaaaacggcacaagtttcaaagttaattttgttcagtcacctatcctaacttaaatatgaactgacccatttttgaactctgattttgaactagttaaaaaaaaattatttctcactacctcttctgagacactgcgaggaaaaaattatttcaaaattcttattttttaaagtctataaggtttctgttctagataaggaggcaaacaatcctcctggcagctgtgggtgagttggcacacaggctcctgagccaacctccgatcaccagagctcatccaagttgcggatgatgtgggatccctggagtgctaaggagccaatcaagatggagacctagacatgcgcactcaattagacaaatgaagacagtctggtcagggtggctcaagggggaatgagaggtcaggcttcacaggtaacaagtgctgagctctctgaagaggactgcaggggtgaagggaagtggggggcaatctgaatcgggatggtggtgtggaagtgtgctagagaaacccagtagtcaaggagaggccagtggtccatggtgggaagggagatgtagagccattcctaagcaatcaggggacaaagaatggaggtacagtagagggctagccttagacagcatacagagatggcccatgctggcaggagaggcagaggcaagacaggagaatacagaaaggtgggtgtgacttgcagacagttcatggctgtctctccacagtggaatacaaagcgaattgtactgttagtctggttggactgtaaagtcatgaaggcaagagccttgtcctctggggcaggccagacattaggacacttgctagatgatgaacaggcaaactgtcgtgggacctgaaactatctagtcggtgtcccagacagtctccagacagagcccggtgctatctgaaccgtgtaggtgtacagctgcctcgtctacgctcctccggacctccagccagtctctccctccctccttttgaacagagcttaggaggggtgagctcaggcctctttgtcaagactccagctgtgtctgattcaggctcaatgtagcatgtcacatctgcatgcatccaaggcttttgttttgttcccagcaatatcacatgctgtcatatttgttgctggccccaaggaggagatctcatgatccctgttaccattagagagaaatgaaagcttgaaaagcatttttataggtactgacacaattccatcactgagtcaaggcccggggaatgtcaattcaccacagaatggatatgcccacatatatgcctagcattttgaactgtctcgaatcttctggtccacagcaaaactacagagctgagggtcctccaaagacctttattgaaggctatagcttgtacccacaagggcagaaaactagatccccgccacatcacaataggtagcaatcacaaaccaccgagtccagcctgttccaacaccatcccttcctgcaaccctggtgggtagccctcacttctgaatgaacttctggcttaaaaggcaggtgctggggctggaggcgaggtgggggatggatcaggtgataaaatatgctgagcaggcatgaggaccttagctcagattcccagcattcacattaaaaaaaaaaaaaaagtatggtgtcacacaactttagtcccagcaccctgggagcagaggcagacagatcttgaagttcaatgccagcctggtcaacagaatgagttccaggacatccagggctacacagagaaaccctatctcaaaacaaacaaacaaacaaaaacaaaaacaaaaaaacaggggctggagcaatggctcagaggttaagagcactggttgttcttctagagggcctgagttcaattcccagaaaccacatggtgactcacaaccatgatatctggtgcccttttctgacccacagggatacatacaggcagaatgctgtatatatagtaaataaaccttaaaacaaaaaacaagctgggcagtggtggcacacacctttaatcccagaacttgggaggcataggcaggtggattttgaggccagcctggtctacagaggacttctaggacatccagagctacacaaagaaaccctgtctcaaaaaacaaacaaacaaataaaacaaaaacaaaaacaaaacaacaagaagaaggcaggtgcaatggtgcgttcctgtaactccagatctggctaggagagtagacacagatagacgctcattggctaactactttagccgtatct

SEQ ID NO: 107 - DNA, 612 bp, Mus musculus
atggatgagcagaaggaccttttaagtaacgttaacttctcactgggaaggacgagagtgatgcaccacaacagccccacacggaagcctgggaggcagagggatgggactccagacctgagcccacacagctgtgctttaagcagtaagccaagccaagaatggggaggtgaagaggagctggaacagacccaaggagcgagagctgaagcagctgggccaggaacgactggggaacctggaggaagtctgggagaggtccaggttcagcaggcctggattcccaaccacaaagggccagggtcacaagggacctctaggaggtttcgccgccttccttctctggtttctctgaagagagcagcggaaacccagccacccattattccgcccttttctctggcctccagaggcagcctgggcctcgggcccctttgtgcagaacagcagaaagtaacacaatgcagggccttggagaacaagaccttccagaccacaaagcacgctctttctctccatggaccagtggactatcgcactgctcccatgaggtgtgaagacagaatgcgtcctgctcaatacctaaggaatcaggctacaactgccacctaa

SEQ ID NO: 108 - protein, 203 aa, Mus musculus
MDEQKDLLSNVNFSLGRTRVMHHNSPTRKPGRQRDGTPDLSPHSCALSSKPSQEWGGEEELEQTQGARAEAAGPGTTGEPGGSLGEVQVQQAWIPNHKGPGSQGTSRRFRRLPSLVSLKRAAETQPPIIPPFSLASRGSLGLGPLCAEQQKVTQCRALENKTFQTTKHALSLHGPVDYRTAPMRCEDRMRPAQYLRNQATTAT

SEQ ID NO: 109 - DNA, 101499 bp, Mus musculus
  misc_feature (1)...(101499): n = A, C, G or T/U
gtgagagaacagcttgctggcccgtgggagtgttctgctctgaggcttggtcccaggcccaggggagaaagggctgtgaggatatgagggagcccagagagaggtgggcagtggaccccgagagccttcctgaccctctctccagagggttggaagctaaaagtcatgttctcagaaacccgcctcactttcccatgctctgcgactttgtcacttgctggtgtaattttggtgtgagtgggggtggggtggggtggggtggggtggggtgggtttaatctctgttcacttcacgtatgggacctgtatgccgtggtgtagggtcatggcacttccgtttcgcacttactgttcacgtagtacgccgtcacctttattttctaagctgttctgtgagtttctgactttttgagacaggatctcaggatgtattaggctttgggcaagaatgtctcccgtaggcccggtcatgataggctctcctggctcacctttgaccatttcttgtcactgaagttgggagccccaggcaggcagagctcagccgtgatgtggagaaatgatgctggtgtacatgtgcccagatgctgcgttggacaggcctgctgtaggcgctagcattgctttatctgagtccgattcttttttttttttttttttcagaagtaaaatccagctgtggctgaacctcgcccttgtgtcttctagccgcctccctttggatatcccttgtcttacatgagaaagaagttgggtgtcttgtttactgttacttttatttgtatttttcatatcatatgtggtgtgtacttactgtgtgtgctggtcagtttttatgtcaacttgacacaagctagagatttctgggaagagggaatttcagttgagatagtaatgcctctatccgattggctgtaggcaagtctgcggggcctggcccattgtgggtggtgccagtcctgggcaagtggttctggtgtgtataggaaaggtagctgagccagccagacaaaacaagtcagtaaccagagctcctccgcagtctccacttcagttcctgcctctaggatcctgccttgagctcctgctctggcttccttggaccagggctgtggtgtggaagtgaaattaacccttctcatcccaggctgcctttggtcatggcatttatcactgcagtagagagcaaactaggactttatgttttgtgttattaaacagttatagaaatgacctcattggtcattacaactgctacgtagtgttttattatgggcagaccttccttgttttatccatttccctctagatgatggccaggtggctctcaccttgccaccctaaaccttacttcagcatatgtaggaggcagccgatcgtgatgactggcaggccttgggtagaagctttgtgtaattttctccacttttcagtgactgagagagaggtattgggaggggtgcccgtcttagtggggatagccttttacttgagccttatctgttcagttcccagagttggatgtaaaggccctgggcctggctttggctgctcctgtgacttgccttgcagcctgtaccgctgcccacctcactgcatccagtttcctgtctgaatccagagggttgaattggtggtattaaatcaaaggcctcccctttaaggtggtgttagatcacagcccccccccccccttaagatgctcgttaagttaagcagcttgaccctatagcctgaaataatcaggccatgctttgtgcggtggacatgttgcttcttttgattttgcacttaggcttagctatgacttctaggaatgagccttcagaggctagctggtcttggggaaacctggcttgacagaggcagtacctagggctccctgtgacctgctgtctcctccctaagctacaaaacacctgtgcccagctaaacagtctgcttccctgtagcttgagaggtgtgctcagagtccagtgtcgttagctgaattcatataactatggagggaagcctggggctgctgcagcccttgagacaaaggatcaatcaatgtgagccgtgcccgatttgtcagctctctaaaactcaacagcctgtattaccatgggctctgtgtgcgccaggtactgtaaaggagcttgggttcctcagagaagggaagaggcggacagacagagactgtggcctgccctagtggaggagtttccattctgtgcagattaaatgggctactgaagctgtccacactgttgccagagacatggagaagggaggggctctaaagggttagttttcactctatgactgttctaggagaggccgatgaatgagctgtacaatgtgctgaggtcaggaaatgatgcaggagggagaatcaggagtgaggagccctttccagtactaagcaggcagaggagcctccgtccctccccgagaggtggtggccagcgcctcacagctaggtgcatggtgctggcactgctcagcagcctgtgcctgctccccacaggaaatggtttcctgacctctttgacaccttgctcattgactttggatactctggcacctgccagttgccttcctgcagggtgatttctggagctgagtttgtcagtgcctggcatcaagcaaagagcctcaactgccatttccttctcaaggtgactgaggtccccgtacaataccccagcctggttccagatcctgattctgactccctggggtcagggcacacagttataggctagccaggccccctcgtgagagccttgcctactgaagctggagactccccgagtcagcagttgaagctggcaggcacattggagcataggaggtatgtgttggaggtattgggccccctggtgctggtttagccttccgttatgcactctccctgaggcccatctcatttgcgttgtatttctccttacctctctcaaaaagaggtttctgagtttgaggataaaacctaaatggggataaaagctaaaatgttgggactcttacaggaatacctgggagtgacagatggggcagtgtgagtggaagtgggtgaagggagctagtagaggtgctgtcctggcgggcacagcgaggaccagggacagggctctcccttctgaactgcgagtgaagttggaatgcctttaggaattagctggataggctctggctcctctctggccgcttgcacttctgtcaggctgagttccactcatgagggacatcttgcaaacgtggtaaaagtcacacaccatagtgctatgtttcttttctcataagatctcactgttacctttttccatttagaactcacaaaggcagagctttgttctcttaaaccaagtggtctttctttccaaagttaaagttattggagagggcagcattcaccacatgtgactggtgtagtggtggggactcattagagattcaaaaccgagagatcagtggtctcttgtcctctcggtctgtcactcgcagatctgtcgtcgctccccagtctaggaagacttcatttaaggaaacacctctgacacgacttcagaagtaacttttaagagccaggcacagctactgtgaagcagctcccgggttggctgtaagatctgtgacgccctaactagcaggttaaaggtaaagaaggactatactcccgctggttcagaataagtcctgtgaactagaaatttctgttccttaggtgcgttcagggccagaggggatcctggactatttcttgggttctcctgggagcaggtcctgcaggcttccttctggactggtcatgtctgcccactttgcccatcttcctgcaatttcaatagatctcagcggttgtcgagtcccgtagccttgatgtactctgctgaggggtgcacatgcaacagtgaatagcggacaggcaaagtcccgccttcactgtgcctcacagcccagccaagagctggggacatgtcaaagcgtgctgtgagccaggcagtggtggcacatgcctttaatcccagcacttgggaggcagaggcaggaggatttctgagttcgaggtcagccttgtctacaaagtgagttccaggatagccagggctacatagagaaagcctgtctcaaaaaagtgtgcagtgtcagctggtgatacctgttacaaacaacactgaagctgccaatgccttggccagagctgattgtatgcatgtggtgtgtaaatgtgtgtggtgcatctgtgttactgggctgtggctcttagctacagtttgtagtgaaagatgggagcttagcaccatgtgccttggtacctaaatggaaagaaagatctagaagagatggccagtgcaaagaccctgcagtatgcaggcgcttgtcatgtctgtagggttgaaagttcgctagcacagttttctttcctgtagagataggcaatccattcatcatgtagttgatgggtggcttttgtttttccttcaggaaaccatttttcctgcagctctcgttgggattggttactgagctctcacaggttagtggtgtatttgtgaactggctagccttgcgtggctaagcaccggatggagcccaccacctcctcccctacagccctcagaacaactcattctgttgtacccttttcccacttgtcctgaagagggtttctgggccaggataatggtggaggatctgcccttcttagtgtagagtgctgctgtttgccgtccccactcaacatagtggcccgcaccatctccaccggaaacagctgtgactgcttgtacacgaccctcaaggtcaggcttgttggcattccgttatagaagcagggggtgggaaggtgcctagatgcttacctgagatttagccgctccctggcatctccctcccagctgcgggtagttctgtcacagtggcgcgtggtctgggaaagtgttagtctatacagtgtggaagaccgactgaacggggactatgtgatggtgtttatgtgatggtgtttttaaaagtgtctagtttttctctactctcagccagctcccaaacgaatgcatagatttatttagtcaagcacagtacttgagcaggcattgatctattttaatcctctgaaccttccaaccaaaatccctgagatacttgcattttagtattggtctggctctctgggctttaagtgtattttccgatgctgtctcctctcacctcctagtgactgaatcccccctcctcccaccccggactcttctgtctgttcccctcgcctagctggtcccacactattctcttatctgcccagccattggctgctcagtttttattgacaaggcagagaataaatggtaagcattatttacacaaacttgaaacaggagatatttggaataagcattataatgccaggtcaggattgtaagatgatatgagggcagagaaatcagcatttgaataacacaaggataattttttttacagtacacaaacatcttgcttacgtgactccatttatgcagctatagcaagtcttcatactggctttgtgaaaattggctgctttagggtcacccgtgctcctttaagtgctactcaccgtgctcttctgagtaagcacaatgactcatggttcagctaggcttgggccaggtcgtgactttggtctgttgttggtgtccatctcaggtgagtaggtgcttgcttctctacaggagaagttaacacccaaagggagagcagcccctctttgggaatgtgtccagtgcttgtcaccaggaaaggcctacctgctatttcatgtcctcccagatggccttaaaggggaggctgtcagcagggagtgggctggagaaagagcattccccagtgtgaagtacttgtcccttttagtgactcttaccgatcctttaagaactctttaggagttggttctctctctgtctctgtctttgtctttgtctctgtttctctggctctgtttgtttgcacgcgcgcgcgcacgcgcgcgcgaaagagagagagagagagagagagagaggatggcatatgcacgtatgtgtgttgctgtcaggtgtttttctcagtcatttcaccttgtttttagacgaggtttgtcactgaacccagactcactgatttgactaggtgagtggccagtcaccccaggagtcctccatatcagctgctcagctctggactgtgcctggcaacattaagtgtctaagcatgcaggatggcatctgtaatttccttcgctccagctaggacactgaagggccagtggctctgatatctagagatatctcatgtctggagactctgcatggaaaatcgttctgacttactgaaagtggcagtgctagtgtctgtatgtctcaggcactactgtgtgccttacctgaggtgggtgaaagttgcctcaggtagttgacacctagagcatcatgccgttgaagcctggactgggattcactaatgacctgtgtctcttgagtctctggagccgttgatcttatatcactggtgggattccagcccagacttggtgccaggacatggtaatgatacaggattgtgttgcttagttgtttgtttgttttaatcagtttaacacaaacctatacatacctggtaagaatggatctcagttgaggaattgcctccttttcgttggctggtgggcatgtctgtagaagcattttcttaattggcagttgatagaggaggtcctagcccactatggaagatacctaggggcctgtgcgcccaggctatataacagatgcagttgagcagcccatggcgagcaagccagaaacgaacgttcctctgtggttgttgcgtcaggctcctgacttgagttcctgccttggtttcccttgatgatggacgataagcagtgagatgaggtaaaccttttccctccccacattgcttttggtcatgtgtcatctcagcaacaggaaacacactagggcagggatgtttgcttatccccattggtggacagttctgttgatggtgggcttgttggctgagtctggatgctgctgcagtatccttccatgctggatatgaaccctgtggacagtggagacatattagtcattcctgcgggagatggatggttgtggggtcaggttcttctctcctgtcgttgaggatggcacacacacacacacacagacacacacacacacacacacacacacacacacacaccgtcccctctacccgcagctgcaagagctgcttctcctctggcagcctcagggcttcctggaaaccatgccttcccatgcccagagccagctcattacctgcctccctggctctaggagcgtggccatgtctggttcctagtgggcttgtcatttgacaaatgagttttcctcactccgagctaagggtttggggcggcgtgtctattcctgcctggcacatgatcagctctgattgtttgtaccagtttccaaggctggaagtgttaagaatgtgctgtgcactgggtagtggtggcgcacacctttaatcccagcactcgggaggcagaggcaggcagatttctgagttcgaggccagcctggtctacagagtgagttccaggacagccagggctacacagagaacccctgtcttgaaagaacaaaacaaaacaaaaacaaaacccaaaacaacaacaacaacaagaatatgctgtgcatggtaagatgaatgcagatgccccctttgagaaccatccattctagttgtctcctagagccccttatggtacgcagagtgtccagagtgtcctccatactttatattttgaacaacaaactctttgaggacgcttagaatatgaatactttgtctttactgaatttggacttttaaaataaaaggagacaaagggacttagagatttagttagtattcctgatagcctgtaattattgatatgaaatactgttatgaacaaatcctttaaatatcgctgataagaggaaattaatgagagcttataaatgtctgattaaaagctgattagaaaaccagctgtcctgctgtacacttggtaagtcactgggggtgggatgagctcagaatgggctctgtcctgcatgagagatggcacactctggtgactcagtcagtgtaaagggtttggggaagaggatcttaggttgagtgtaggtaatgctttataagtaatagattttgaagttttaagatgtgttacaagtggtgtcctgatgcttattgtctgcgtccctgtaaatcacacttttgcatggacagaagtcactgctctggcccgctcactggctgactgccttcagtagccagctttttacagccctgggttcctaggttctgtggcagttcttccaggagctcttgaggtagggctctgcagccctcagccaggctggagcctgggctgggctgtggctgtggtgtcctggcttgatggtgctggaggggcgtgcagtctgcagaccggcttcctgctcgggagactgggcatttgattcacactcggtgtctgtggcttgctgcctgctgtctgagtatatccttggaatatattcatttttctttaagtagattcattacctgaaatattcactggagctggctaaacagtacagctcttggaacaaatgtactggcaatctgtttgtcctcaataaatctattaatgctgacgggatatagttattgctggggaagcttgggtgatatgagctgggggtggagaaagctggctgctgataggactttgcttctctgggcttggctgtagctgaggcaggccctgccctcatgtatatcccaccccccccacacacacacacactcgcactcaagtgtgcacacacacacacaaacatgcacacacatatgcacacacacatacacacaccccttccctttccactttaatgactgtggagatgcctggcccttgagagccctcctgtgcttttagcgccttgtctattccagccccttgtgtgctgggaaggctgtcacatgggtgatgcctgatgtgtgaggagagagactgaggggacaggacacggtcagggacaggatgtgaggctaacgaatgagagcagcttagcagcccctgagctgggtgcatatcctcagccacctcagtgtcaccacaagggtgagcgttgccattcctgtgtcacccatgaagggacccaggctcttgcccagagtgttgttccttcaggttacaaacccgggtccatggcctggcacggatgtagcagttgttacagggcaggggacagtcatagccagtgaagtcccatgtaagatgggttgcaggagggccctggaggatcatgggaggtggtgtgaaggctgaaaggaaggctgaggagggagttccacacatgggaaggatacaggtcctaaagaggcggctgatggggcaggatgaaggtgagggttcagcttttctagtcatgaaggcaggtgaggagggaacttcgagccaccagtgcaggtcttgctgggaggtttggacctgaggacagtgagcttcagaggatttgaagctcagaagaaaaatataaatctgtgtgtttggaaaatgactgtgaggcccaacagcggatgttcagagagcacgaggtttaccatgacggtgagcacaggcagggccagaggctgtgaggtgtgggagagagaggccatttgggattggtgttgagaaatagcaacccacagaaagagaaggccagggggagagaatggccagaaaggcaggcgtgaaggaaagcagcacctcaggggcagaaggttaggaattacagcaaagcttcgcagggcaggcacaggtagctgcaggaagccgacgacggtagggagcacaactgaagtggtagagacattgggtttcctgctgttttgaggcagggttctagtccgtaactggcctggcctggaacccactttgtagctcaggtgaacttagagcaaactttctgcctcagcctcctgagtgttagatctcacacgagtgagctaccatccctggctaaactaaactcagtgatgttttagaaattgaaagagaccgaggacagaaataaacatgaactaaaaggaatacagtttggagagaaataagaaatgttagaaatctagagcaagagcacaaaagcagactccattggccggggaaccaatggcttagggctgggcacacgaccacaggcatgatcaacgaccagggagcgtgaccacgtgggaaacctgggtagagttatggctgatgggaaggtaagaggggtggagttcacctgtttgagaatgtctccggcggtgcctacacctgacctgcctcttgctggcatgggagccaggcttcttgtcatgacgtttggaactcgaaagggactcaagagcttgtcccactcctttccctcctgccacatggccactgcctggtccctaacagtgtccttgccagcctggctgcctggactctgctccttagtgcccttccccactgcctttgccctcagttgccgccagcatcctcttagctccaccctgtctgtttctgcgtcctgggctcaagtgtgtgtcaagtgtctggaacttggagagagacgtttggctgacttgttggggtttccttgcttcccactacaggtcatcttccatgatgttgctgtgctgacagataagctcttccccgtcgtggaggccatgcagaagtacttcagtgctggctcggggacctactacagcgactccatcttcttcctctcggttgccatgcaccagatcatgcccaaaggtaaccagatcgaccacgggcaacgccctggggtgtcagggctcaggatggcgtacccactatttctgagggaggcagggtctagggacctccaagtagccaggtgcagctttgcccccttgcttgatctcctagtcctgtgaatgacacacaaactaaaactttgtcttctacttacggcttatatagtcactcaagtggcagagctagtcttcaaagtcatggctgtctggtttagaaccctgcctctccagatagctttctgtcccttcaggtgacccagatgagacctttctgggaatgcccagtacagatgtggctcctgttcccttagaatccatggtggcgtgctggcccctgctcttcttccagctgtgtacatggctctgactaaggtaacataggccacctgggacctaccgaagtggaaggagctcctttaaaccaatacccagtgttttcttaggtcctttagccaattgttaatgtgcttccagagacttattcatgcatatacccacgatctacttacgaagagcagtcataggacttactaaatctttgtggtcagaaagagagcaagcagtgctgtgcttcttgcagcgtctgggctgtgttttgtagggaatctggatgctgcatgaagcgtggccacattgccactgccccggccagctgagcagtttggaatccctgcgcttacgaagggactctgtttcgggcatcacaggtgctatcctgagttggttctttactgctcttctttgtgtttatgtgtgcatcgtagacattgcttttgtgctttgttcctgtttagctgttaatttcttgctattttggttatttagtttgtttctgggcattcttccccccaccccttcaggaaagtgagagtggggtgggtggggcctgggaggcaggattaagcagacccatgtgaacagacttggtgaccggagttcccaagatggcacttaggtttctgtgacctgtctgccctccttactgcttagcatacggccaccccatggacctaaggaactttaaaatcatgtctgtttttcccttgtcctcgggacctcaccaggtcctcgtgtgtgctaggaaagtgctcggcctcttgaggcacacccttctctcctttttccattttaaaagattcataaaatataattttatgaatatataaatcagcatcgctaattactgctaatttccactatttctctgacgtgcattttaaaggtttgggcaaggtagaagttacactttgcattcagattcttctgaatcggcttttacatcagagtatgaagctgatttcatttcaactcagaggacgtgcaagcaagtgatggtatcagccaagccgttaatgtcacaccttcccatgctgggtgtaattgcagtctgaccatttcccaagtgttgggtaactagatgaagcttggctcactttaccattaatccctgtcctgggctggctcagtgcatcctgttggctttttaatattgtttttatttttcaaagacttatttattttatgtatacaagtacattgtagatgttttcagacacaccagaagagggcattgtatcccatacagatggttgtgagtcaccaagtggttgctggggattgaactcataacctctggaagagcaatcagtgctcttaaccactgagccatctcaccagcagctttttaatattgtaaattagactatggtgtatgtccacatgcagatagattatcttctttctttaggattgtttcacatgatgtcttcccaagggtggaattaccaagctaaaggtgatctttacaaagccaggtgtgtcagtccccagggcccccagtgtggcctggcatgagtagtttctgtgctgctttctagtccagggtgtctgaccttttgtggagctgtgtagacgtctagtcagctgctctcctacttgacaaggaagaatacgtgcagagtcttgggtgagctgggtctcttctgcacttttattctgatgtccagacctgagttctagttcatctctctgcacagtccctcgaagcttccctgacatccaccccctctcccctcctataactacaaaatggcttggctggggtaggggtggggaaagcagcctcatgttctgtgcactaactgtccccttgcagcagtgtcataaaaaccacatctgcagtgtccccagaggatcaaaggggcaggccaggtgtgtgtgctggcattgattcttctcagcccttgtttttcctttgcttgctccggaggtcacatgcggctgactagcccatcctgctgttcacgactgctgtctctccacagaccgtggccactctctgcttttctctctttctgtccatgtgttagttttgtcaccattgaacgcatcttatgaaataacaaatgtgtgcctaactggagctgcaggggctgaagatcacctttgggctcaccagggtctctgtcccgtgtgacatggctacgtgtcacacagctctggcttagtgccctgccagtgaaagcacctctggaggggattaaaatcccaactggtcaggagtcccccaagcttcctgcccccggctttgaactcacagagcacttaaaaaactacaagtgagctcctaactgtttccatagtagccaatgatctggcacctctagccaagacctttaactgtggcctctgtagaaacaacctgcaatccagggaggggctagcaggcctcggggatgcttgcctcacttgctgcacattcgggccatgctcctgcatgcacttatacttcctagatgtgctgctgaggaaggaaatcactatgtgtgtcttgttaatgaatggtgatagacatgtgtgtgtgttctgcctgcccctcccatgggcccttctggtatgtgtatggctttgaatcccaccagctgtgggaatagaagcccagaggcttaaggactgcatccacgtgtccctatgggttgaacccatgatgtatctggcttcctttgctttctaggttccatgtccttgaggaggactgagccaggcaggcctgagtggctggaaagggagctcaggtgtcgcggattgtccagctcgggctctgagtctggtggagctaactgcaaaccatagccttgcatttcactagctttgtgctctcggggagtcactgagagaagccatatggggctgtgttcgctggcagagttcctgatttctcttctcatggattgttttgtgttgcctggcatgtcccttagagtcattagggtccgatctctgggccttcctactgctccagatacctgccaccaccccagcttttctctttccttcattgtgaccactctcccctttgaaccctctctgcctctctctccactctcctgacccgtcagtaatgtgttaaagtgctcagccccaggtgagcgcttctacctggctagcctgggcctcttggcagtaatctagtttctttctttcttttcctggaccgtctgcctgccgtgtccaaatagaagctcgaccagggctggaacttgtgcgtgttcccagtgttgagagcaatccagatacagagtaggcacccagtaggtatttgccaattaagtgacataaacttacattagttatacattgggaattactttgatatggggacaatcaatagctttggctatctcctgagccactgtagatacatctggggatgctagcagtgctgtagtatctggatggccctcacaggtagggcacagccagaatttgagtttctcagaccaccattctgtgaggctccactggaggaaacactctggcctctgggttctggtgaagctggggagcccccgactgccagtgctgagcatggcgtgagcgaggatgttctcacactggagagggcaaaggaaaaacagacactggctaccagcctgagtgaacacatctgtgtgcctcacaacgaggctgtgagcgtgtgtccactgatttcagtggaggctgtttgctggcagccgctcggcagcaaagcggagccattcggtgcctcttactctgatggggcacagctgagcagattttcatacatactaaaaatagtgtcgtggcgcagtcctcttgtgtcagggctggaagctgactctcagcgagtggagactgtgggatggtggttgagtagtgactctcgcctttagttcctccacaggcttctgccttaacctttcaaggccccggctggcttttgttatcatctcctcgaggttaaccagctggcgtgcagggcactgaggccagtgctgctgagtgcccgtgggggtgggaatgcagtaatgtgctggtagagagataggaattcagagggcagtgtaaatactttgtctgtttgacacagtaatagcagtactttcacatgtagggcttgtgatctgggccatggatcttgcttagatttgctttatcagatatgtttcctcctggggagtgggccttaaagccaacctgaaaacaacttgttactcccataacatctgtgcaatgattgcacccatgcaaagatcttgccaaagatcaaagattagattaaagatgcattagatcaaagatgctaatcattattacatttcacagggttcacacctaggaaaacttgggtcactttttctccctagcagcctttgtagttctggggatcaaatgcaggtcttcatacttatgcaacaaacactttactgactgagctttcctcctctcctctgatcgatcgattgattgattgactgatggatggatggatggatggatgaatggatggattgattgagacagggtctcactgtgtaaccctggttggcctggaacttgctttatagacggggctggccttgaattcacaggcatacacctgcttctgtctctggagtgctgggattaaaggcatgaaccatcacactcagcctattccttgctttaaaacaaaacaaaacaaaacaagacattttatgtggtgtggtttgtccattgtaggctttaatcacaggcctgtgaaacttagggcatcaacagtccctgtgatgagtatgaatattcactgaactgatttggtattagtgtcaaataaatgccttctcacgtcttctgccccagtattcaggcacgcctctgatgtctcaggaacttcaaagtcgctgagaaagagcattgttatgggaggggctgctctgaagacctgactgtttgggtgtgtggtttcctccccgacccctgaccctgtgacattattatttctatccccatgtctctattcttcctttctgcttaaaatgtttttctgtttcacagaaacagaagtggagcgggggctttggttcattgtgccattcccttaacaagcatcgcttcttggtattttcatttcagatcctggtagagaaccatttggccagcctatttaagccccagagtgcagatttatttttatttattatgctttgttggttcagtcagctgggacagaggaggtggaccatgtggtccaaatacactcctgtgggtctgcttctccagcagcagtgacttccactccctctaacacacaacagccaagggactggatgccatgctaggcatgggaagctcagggagggaaaagacatggaccggatatgggttttgccctcatgacctccatttctagtgagagtgttagatgtttatacagataactataaggagagagggaggagggggctgcctgaggaacctctgagatagcccctgtgatcttcatccctgtatttggcccctggtgacatccctttcctttgtgttgagctgggcttcttggttcaggtctgatgactagactatgacaggagtagcagcacatcgtctccgtggttatcatagaagaccaaggcttccagcctgggctctcttgtttctctcttggagcacttgacgtggaagaacccagatgctgtgtgatgaaaggctctgtcagggaaggtgctgagaactgatgtttctggtcaatggccagagagcatctgagggtaacagtcagcaggctgatgagcttgggtcctcatttagtcatggctgaaactgattatatatagcttatggccagaggcatccagctgagctggactgaagcagggtctttttttgtttgtttgtttgtttgtttgtttgtttgtgtggtttgggttttggttttttgagacagggtttctctgtatagccctggctgtcctggaactcactctgtagaccaggctggcctcaaagtcagaaatccacctgcctctgcctctcaactgctgggattaaaggcgtgtgccaccactgcccagctgaagcagggtctcttgagtcttactctgttgagataatactacattaatgtgtagttttaagaagaaatactgagattctctgcctgttttgccccagtggtagcatcttgcaagactacattggggtcctcaagcatggggcatttccattagcagaggtggatccggtgggggcaaggggttcctttgtattcccttggtaatctctcagctcatggtgttcactgttccactttacgagttctaggctcttgtcattgtggaagtgttttaccggccgaattgtgcatcatctttggggagtggcctcttttccctcaacgtaatatccagagaattcactcaagttattgcatgattcggtaatccatgcttagtagtatttcctggtgtgatatagcttagtttgcttaaccattcatccgccagagaacacctggctgactttagctttgagtgattatgcacccacctgtgtacaggtctttgcgtgaacataagtttttatctcgttggtacaaatgatcagaactgcatttgttgggctctgtggtacacatgtttcatcagaagtcaacagttttctccagggtagcttgccattttacacctttgcctcacagtgcaagtgtcttcctttctcttaatctataggttctctcactgctgctatttcttacccactgctggcgataggtctgtgctcttgatcatctctcatgagcgacttgatttgtgtgaaactatttaaaaaacagccagggagtgtctgtgctccctttctgtgggtggatttgaagatagtattgatagtcctagagaaaaggactgcaggcacttcgtgactgcctgccccaccttccctggcttggctgctctcagggcagcaggccatgagcattgccacaggtcaggcatgtccagtttggcttttgtttgtttttgtctgaactgggctctcccagcacagattggctctgagcacgctatccttgagcctgtgcctcccaagtgctagaattacaggggtgccacaccacacactgccaggttggctttcaaaacagaacttatgtgtaggttcgtgcgcacgagtgcaggtgcccacaaaggctggaggagatccttcaggagctggagttgcaggccgttgtgagtcgtctgacatggttgctgggagtgaaacttgcgtcctccagaaggacagtgtatgttctcgaccactgagctgtacgtttctctagcccaggctttactttgaaaagatgctgtagtagtttgaatacacttggcccatgggaagtggcactattaggaggtatggccttgttagaataagtgtggccttgtttgaggaagtgtgtcactgtgtaggtaggctttgggctctcctagtgttcaagctttgcccagtgcagaagagagtatcctcctggctgtctttgaatcaagatgtaaaactattggctgctccagcaccatgtctctctgcacactgctgccatacctcaccatgacagtaatggactaaaactctgaaactctaagccaccaccactaaatatttgcctttataatagttgtcttggtcatggtgtttcttcacagcaatgaaactcaaactaagacagaagttgataccaggagctgggtattgttgtgatagtcctaaccatgcttttctttggagaaatgtagatttgggactttgggaaatagtgcagtgctttaagtggggcttagtgggccatattagtaggagcatgggaggcagtggcactgagggtgatctgaactgtgggggcctagctcaagaggtttcagaggagaatatgagcatgttgcctagagatcagtttgtgatcttttggtgaagaatgtggttgctttttgcccttgcctaaagagtctgcctggggctaaggtaaagagatttagattaattgcattgacaaaggaaatctcaaaaaagcctagtttagattcagtcttgtgatacattcttatgaagggcattttgatcaggggaagcaagcttagaaaggaaaaacacgaaatgtgtggttcaaaattaaagggacaccaggaagtggactggagctaaaacctgtgttcaaggatattaagtggaatcgagggagtggtaacctctgggcaagatgccacccagctaagcttattgtttatgagtctgcagttgaatgagagaaattaacgttaagtgttgttatgacctggatattgttttcatttggacataaggagatactatgtgtcaaattgacaagagatggattgtgatggctattctcacttgtcaacttgactatatctggaatgaactacaatccagaacttataaagatcttatgagaaggtaaagaaagattttaggtccatgccgctaatgccagcactcaggagacagagccatgcagctctctgagatcaaggtcaggctacagagcaagttccaggacagccaagcttaggcaatgagggagttggaaaacagaaagctggcacctggccttgtagccccattagtatgaaggatgacagtccctgagtttgtggacagggcctgtgaggaacaagctcaaggagaggccctggaagaactgctagggatgcacatcatggaaggaggtgcttgatttcagggccctgggacaaggggccgaggggcatatgttacatactaaagcagacctgcctccaggttctcccggcttccctcaggcctctgtgccttctctctctctctctctctctctctctctctctctctaactcacccaagagcagtttctcaataaacctgcatttaatataatctaatctgtcttgatttgtctcatttcaccagtggagaaataacttatcaggaagaacctgccagcctgctgtcccacactctcgagcccacgcgccagatctcaataccttgtatcttagggaataaggttcttttgtttttgtttgtttattttttgagatagggtttctctccgtagccctggctatcccagaacttactctgtagaccaggctggccttgaactcagcgatctgtctctgcctcccaagtgctggaattaaaggcatgcatcacctccagagtgcaggagtgagattttaattttgttagattcatatcttccgttttctcaatgctagcatgccccacctgcttggagagagagttgtgtctcttgaagaatacatggaggccaaagagatctgaatgaggtggtagtaggtccattcagctaaaggatggactagactcttctatatctctgggtattcaagagactgctctgtatgccattcacatccatctgtccttggtgttgatcctctcagggactgggtattcctgggtattccaagcagcccagcaccggacaatcaggtgacacagctgaaaccttactgtggacaaccattctgattagtagacacaaaggctctgagggcataccggcgtaccatctctctgtctgtctccatctgtttctttgcctcgctctgtgtgtgtgcatacgtgcaagtgtgatagacagtgacatacaggcctcattgaccaagtcagaaagcatcatcatgagtttcttgttctaagtattttagtcattgttggtaaatactcctgacccaggaaagggcgggtgctaaggtctagcagaagtctggtgtcagcttgagtccttcaggatagccgtctttgagagcacactagtattcctggaacagaggagctatgagggtaaatcctactgagactttacacagatggcaaaaggatttcctggtggtttttaattttatgtggaggcatgcagccacaaagattgtttggggactttgtgtaaaatcccctttcctctttctccagtgataacgagactcctgaggcctgcctcgggcagctggctcgctgtctggtctggagtcctcctcttattttgcccatggttggcttctctttgggctgggctccttcctagtgtgtgttgttgacttcccatgcctggtctgagcactcacgcctctcagcccttcattagtcacagaataatttcagtccctggtaatgaagcagatagagttcatctctaagcagccagtctgtatcagttggttctgatagaggcttgttagctcccgtgtacttggctaaatgccagccgacatatatttccttcctagcttgaggtgctttttaaaaaatctttctgactgagcactctgtagattttgtctgtgttttctgtagcgagcaattcttagaagtaaggggtgggaacattttgttccttgggtgaaagactcagtttctgtgttagctacagagagctgtggtgtggtgtccttgagaacaacatggagcttgggtaagattccgctatgtgttgtacagtaattgagaacgaaaaggaacagcaagcctgggtttcaatgcagccttgtcatggagctgcttaaaatgatagtttcaatttgggaaagactgggtgtgtgtatgtgtgtgtatgtgtgtgtgagagagagagaaagagagagacagagacagagagaaagagagagactgactgtttgctgtctgtctgtgagtgtgtacctgtctgtgagtgtgtgtatgtctgtctgtttatgagtatgtgtctatctatgagtgtgtgtgtatatatctatatctatatatcttatctgtgtgtctgtgcctgcctgtgtgtattgtgcctgtgtatgagtgtgtatgtgtgtgtgtgtatctgtgagtgtgtctgtaagtttgtctctgtgtgtgcacgcacacacatgtgtgtagtttagatggtatctgacacacaagtgtttgatactgtgtaaatgcatgcttgtattgctcttgctaatgtggtccagatgaaactttcctggatctagtgtccttactctcagatacctagcgaccctttcctactcttgaggatagcaaggcctacaatgtcttcttgtgcccttggcctttccagcctgggcaacttgctcttgttcagctctttaaacattaaggaggatgaacggcaagagttctgtttgcatgaccattgtcctttgagtctacccactacttccagctacttatcctttatatgaattgttgttgcaagtccgtgacaccttagtttgtctccccttccttctcaactgtttggtttttttaaattttttttttccccaacaattactccactctcagaaaatgcagacagaattaggtaaatctgatacttactatctcctcaaaccccagttgagtagttattgggttatctcctgtcgtgagttagtcatccttctgtgagtcagattttatggataaggagaagcatagagagaagcctgtgattagtgtgtgattagctcttctctccattctgtattgatcatagtgggtgcatccagcatggggaccctcccagcactgcgttggagggccagtgggggagatatgagtttgttttcttggtttgctaacacacacacacggtaacttatttactcatgggacagatgtgttgatttggtccatggttttatcaggtagcgatcacttcagtcattgcatacctgtcatttcatacaattaacatttctttctagtaaagaattaaaaacttatcacctaacttgtatggaatactaaagaactgctatggttagaatgtggtctgtctccctgtcttagtgttctattgtgatgagacatcgtgaccatgacaattcttataaagtgtttgattggggcttgtattgggaaagcatttaactggggtgggaagcaggcagctcataggcagacatggtgctaaagaagagggtgagaattccacatctagatctacaggcggcagggagagagaaagccactgggcctggcttagacttttgaaacctcaaagcccacacctagtgacacacttccaacaaggccacacctcctaatcctttcaaatagtgccactctctaagcattcaagaatatgaacctattggggccattatccaaaccaccacacttcctaaactaacacagaagtttaataaccaaagttttatgccagtgatattaaaagggcagaaactcagtctagctgtagtgtttagaggtgtggggtatttagaagtgatcaaacttggtcattgtggtggagcttccttgacggaatactcgtgactttaaaagggagagggagagagactacagactgagattccatacacatacctgctatgatatgaggtaactgggtggagagggaaagagggcaagtgtagtaaaaagtgttaaaaatcccagcccagggcttctttacagcctttatttttgaacagccttaggcagcaccatagctggatagctgcctatcaataacccacttctatttactgtgctccatctggactgcttttaacccaattggccacattctcttggatcttagccatggcttctctccttttccctcttgcatgttcttcttctttcaagatggcttcttctccctcctccctcctcacacgtgatctctcttctgcaagccagggaaacctcaacccacctatgtctcttctgactagctattagcatctttattcaccaatcagaattaacttgggggcagggttgcagactccaggttgtgggagccagcacttagcattacaatagacagtaaaagacaaaacctcaataggtgggaaatgggctggaggtggtttacaagcatctataatatgctatttcaataaccagcctctaaaactatgagtcaaacaagccttattgttctgtacccttagactgcttctggtattttgttaacagtgataggaagctaactaatgtaggaggtgaaagatatctatgatgaaagtcaatgagatatataagtagatggaaatgaagcccatgttcatagattggaagagttgctattattaaaatacccatactaatcaaagcaattaaaaattataatgctatatcaaaataccatctccaagcaaaggcttggcctggtcctggcatgatagaagcctgttagtcaagtgactaacaggtggtgggagatggagaactagattaagaactttcaattttatttttggtcttcgatacaattttgttttgttttctgtgtaaccatgactggcctagaactccctctgtagaccatgctggcctcagactcagagaggtcctcctgcttctgcctcccaagtgctaggattaaaggcttgtgccacaaccacctggccactttcaaatgtatttaaacagtgttcgtgatgatcagaagagggcacaaatgatcttagactgtcacaaaatgcttttcagtgatgcatatctaagaaatacagagattaaacggtcactgtcagagaccactgtctcctcaggctgttgttagcactgaggagcctgcctttgtgtagatcctgacccagtcagtgtgcaatggataggcagtgggactagacggtaccagtgcctgctgttcccccacacaaacaaatgttattataaagcttgtgtggaacttgaaaaaactcacaaagagccaagttaatcttgagcaaaaagccctcaaaccaaccaagcagaccaacgaaaagccacaaagcaggggcatcccactgcctgagtctacagcacgctacaaagtaacagcgtagcctgggaagagtgggagtggcaggaacagaagagaacaccagagcaaagtcagtgcacgtacatctaacagtgaagatgaagttttcagtgaagacaatggcttcataaatggtgtttcagactgtttacacacatactgaagacaacttagacccactttcttgtcacctgtgaaaatcaaatcaaaacggactaaagattaaacgtaagaccctggaccatgaacctagagcagaatccaggcgtatttttctgcagcctcttggattgggcaggaggattgagcctttctggagctagcctaagccatgccattgctgccactgggcaaacatattgagaactaactgcacctggcaagcggaggagacgccttgaccagcggcttcctggagcgtcaaggattcgtgtggcagtgcagtgtgctagcggccatcttgagctgcacacatgtgactccttagcactgttttcctttgaagactccctaaaacagtctgaaatagcatcgcactctcataccccaactggaatggaagctagttttattgtttcaacttgaaagcagttggactgagaaagcaagttccatgccaagatgtcctggaagtaattgctgtgctacataatctctgggctcagaggtggttacactgagatgattgacaggcacaggccttagaaggagatttaccagtccccgcaccagacactttccctctgctaactctctgtcttcaattatgctacttgaaaaaaaattttttccatgaagtggcacttaatgtcttgcttagctggcaattacagactctagtctcctctcacccaatattcctcattactttggcatttctgcaaagtactttttaataatcctcattttcttgtctgatatgtctgtttaatttaattttttttggtatatagttcagctctaacttttagtgtaatgataaaattatacaacaaattccaagcatgtggtttgtgtagagtcacaagttgaaggcaaaggctccatccttctcgcagaacttgcttcctgtggcctctgcctgccttcactgttgtgccccgctaagctgctgctgttacaggaggggagagccctcagcgtgatctctgtgtgatagccttgatgatctagggcagtactgtggcgatggagaggaagcgcgggcccttgtgagcttagccatggggccagtgagtggcctgtggccattgagcacttgctcgtctgtccccagcaccagaggggttgctagtttccagagctgtgctgtctgataaggttctccttagcctcaggtggttttacacccagttagtcaaaagcaaaggaaacaagtctgtgtcctcagcacacagtggacttgaagtacagggctgtgtgtggctagtggcgctgcattggatggtttagatgccagtcagtccatcgctgctcagtgctgttggaaggccgtggggcttcctggatggtgtcagaagccagtacttaggtgcccctcgtggcacttccacccagactgttttacagggactggggttcagcttccagaagatgggaagggaggaaggcaaacaggttacagccctggacagccttgaggaaacggcagtaccaagcaaggacacagacagacttttagacacattctagaatagcctgttgcggaaggaaggtcctggagcttggaagtcatgccaagtgtgctgatgaagttttatcaacttgacataaaccagagtcgcttgggaaaaaggaaatgtttactgagaccatgcctccatcagattggcctgtgggcattttcttaattgacttgaaaagtctcagccctctgtgggcagtaccataccttactgggcagggggtcctgggttgtataagaaagcaactgagtaagctttggagagcaagccagtaagccatagccgtgccccttcatggtctctgcctcagttcctgtcttggcttcccctcatgatgggctataacctacaagctgaaagaagtcctttccttccagagttgcttttgttcgtggtgtttacccctgcaaaagtaaaaccaaccaggagccccaggccccaggctcctaggagctccctggatacattgtgaacaccaggattcagtctgggccccggcaggcatggctgtcagacagggtgagctagctgtgcagggaggacaggatcctagcacagggtaccctggctgctcagctgctccagagaggtctgcgggagggggtttgaaaaggctggcaagagaagagtcattcaggagtcgggaccaaggcacaaaagcttttgtgaatcccttttgttaccacacaaagtggcctttcccagggatctggaccttttttaagaagaaaaaaaaaaaggaacaaatgggggaaagatgagttttcatgtttaaaagctgaaagagccacagtcctgtggaaaaatcggccatgtctcagtagggttcctagcgggaacaattctagccgccagagagggtccagccagggaggaatccataatggctgccaccctgggagatggggacccagaaccatctttacagaaaatgtcaagtatcttgaatactaacaggtcgttaaggagagcagtagaaatgaacccagtgaatactcatgagaagtgctaggagtttgttactggagcgttggttccccaagaccgaaatgggaccaatgtcacagcagctgctgtattttatatttaaaaataattttcaggttgggagacaactcagctggtaaagtacttgctgcaccaggatggggatcagagctctgtccctagtatccatgttaaacagtaaggctgtgtgtgtgtgtgtgtgtgtgtgtgtgtgtgtggtaccgccctggcactgggagcctcccttggcctgctggctagtctcgctaagatgggggtcggttttcattgagagaccctgtcttaaagaacaaagtggagggcaaccaagacaggcaccagacatcaccttctggcttcctcatgcatgtgtgcacatgtgcacagacacagaaagggcccaaaatctcacataaggtatgcatctaaaaagtgatttatggaagtacagctggcacaccatacatttgccccttgtaaatgtacagctcagtgactttcgataaaatttacagagttgtaccaatgaatcacagccctgttttagaacctttccatcatgccacaaagccgccacgtgcttctccatgcttatcccagttcccacctcacacatcctgacgttgcctggctctataaatttgcttttgttggaaatttcatataaatgggtctatattgtttataatcttttccctcttggttctcgccatattgttttggagatcccttcatggtgtggtacatatcggtggctcattttgaatactaagctgttgcatagtattcccctgtgtggatggtacagattccgttcatgtattcattatcaggtggacacttatggccattttgaatattgctattataaatattcatgtgtgtctgcatgacatccagtttaacttcacttttctatatgctgaggagaaaattaactatgtatgtgggaactgatgtttaatattctgtgtgtgtgtgtgtgtgtgtgtgtgtgtgtatgtgcctattcattttgaactttatagtggcaactggagagatggctcagcagttaaaggtgtatgctgctcttggaaaggacccaggtttggtttccagcacccacaatgatgcttttaaccgcctataactccagttccagggaatttagtaccctcttctggcctttgcaggctcctgcacacatgagatgcatatgtagtcacacatacatacaaaccaaattaataaatattgtacataagagctttaccatatatatgattttcaagtattttccaccaatttatagttttcccttagttcttaatgattcatcttgaaagataatttcttggaacattaaaagtctagtttataaactattatctaatatggggcctttattttattatctaagatgctttgcttaagccatggtctaaaagatctttttttgagaggttttatgctttcatctattgcttgcatgggcctgtgatctgtgttgagttcatgtttttgcatgacatgaagccaaagtctaaatagccccctccctcttccttgtatccgtctaagtagctgggtttcatggctgacctatgaggatgagtgtgacctggagtgtggtgactctggagtgagcaactccatctgtgtccacgatctggcccattgctctgtagctgtctttgtgccactagatggctgtggctttgtgtgttccctaactttctttcaaaattatgttggctatactgtgtcttttgtagctccagatagattttttagaataaatttgtcaatatctagcaaaacatctgctggcgttgtggtaggcatgtactgagtttgtagatcaatctagactttcctagtcccacagtgtaatgttttccggatcatgcatatgaggcatctctccatttgtttagcattctaatgcatctttctgtggtgttttatagacttttgtatgcagcttattcatttgtgtgtgtgtgtgtgtgtgtggtgtgtgatgtacattctacagcaagtgtgtggacattaaggacagcttagggagtccgctctcacccagcacatgaatcccagggctaaactcaggtcattatgcttagcagcacacacccttacccactgaaccatctggctggcccgagtatgcacctcttaagctcctttcaagactgatgcttttctcttaatgctgttgatctacaaagtcttgcctatagtatgtggacacagatgcttttgttcagtgtctgttttgattttgttttaagttctcagcctggactctgagcagttgccagtgtctctgtagcttactgggcatgtcatacaagcctctggactaagtttctcatataaaaggttttggcgggttgagtaagctgatcagtatgatcactgactcagtgactttcactgttgtgactgtgaggaggctaaagcgcaaagggatgcactgactctaaaccacacatctatttcagcagggcttatctactggctctgacatgtcacactcaagtttacttatggactgatggcaagagagcttcatggtgtacactctccactctggggcaaatgaagctttgcatggggcattgaaagaacttgtgtccctccaagcctaagactatgcgactcagagattgcacacagtgcacagatctatgagaactactgagccctgagcaggaaaggcccttgtgatgccgggtttccagttcctgcaaatataacgggggaggccatgtgcagccagtggacatcctggctcttgatccgaaaagtacctggcagaggctactgtgggactttgcatttctgaagagcttctgaggggcagcagttccttgagtcacgatttgctctgctttggtggtgtttggtggcgggggtgggggtggggtggcttgaagaagggagttgtgggtagccggagaacagcctgtggtaactttacattctaagcacttggcagaggcagctgcggtagtctaggaaagtagcgcggacctttgaatcctcacactgaccagggaggctgccactggggtctgagtacaaactcagagtaggaaatgggaaggaaggacccctggcctcggagcaccagagtcatccaggtgagtacgcgaccccttcttagggaagccagaggtagaaaacgtcagaagtgaagaaacgccacactttgcttttgcctccaagggcatcagaagtcagaagcttatttttatcaatcagcataaataacctcattatcatggtcattgagtgtcctcagataccaaagggaaaaaacagatctctgtgagcaggacccagaaatactagaggcttgtctcctgttctggacgttgtcctcctggtgttggcgtaggccatggccctgcatcatctcttccttcccccactgcactgcagatgtgtagagttcactgtccactaatcagattatcatggaagaatgtccccagctgggctggtttccattctttgttcttcaagttcaaagacactgagcattccgaacgctgaccactcttctgtttccagaacagagtgcctgtgcagtcgtcctgtataccctgccctgctatggctagagagtggatttccactgcccattacagcactggagactgacccggggcctcacagagccaggcagggactctagcactgtccatgggcctcctgtctcttgttttactcactgagacaagtttacccaggccggcttgaaatccactccctagcctatacagaccctggacttgtgacactgccatgtcagctccagtgtagccagggtcacaggcctgctctaccagcacagcttccctgccctcttcctcttcctttgcctaacgatccttttgttcgtcagtagctgaaaggtcatttgaggaactgtctcttcaaagggtagctactcacagagctgcctggccttcaatctgtacagtctgggggaaagtaccataaaacatagagctctgccactcaggaataccatgctggaaggattcaacactcggataaaatagccatcgtgtctctttaatgtagatcattgctgacgatgagcatgctctgactgaagagaaacttcaggtctcctcttcatctgcagtaaacacttgcttcaggatgctttctccactcagactgccaagcgtgggttcaagtgctggaagttgacatgatgtgcggatagggaggggcttctgtgtactgacagatgaactctgagagatactagagagactgagagagagacagacgggggggtgggggacagagagacagaaagagacagagagagagagagtgacagagagacagagagatcgagagaggcagagaaagctgaaccattttcaggatcttgttaaattccaggctcagctgtggttacggcaggaaggagaggagcttcctgctcccatgttaagtctgctggtgtttgctcagctcttgctatgatcttctgatctaaggtggaaatccaaaggaaagtcagcgaggtgtggagggctcacacattgcactgaaggccattgcccattccgttcttagtgctttggaaggcaggatatggagtgatgtgcagtgtacaagtgaaggggttgccacactgactactgtcccttcacactgaaccgacacaccctgcatgtgttgtgtgtaacaggacatgtacacatctgtagtagggcgtgtgcacatgtgtggcagcgactgtgcacatgcatacacatacagaggccagaggaggatggtgggtacaatgagggacgttcttaaaggaccctcgctgagctctgtgagggaggtcttggcttagggttccacttcagctcttgctgtgatggttgattttgatcctagtggacctcagaagacgaagccgcagacccaccagcttcctggaactgggaagtgctgcacacccaagggggctgctggacatttgctgttggttttggtgtgttgggtttcttctcctttctagattataaatgcaacctgtttttaaatagaagattctttttattctagaatctaagatggtgttctgctcccaaatcacgatgtctcccagatgacagggccacagtcatgggaggtctcaggcttgccagctttctctagctctccgatccccatgctgattcctgcctggtctttgggtctggagaggctggggtcactctcttctggatctagggtgagtagtaaccaggctcttgttggcaagcaaacctcagtctagaggaaccggaactctctggattctggaaacaatctggcttatttgaattacagtagatggacgacaacactgggggcgtctaagggtttagggccagcactgggggaggacaagactcagtggagatacatagtgagcaggacagagtaatgaatttagaggtttcagacatggacatagcctcacactggcggacggtgtgaactccatcatcattgttctgcccaggatctagcttctttgtttgtaagatgagagtacgtactttacaaaaacaatgtaagaactacattgagttttacagagagtaaatgaaaatattgtatgcatatatatcaatattttatgatgtttatacatatatccacataattgtttctttctactttatgagcagagtttgaaaccctctctcctggacacacactggcaggcacatcagtaggtctgcagtgagcaccatctccctggccctgagcactgcctggcttcttctgccctggtagatttacttctgaccttttatggagaagtagttgttgttatcatcaaaaacagttgttgttgtccaaaaagtatatttaacatgaaggggtgtgaaatgtaaggccttctattgttcttttgtttacatttccttcctttcatggtgactttggggattgctgtcagtcctgatggggaaagcagaccttggcttcttgctaggttccaggaacaggaaacaaggcttcctcccctgcaggacttatggaaaccactggtggtgggggtagtaccctgtactcacctagagtctgacttttattgatttgctcaagtaattggttgatttctttagagactgactcagaacttttagaatggaagtgctacacgccagcaccttgtcagtgagcaagttgccatctgtgacaagcaatgccagcctcatgacagatgacacgtgttgagcggttcctagttgctagccactgttgtgttctctgtgcactgattcctagtgagcacagccaccagttaaggtgacgtcgagggctcagtgtttccccatctggaagaggagaaaagcagcccagagagcttacgtggcctgctctgcgcacacctggctaagtgggaagatgatgatgaggcatccgggacactagtcaattagctaattaatgcgatagtcactgttcctgacataagatgtgggatatctcttgaagtggaaagtgtatttgtcacagcattttatgggtgctcttagggaaaccagagctcccaggacaaaccctaacatccttttagacctcaccttagcatgagtgcctgtgagttaattagatgctttgtatgtagtccccacactccggctgccctggttggtgcagtagctagggaggacagatagactatgaggtcagactagggaggacagatagactatggggtcagactagggagcacagatagactatgaggtcagactggggaggacagatagactatgaggtcagactggggaggacagatagactatgaggtcagactggggaggacagatagactatgaggtcagactggggaggacagatagactatgaggtcagactggggaggacagatagactatgaggtcagactggggaggacagatagactatgaggtcagactggggaggacagatagactatgaggtcagactggggaggacagatagactatgaggtcagactggggaggacagatagactatgaggtcagactggggaggacagatagactacgaggtcagactggggaggacagatagactataagatcagactggggaggacagatagactatggggtcagactgggaaggacagatagactatgaggtcagactggggaggacagatagactatgaggtcagactggggaggacagatagactatgaggtcagactggggaggacagatagactatggggtcagactggggaggacagatagactatggggtcagactgggaaggacagatagactatggggtcagactgggaaggacagatagactatgaggtcagactggggaggacagatggactatgaggtcagactggggaggacagatagactatggggtcagactgggaaggacagatagactatggggtcagactggggaggacagatagactatggggtcagactgggaaggacagatagactatgaggtcagactggggaggacagatggactatgaggtcagactggggaggacagatagactatggggtcagactgggaaggacagatagactatgaggtcagactggggaggacagatagactatgaggtcagactggggaggacagatagactatgagatcagcactgggttaagcctgtggtgctgacccactgggccccagctcctgcctggaggaattaggccagtaagtctctaggttgtcatggtcaccaggtgagcttgggtttagagaaagtgtcagctaggtcggtgacccctgcaaacagccgaacagtgctcacagatgcactcactgtctcatcacctgcttttcttcctcggtcctgagacgtccactagaataacacaacaagactgactaggtggcgggggagcgggggagagaccctggagtacacacggttgtgaaaaacgctctttggcttgtgtcctagggttttattgctgtgaagaggcaccatgaccagggcgattctttaaggacaacatttaattggggctggcttacagtttcagaggttcagtccattattgtcatagtgggaaacatggcagtgtgtaggcagacatggtgtggagaaagaactgggaacacacttcctccaacaaagccacacctcctaatagtgccaccgcccatgagccaagcattcaaaggcaggatttgtggagccattcctattcaaaccaccttggtggaaaccgttgtcaacacttagcagccatccttagctgaggaaaaaagccgagtatcctcagggggagcaaagcttccaaaatgtcctgacttgtagaataaaatgtgccctaggtgcctcccgcagatggctccgcggactgggcgcacctcttttatcttcctcctctcttgaaaggaatggaccatagcattttaattctttatagctgaagaacttagatgcctttggctttgagaatcttttcacagcagttcctgtgatgggctagggttgttacagtttccctgaggagtgcaactgtggctgttgccaggctagggaagcagtgcacacctgtgtaagggacctttgactaatacagagtaggaaccatgctgttgggcttaggggcttggtcataccggtgacagtgatcagacaggaccacataaagtctgacccttatctgtgtgcttgcttatctccagggcctgcagaacctgcaagagcgcaaccccatagggaaaaaggaacaggaaattgttcagaaggagtagatgaaatgagaaaaaaacaaaacaaaacaggaaatggctctgtaatggggagggtgcagccgtagaccatcctgagagccaggccggttgaaggacaggtcatccttctcacagttcttcctggtcttccagaagccaggctgtggtccttgctcttactgaaggactgtgggtgacctcccgcccctggcttcttgaaggttctggagttagaatggaagctgtgtggatagaagctcaagtaactcaggagggccatgtggcccctctgctgcctttcctgctgtcctggcctcccactgctctgtgctgtcccaacttctgtctctgcagattgtttcccacctaactccaccctgcccacctggagcctacctctgtggtggagacaaaggaagaagaaagctcacacaagccacccccataggagtgcagatgcaggggtcttttgacaaaagccacacacgtctagggaattatttggtagttgtggcttgtttccaaatctgtgctacatgttgatgtgaaatttagaagaaaaaaaaaatcaccatttttgcttccctttcaggcataggctggggtgtttcttgttcccagaactgttgcggttatcatgaatttattactaacaagtgcgtcatccggtggtttcactctcatctccatccctaatctcttcgagctactctgtccagtggtacacctgtatacagtgcccacaatacccacagagctctcttgctaataacgcttcagtcaggattagggtttaaatagtgcacagctgaccctgtaatccacgtgctttcccgtcagggttgaatactgcatttgtagagggagctgctgaactgggtcagagaagtttagaggtagaacttggtcccatctctaggacctttgatctcagaggggatgttcagtgccctaaagacaagttggtgcagccaccagaggcagggtcttccatctctgcacgttttgacttttgaaggtttcttcttattttgtctaaaatccgcttttatatattgattgttacaccaaggcctgacctcagcagggaagcctagctcctttgttcccgagattcaaagacagcatccagtcaggggacacagctccattttccttgtgtgttctccactggaaattcttccagtctgctcactctctggactgtgagccggggttacagggtcagcctgtgttgttccatcctgttcccctaaaatgtaaggtttgccatagcatgtggggtgccgctgggagagtacaggagcgttccgcccacccccccaccgtgtgtgtgtgtgtgtgtgtgtgtgtgtgtgtgtgtgtgtgtgtgtgtgtgtgaacgtgggcctcagctgatctagtgcagcgctcttcctgatggctggatatacagggctcgttctcactcccaagcccagcatggcgactgcggcaatccactcggcataacagagtccttcagaggactccattctaactctgggttgaatgtagaggccatgtagtgggctttctagggagagcaggacaagcttctcacactggtctcaaaataaggaatgggaaaggaggaggggttgagggttagaggttgaggctgggttgatggcgctgcagaagccggggttgagtggtttggagctactgcttctacctagtttttcttctccgctcacctggatgtaggtccaagaggaggcctcaaaagctataagcagtcccgtgtcaaccgtggagtcacactgccaacactcacttttcatctgttttcttctgacatggaattcttagattcttgtgtgtgtgtgtgtgtgtgtgtgtgtgtgtgtgtgtatctatatatttctggttactgaactcatctagttcccatctccttacttttgagaagtggatttcttcatcttggatctgtgtggctgattagcccagtaccacagcagtgctccttggtcagccctattaaaacatcaccaagtttagtctggccctgagtcctgcctcaccgggttgtgttggagacaaactcctgtaccaccctacatttctgctttgtgaccagtgagtctggtggatgcgtttctctcttttatcaattccttgatgaagttctttagtgtgtgctgaagagagttctaaattcacattggttttgaatagtggggcccagtcctcatctcaaattctatttctagcagatcccgggtgcatgagctctgtgtgacatgtattgctatggttactgtgcctttttattttttaatagatgtgattattattctataactttggctgatctggaactcatcggcctcaagtttgctgcagttctcctgcctcagcctcccaaacgctgggatgacagggagagccatcacccaaggtgggagtagtggcttccatgtccattattgaaaatagactattatcaggtccaagctaaccttcagccttctgcagcatatcagggttgcggctgtgccgagatgcaaactaatgccacattctgctccactgaggagctacacagctgagggagcttaatatcctagaggagttaatcagaaaacactgcatgccagggaggcggtgcctgctgacagctcaaggggaagtgttatgtttgcataacaacatagggcaaccgacacagggcttaagagcaagatcagcttcctgtctgattttgtgccacttgttcccagattttagggttaggagggaacgtaccaccatcaggattgccagaggggatttaaaccaagattatgaggcataccccagggtgggcaatggtgtctcttctcccttataggtcactcctggagaggggttcttgtttaaattctgctatcttttaatcatgtgggcagggaaaggattttcttgattttagcttctaaccataagctaatgatttctacattggagaggctgggctgtactgataaatgagttctaaaatctccatgtcttaatacagtacatttgtatgcacatgttcatgtttgtgtgtgtgtgcacatgcatgaatgcatacatatgtgaagatatgcgtgcacacatacatgtctgcatttttccaagcaaatttgactctggtacagtgactttctaggtaccttccaaaaccagggtccagtctccaccatctagagcatggggctcactgccacactgcaaacgttacactcattgcttctgctcacagtccaatagccagatactagtcatatatcctcgattgaaagcacaacaggagagcatggcatgtgtgaacagcttgtaaagagtcgtccctgcaacccggctgtgcccgggattgccacttgaatgtgtccaggaaggcacacacagcctgttttctctcccaggcctgccatttcttcaccttggtaaatggagttacaggaacaacgtgcagccaggctgactgggttcctgccatcactgctagggcgtggcctgggcctctgtgagcctcagctcaaactttctcagactatcctgctgttgttgccgtctcataattctcacggtgtataaccagttcatctcttcactcctcatggtccggtgcacgatattgtgtgtgtcttcacctgactcagtaaccccccagccttcctggtcgccacctctccagctggctgagaggctgcagtcaccttatgtctggaacaactgctccagctgggtacaagtgtgtggctgggatggaggtggggaacggctgcagtggtctcatctaccctcattctgcctgcttggcctgaatgtacagctgttctgtcgtgagagtgtgctaacacaaagtagagcgacagagcgattgagatgccgagggcaagagtggtcggcatggagacagtgctatcccttaagcaggggttgggtcatgggcctaaattcagggagattgcaggtctctgaataggggtgctctgtccatccctcactctgcttgtctttactgttgggggccagtctggagagccagagtgcccaggagggctgccagaattacacctagataggagatgtacaggtcttccaaatagggctgtggtgagcctgagtgagggctgccaccttcctgctctctgctgcctctcagcaccatcactgggcaccagctcttcctcctgtggaagtggacagaggagggtttataaatatgttatctgattgaaagaatgcagagttccccgtggtaaccaggacaggcattctgtgttctacttccatcagacatgtggcttgctgcaccgtcagtgcgtgcactgagagggtctagcccagaccctccaccccgcacccaggagaacatggacttaccccatcccccaggggtagtgcaaccgactctccgcttcctgaaggagcagttttcctcctgagcagcctgactttccagctgcttctcctgtctgtcatcatcattacattgcaaacccctcatgaggtgcagaaggaaggaggagcagttctaggtttttcttaaggcaaagagaaaggcttgtccttggccagaaaatcccagttcaaaatgagcagagagtttttgacaggccctggttacattacaggaatgcaatgtaaccaacctaactgtacaagatacaaaataaaacacatgttgcccttgaccataaaagacagctctttttcctcttgtctgtctatccagtgtttcttgtgttcacaggttacacctggctcctcactgcagttatttgggaattctttcaagatgggtagctctcccttaaccgggactctcattctctgcacctgcgtattggccatgagcactccggcagcaccgcagaaaactctgtgtgtgtgcgtgtgtgaatacactagtctgtgaaggtcagtgggtgggtatcttacctttcttaccttagtttttgagagaagttctcttcatgaacctagaactcagtttctagctacatgcagtatgctggctgacagtcccccaggatatgcctctctcacccctacgtgctagttttatgggtgtatgctgtacctggctttgtactttatccagtgagccatcttctcaagtctagagtagtctcaaagtaaattgccctgccctgtattcaggaaccagaccctaaatgcagacctgtgggaatcctgctttggtgtgaagggaagtggatggggggtgggggtccatcagagtagtatagactaagaaacatcacacgatgaacctccacaccagctgccaaggcaggctaaatgttgtttgtttccataggaatgccagagtttttccttcagacaggcatgcaggaaactaaaccacaagaaaggccaagtggaatttcttaacccaccccaaacaatgaaatgtggagtgtgggtttatggttggaaagtggctgtgtaagaatagcatggaccagctccacacgtctgcctcctgggctgccagaatgtgggcttgtgtggactgcggggagggaccatgcttggctagaggcctgcctcctttgggaaggctggcattgcctagcctctcctgccagcatcctttctctcctagcttggcttttaacaagctgaccagtgttcacagagcctgctttagatgtgtagacagtgtgagtgtaaacttaatggcagcatccatcctcaccctcagccatccttgtctgaagtgacatctcgtagaggggttgcttggcctgagtgacctccctgcacacaggaactggctgacctttccagtcatggccttgcatcctcactgcctctgaggtcgctccctcagcgctgggctcccattagagccctgaggacccaggctcacgcttcccagaaagacctgctctagcaggtgtggttttttttccagctgagacccaacttgctgccattgccttgaacgtcaagatatgccaggtggtaggaggtggcgggaggtgagggggcacaattaaatcaacggcagaagaagaatgcagtgagagccactcccacctggtattggcatttgctttgagaaagtgcttttagaatcaccgtcaacaacccgtgcggaggcaggcaggagcttctaggtggtcttagcaaggaaaaggattttagaagttctgaccacttgaagacaaaatcataaagtcctggtcctgtccaaaccttaaatctgataatcatgacctaaaacaggtatttctttgtggtaattaattaatgtcttttaaaatactctaatttgaaggcaacacacaaccatcttgaaaatgtatttatgaaataattagacatctccactctaatgttttatttgcatgtaatatatttatccacacattatacatatattaacatgtttttacatgttacattgtgtattatagtatataactttggatgttgatttgtttctgtgactacaaagatatgagtatgtatggtagaaaacttgggaaagtgtaataggtaaatttaaatgatgtagaattctgtcatggccaagggtagctgctgcagctgacctcggccctcctggcattcacccccttgtatggttcttggtcttggacttcagctgcttgttacttgtttgtgacaaacaggatatagtggaagtgctgctccttaactcccaggtagttaaacctgggtctcctggaatacctgtccttgatgaagcccctcttgggactcagcagccacaccagatgaagccagaactctgggagtacccacatgagagcacttggagctcacagccacactgagtcccacatcaacttctggcaacatgcagggtcatcttggatgcctcgcttagccacccttgttgatggctcagccttgctgctgtttgtccacagtcacggagattacgcaagggccatccacagctaagcctcatttgtctacagggataactgctctctggggccattgctgttctcagttagtggcttgctacacagcagcagatacccggcaaatgtaagaccaggctaaaggaatgctcaaggcaagaaagacctgtggagccattcgggcttctgctctgcggccataggcaggttcatggttgctgtgaacattagttctcaaacatcagtaaaacagaaagggaggcgtggagaaacattccagccgggcacatagctggtcctaagttgatgttatctgccacttggtggtattaaatggtcatgaagtaagaacacaccctattcctcagctataaggagaatgcaggctgatcctggcatgattacccttccataggctgccatacagcccggcagcaggatcagccacatgccatgcttactgggtggcagtgagcggccatgactcttcaggccaggacaagatggaaacagcagagaacgtgagatggaaatcttgggcttgcattgttgaggttgggcacagtgcctgtcatttctgagccttgcactccacacagtgcttggcaccctgtgggactctggcctgggctgaccatcagtgaggtgaggtccctacaatgtagtttagctgttctgttttgttttgagtttaccttagcccttccaggttcatatttcacttaataaggtagaactcattgtataatatctttaaaagataagcttggaaagaaaacttggtctcatggtttctaacactttcccacactgacactgactgctgtaagaatggacaggagccctaagcctggctccttgtaggctagctcctgctgtacaatgttagccaagaagggagggaggcggcagaaggccaccgaatctgtagagtagcactgtagctagacaagccctgtcagtgggcactaaataggtaagaccttgtcagtctcaaactgttcctacacaatgctgtctttgtaaacacatggaaggtaacatttcagggatcagaggcaacatcactaatgatgagacaaatgaacaaaacaaggcctagtggcagagacccagtgtggcttctggggtgttcccaacatacgtgcaaaatctggtcttgatcacaaggaaacatcaggccttcccaaacccaggggtctcttatgaaatcaccccttaagcgattccaggtcatgaaagaaaggaaaaaccaaagagttatggagctgtgacaactatttgcaggcaatcctagaccagaaatatcatttttcttttttgacagctgacaaatgtggaatgggaccgtggacttgatggccctgagctgctggtgttaacctcatagttcagctgccctgctgcctgggtgtcttgtttcttagagagtctgtgccaaatagttaagagtttaaaacctttttgtttctgttttgttctcttgttttcaactgtggttatgtcaattcagcattgtctattaagtccttcattaaaattaaaacaagaaacttagatttttaattaaagtaaaataaaaaccaaattaattaaactaagctaaaatttaattacaaccagggaatgaatgactttatacttaagtacagttggatagaatattttcagttacggacaagattatagaaagtggtaagagggcggggctcctgcttcggaggagagcagttgtttttaaatgaaaactggagtctgactcctggtgaggggctaggctcccagtccaccttctgtgccattcttggtggacccacagagtgtgcagaaaatgggcaacagcagggggcgccgctgagtgctgagaggcagaggcagacatgggctgggaagcctgtgagggacgcctgaggtgctcagcacataagttcctcatctagctgtccaacgttgcaatggacagtagagagtagagatatagtagctatgctagtatagcatgacatcttggcaagagatggcttaagagccgttccctggtcagctttctatctcaagtgattaagtgttgctaatgaaaactgattttcttctgctttagaagatgagggagcggtccctgcagtagtcgaggactgcagaagcagtctcccttggtcactggtgagaaatggttcacgtcgatccagtcctttttacttttgtggacaatccccagttgtctgcatgctctgttggtgaagggcttcgagcaacccttggagaagggcgagtcctgcaagagaaggaacacaggtggctcatctcactggggagaactgctggccaagctcagagctaccagaggtgcaggcgaggcagaggtgctaaaacgtgggaagtaaactctgtcttgccttggcaccatagtaaggaacctgtgggtaagcatccatggccagcccagtcaagcagtgtacaaaatgtgggacagccttgtctaggacagtgagatgggagagagaaggcccgggcctgacagtctgtggggcagccatgccatccttgcgtggttcagctatggtcttctgtgttggatccactgttactttgcatggtgctctgtggtggttgtaaggggtaagttacccaaagcacagggtatgtagttttatgaactgggattgcactttgagaaatgcaacacactacaaaacaatactgagagcttgtatctgtcacatgagcaaacaaaagggcggggctgtggtagacagaccctgataggctaggcagagaggcaggagaaagtcagctgccaggtagggtgaggagctgtagctggcaggcagggcaaggcttgttttattttgttttttccccctgtatttaaactaaatctttacagggatgaaggccccattgccagcagcagagaggaagtggtcagagcagggaaagaaagcaagcccaggttagaaacaaggccccaagactcccgagaaccttggcaggagaaatctgggaagtctaacagtgcttatttgtgcaaaccaatggtattgtgttcagaaaacatttgttaagtctgtccaatgaggactcgattccatagcttctgcctccacagggtccgtgagaaaaccctcttggtagtaaagagcaaggccaggcctcaatccatccatgtaacaaccctgtgagtcaagggaagtgtgctcgcaccccaataaggagagctcacacttttgtgagtgagcgagcgcaagtgcatgttgtgtgcacgtgtgcacaaacacacacattcagttacactctatactcacccgatgtctctggcagtttctctctctctctctctctctctatatatatatatatatatatatatgtatgtatgtatgtatgtatgtatatatatgtatatatatacatgtatatatatatgtgtgtgtatgtatatatgtatatatatgtgtgtatgtgtgtatatatgtatgactcaggtaccatgggagctctacactatagaaatggtaaatttacagatcacaaaatatgtgtgtgagttatagttttatatgagcaatagaagtaaaaagaaaattgagaattagattctgttctttactaaagcaggtggtttccacctagttagaatgctgagggtgaggagagagagtcctgtggtcctgatgtgggaccaaaccctgagtcttcctgtagtcagtcagtcctacacagcaggagctgcgagctatagccatgcctcagctgagccacagccagtgtacaggtttccatgcctggttctaagagggctgagtagggctagaaggacgaattttttgtgtagctgatagatcaagttgactatagacaataatttcagcccccaagcctttaccagagttgttcatggggtgtatggctcattcttaggtgctccttcctgggaggtgcaagcagcctttagtatggaaatcatagattcacgcataggaggccannnnnnnnnnnnnnnnnnnnatatatatatatatatatgtatgtatgtatgtatgtatatatatgtatatatatacatgtatatatatgtgtgtgtatgtatatatgtatatatatgtgtgtatgtgtgtatatatgtatgactcaggtaccatgggagctctacactatagaaatggtaaatttacagatcacaaaatatgtgtgtgagttatagttttatatgagcaatagaagtaaaaagaaaattgagaattagattctgttctttactaaagcaggtggtttccacctagttagaatgctgagggtgaggagagagagtcctgtggtcctgatgtgggaccaaaccctgagtcttcctgtagtcagtcagtcctacacagcaggagctgcgagctatagccatgcctcagctgagccacagccagtgtacaggtttccatgcctggttctaagagggctgagtagggctagaaggacgaattttttgtgtagctgatagatcaagttgactatagacaataatttcagcccccaagcctttaccagagttgttcatggggtgtatggctcattcttaggtgctcctcctgggaggtgcaagcagcctttagtatggaaatcatagattcacgcataggaggccaggctgtccacagacctgcatgtctgtgagttggcctttccctggcatccagaggcctggaaggcgggatgtggatgtgtgtgtgttggggtgtgtgtgtgtgtgtgtgtgtgtgtgtaaagactttggagccctggtgttttggtgtgaattcacttcccagatatatagcatgattgcctgccttagcctccatgtcagttgtcaggtagaactaataatgtcagcctccccctgtgtttgtatcatcctgtgaatccaatcgatttgcacatgttggctgttgccattggagatttccaactttgctggcattacaccccttttccacgagtctctccccctggtctttgctcagtgaagggaaatccccacagcatttccgagtcctcagaaatgaggattgtgaggnnnnnnnnnnnnnnnnnnnnnnnnnnnnnnnnnnnnnnnnnnnnnnnnnnnnnnnnnnnnnnnnnnnnnnnnnnnnnnnnnnnnnnnnnnnnnnnnnnnnnnnnnnnnnnnnnnnnnnnnnnnnnnnnnnnnnnnnnnnnnnnnnnnnnnnnnnnnnnnnnnnnnnnnnnnnnnnnnnnnnnnnnnnnnnnnnnnnnnnnnnnnnnnnnnnnnnnnnnnnnnnnnnnnnnnnnnnnnnnnnnnnnnnnnnnnnnnnnnnnnnnnnnnnnnnnnnnnnnnnnnnnnnnnnnnnnnnnnnnnnnnnnnnnnnnnnnnnnnnnnnnnnnnnnnnnnnnnnnnnnnnnnnnnnnnnnnnnnnnnnnnnnnnnnnnnnnnnnnnnnnnnnnnnnnnnnnnnnnnnnnnnnnnnnnnnnnnnnnnnnnnnnnnnnnnnnnnnnnnnnnnnnnnnnnnnnnnnnnnnnnnnnnnnnnnnnnnnnnnnnnnnnnnnnnnnnnnnnnnnnnnnnnnnnnnnnnnnnnnnnnnnnnnnnnnnnnnnnnnnnnnnnnnnnnnnnnnnnnnnnnnnnnnnnnnnnnnnnnnnnnnnnnnnnnnnnnnnnnnnnnnnnnnnnnnnnnnnnnnnnnnnnnnnnnnnnnnnnnnnnnnnnnnnnnnnnnnnnnnnnnnnnnnnnnnnnnnnnnnnnnnnnnnnnnnnnnnnnnnnnnnnnnnnnnnnnnnnnnnnnnnnnnnnnnnnnnnnnnnnnnnnnnnnnnnnnnnnnnnnnnnnnnnnnnnnnnnnnnnnnnnnnnnnnnnnnnnnnnnnnnnnnnnnnnnnnnnnnnnnnnnnnnnnnnnnnnnnnnnnnnnnnnnnnnnnnnnnnnnnnnnnnnnnnnnnnnnnnnnnnnnnnnnnnnnnnnnnnnnnnnnnnnnnnnnnnnnnnnnnnnnnnnnnnnnnnnnnnnnnnnnnnnnnnnnnnnnnnnnnnnnnnnnnnnnnnnnnnnnnnnnnnnnnnnnnnnnnnnnnnnnnnnnnnnnnnnnnnnnnnnnnnnnnnnnnnnnnnnnnnnnnnnnnnnnnnnnnnnnnnnnnnnnnnnnnnnnnnnnnnnnnnnnnnnnnnnnnnnnnnnnnnnnnnnnnnnnnnnnnnnnnnnnnnnnnnnnnnnnnnnnnnnnnnnnnnnnnnnnnnnnnnnnnnnnnnnnnnnnnnnnnnnnnnnnnnnnnnnnnnnnnnnnnnnnnnnnnnnnnnnnnnnnnnnnnnnnnnnnnnnnnnnnnnnnnnnnnnnnnnnnnnnnnnnnnnnnnnnnnnnnnnnnnnnnnnnnnnnnnnnnnnnnnnnnnnnnnnnnnnnnnnnnnnnnnnnnnnnnnnnnnnnnnnnnnnnnnnnnnnnnnnnnnnnnnnnnnnnnnnnnnnnnnnnnnnnnnnnnnnnnnnnnnnnnnnnnnnnnnnnnnnnnnnnnnnnnnnnnnnnnnnnnnnnnnnnnnnnnnnnnnnnnnnnnnnnnnnnnnnnnnnnnnnnnnnnnnnnnnnnnnnnnnnnnnnnnnnnnnnnnnnnnnnnnnnnnnnnnnnnnnnnnnnnnnnnnnnnnnnnnnnnnnnnnnnnnnnnnnnnnnnnnnnnnnnnnnnnnnnnnnnnnnnnnnnnnnnnnnnnnnnnnnnnnnnnnnnnnnnnnnnnnnnnnnnnnnnnnnnnnnnnnnnnnnnnnnnnnnnnnnnnnnnnnnnnnnnnnnnnnnnnnnnnnnnnnnnnnnnnnnnnnnnnnnnnnnnnnnnnnnnnnnnnnnnnnnnnnnnnnnnnnnnnnnnnnnnnnnnnnnnnnnnnnnnnnnnnnnnnnnnnnnnnnnnnnnnnnnnnnnnnnnnnnnnnnnnnnnnnnnnnnnnnnnnnnnnnnnnnnnnnnnnnnnnnnnnnnnnnnnnnnnnnnnnnnnnnnnnnnnnnnnnnnnnnnnnnnnnnnnnnnnnnnnnnnnnnnnnnnnnnnnnnnnnnnnnnnnnnnnnnnnnnnnnnnnnnnnnnnnnnnnnnnnnnnnnnnnnnnnnnnnnnnnnnnnnnnnnnnnnnnnnnnnnnnnnnnnnnnnnnnnnnnnnnnnnnnnnnnnnnnnnnnnnnnnnnnnnnnnnnnnnnnnnnnnnnnnnnnnnnnnnnnnnnnnnnnnnnnnnnnnnnnnnnnnnnnnnnnnnnnnnnnnnnnnnnnnnnnnnnnnnnnnnnnnnnnnnnnnnnnnnnnnnnnnnnnnnnnnnnnnnnnnnnnnnnnnnnnnnnnnnnnnnnnnnnnnnnnnnnnnnnnnnnnnnnnnnnnnnnnnnnnnnnnnnnnnnnnnnnnnnnnnnnnnnnnnnnnnnnnnnnnnnnnnnnnnnnnnnnnnnnnnnnnnnnnnnnnnnnnnnnnnnnnnnnnnnnnnnnnnnnnnnnnnnnnnnnnnnnnnnnnnnnnnnnnnnnnnnnnnnnnnnnnnnnnnnnnnnnnnnnnnnnnnnnnnnnnnnnnnnnnnnnnnnnnnnnnnnnnnnnnnnnnnnnnnnnnnnnnnnnnnnnnnnnnnnnnnnnnnnnnnnnnnnnnnnnnnnnnnnnnnnnnnnnnnnnnnnnnnnnnnnnnnnnnnnnnnnnnnnnnnnnnnnnnnnnnnnnnnnnnnnnnnnnnnnnnnnnnnnnnnnnnnnnnnnnnnnnnnnnnnnnnnnnnnnnnnnnnnnnnnnnnnnnnnnnnnnnnnnnnnnnnnnnnnnnnnnnnnnnnnnnnnnnnnnnnnnnnnnnnnnnnnnnnnnnnnnnnnnnnnnnnnnnnnnnnnnnnnnnnnnnnnnnnnnnnnnnnnnnnnnnnnnnnnnnnnnnnnnnnnnnnnnnnnnnnnnnnnnnnnnnnnnnnnnnnnnnnnnnnnnnnnnnnnnnnnnnnnnnnnnnnnnnnnnnnnnnnnnnnnnnnnnnnnnnnnnnnnnnnnnnnnnnnnnnnnnnnnnnnnnnnnnnnnnnnnnnnnnnnnnnnnnnnnnnnnnnnnnnnnnnnnnnnnnnnnnnnnnnnnnnnnnnnnnnnnnnnnnnnnnnnnnnnnnnnnnnnnnnnnnnnnnnnnnnnnnnnnnnnnnnnnnnnnnnnnnnnnnnnnnnnnnnnnnnnnnnnnnnnnnnnnnnnnnnnnnnnnnnnnnnnnnnnnnnnnnnnnnnnnnnnnnnnnnnnnnnnnnnnnnnnnnnnnnnnnnnnnnnnnnnnnnnnnnnnnnnnnnnnnnnnnnnnnnnnnnnnnnnnnnnnnnnnnnnnnnnnnnnnnnnnnnnnnnnnnnnnnnnnnnnnnnnnnnnnnnnnnnnnnnnnnnnnnnnnnnnnnnnnnnnnnnnnnnnnnnnnnnnnnnnnnnnnnnnnnnnnnnnnnnnnnnnnnnnnnnnnnnnnnnnnnnnnnnnnnnnnnnnnnnnnnnnnnnnnnnnnnnnnnnnnnnnnnnnnnnnnnnnnnnnnnnnnnnnnnnnnnnnnnnnnnnnnnnnnnnnnnnnnnnnnnnnnnnnnnnnnnnnnnnnnnnnnnnnnnnnnnnnnnnnnnnnnnnnnnnnnnnnnnnnnnnnnnnnnnnnnnnnnnnnnnnnnnnnnnnnnnnnnnnnnnnnnnnnnnnnnnnnnnnnnnnnnnnnnnnnnnnnnnnnnnnnnnnnnnnnnnnnnnnnnnnnnnnnnnnnnnnnnnnnnnnnnnnnnnnnnnnnnnnnnnnnnnnnnnnnnnnnnnnnnnnnnnnnnnnnnnnnnnnnnnnnnnnnnnnnnnnnnnnnnnnnnnnnnnnnnnnnnnnnnnnnnnnnnnnnnnnnnnnnnnnnnnnnnnnnnnnnnnnnnnnnnnnnnnnnnnnnnnnnnnnnnnnnnnnnnnnnnnnnnnnnnnnnnnnnnnnnnnnnnnnnnnnnnnnnnnnnnnnnnnnnnnnnnnnnnnnnnnnnnnnnnnnnnnnnnnnnnnnnnnnnnnnnnnnnnnnnnnnnnnnnnnnnnnnnnnnnnnnnnnnnnnnnnnnnnnnnnnnnnnnnnnnnnnnnnnnnnnnnnnnnnnnnnnnnnnnnnnnnnnnnnnnnnnnnnnnnnnnnnnnnnnnnnnnnnnnnnnnnnnnnnnnnnnnnnnnnnnnnnnnnnnnnnnnnnnnnnnnnnnnnnnnnnnnnnnnnnnnnnnnnnnnnnnnnnnnnnnnnnnnnnnnnnnnnnnnnnnnnnnnnnnnnnnnnnnnnnnnnnnnnnnnnnnnnnnnnnnnnnnnnnnnnnnnnnnnnnnnnnnnnnnnnnnnnnnnnnnnnnnnnnnnnnnnnnnnnnnnnnnnnnnnnnnnnnnnnnnnnnnnnnnnnnnnnnnnnnnnnnnnnnnnnnnnnnnnnnnnnnnnnnnnnnnnnnnnnnnnnnnnnnnnnnnnnnnnnnnnnnnnnnnnnnnnnnnnnnnnnnnnnnnnnnnnnnnnnnnnnnnnnnnnnnnnnnnnnnnnnnnnnnnntcagtctttgtttgtcaaacattgctcgttttcagaaacaattctgactttattctggtgaacttttaacacatagagacctggcctgcacccttgtgttctggctagtccgtcggttaccacagggtgtcggcatgatgaatgaatgactgacagctggtcccgttccttttctgcacacttttgtctcccacagaggattcggaaatcagtcccaggcatcatgctgtccaatctgaaaatgtcattttccgtctttttctttgtaagacttacctgctcgtgctggcttagagctgaacaattaagtgttccctgtcgttcagtctgccagttcctgggctgatgtgagacatctcacttgctgcccttctgtgtccctgcattgctgtgtgtcaggatgctcacgtgactggtacttcttctgggaagcttcctgacacaccttctgtcagcctcccaccccttcccttagcatttgtttgttttttttgttttgttttgttttttgttttgactgggtttctctatgtagaccaggctggccttgaactcagaaatccgcctgcctctgcctcccaagtgctgggattaaaggcgtgcgccaccacgcccggcttcccttagcttttgtaaactaggacatgtagataaaagatcaggttttccccacccctggcaccagcagatgagtttctgtaccttggtccatcctgagattgagccaaccaatttctggtagaattaaatctgagtgaaagagtggggacatgtcgatttttttccatggagatcttttgaaagaaaactggttagcaactggtctggtctggaggcagtactgtaggaaggactttaagaaggtctgggatagagctgcgttgggagaggttgaaagtctactgtgtctattgtgagactattttttttgctgttatggaagaggagttttaaaagggaaaaaatggtatctaagagaccccaagtaaaagctgttgttgatgtggttgtgaaggaagataaaatattgtaacttgtgagtttaggagcccacagcccccaggcatgccagggcagggctgttgttaagtcattcctaagaacatcttgactgtagagataaaaaagtatgcaaggaccagcagggctatattatctaagtcaacaccatcggccagaatctnnnnnnnnnnnnnnnnnnnntacgtttatgaactcttctcaagtcccagggcgcatgggctgacaggccagctgaaggactgacactatgagcagacagatatctaccacatgtagtgaaatttttagtaacccactaaagaagcaagaatatctaaaaagatctgtaacaaagcaatggtcccttgattcttaagtcatcttagacaggggtcactagtgttaaagctacttctagaatctagctaccataagttatattaactataaatatatctagttaacagttcccatacaaattaatgctttgagcttagaccacaacattggccatctagttccaaagcttcaacaatgtgtgcagcagacgggcgatctttaggatcctcattagtgcacacacagaagagttcaatggccttctggtaggagtcatccagctcttccatgttgatggatggccttgtccccagagctgcataatatgcttcatcatcgaagtcactctcatcaaaggtttgttgctactttataatcttgcttttaggatgtctcattcatacacacacacacacacacacacacacacacacacacacacacacgccctctactgtaatgctgtctgctgccacgaggccctcaccagatcccagccataaatggtgccacacatttaagtttccagagccatgagttattgaagctttgtgatgtatccctgcctcagctctcccactgtagctgtgagaaatgggtagaaacaagtgtcagcagcatgccagaaccacgggtcagaggtctgccttggtgagccacagagacgggctgctatagggactgcaaactttgccaagtggccgtcacttgtatagtctgcctccaaaacgcaaagaactgggtgaactttcttccttccttcctccatctctctgctggttgtatcagccaaggaatgcacttacagagttgggctttgagttcaaatagaaaacttattaggcatttgtggaggtctggctatgcaaagaaactggacctgtcctccagaggtctatagcctagcagggaaatctttctccagttcgcttcactgggaagagggcctgggcaaatactgcagcttctacatagcagaaggnnnnnnnnnnnnnnnnnnnntttgaaagaaaactggttagcaactggtctggtctggaggcagtactgtaggaaggactttaagaaggtctgggatagagctgcgttgggagaggttgaaagtctactgtgtctattgtgagactattttttttgctgttatggaagaggagttttaaaagggaaaaaatggtatctaagagaccccaagtaaaagctgttgttgatgtggttgtgaaggaagataaaatattgtaacttgtgagtttaggagcccacagcccccaggcatgccagggcagggctgttgttaagtcattcctaagaacatcttgactgtagagataaaaaagtatgcaaggaccagcagggctatattatctaagtcaacaccatctggccagaatctaccctctgtctattgccccttggcgccaggtaaagtcatacatcaactggttgctatgtgaacaaagataagcccccagcccacaggaacaaagtcctgatgccctctctgttaatgtttgaataagccaatagtgtgtcgctatgctgaattccacacccctaagccccttaccccataaaaacccctagctttcaagcctcgtggccgacatccgttatctcctgtgtgggatgcatgtcggtcggagctccgtaattaaacgtcctcatgtaattacatcaagagatggtcctttgtgattttttgggtgcacaccgaatcaggaattgggtgggggtttcccccctagatctaacagttgtgccctttgacgactgagtcctctgtgtaagctgggagcatccagatgccatccaaagtcacaggacctgggagggctgacatctgcctgtgctgctgagagacgggcatcggtagactgtgaaggcttctccaccagatcaccagggcttcgccattactgaatcctaaaacacgtcttaagttggtagctctcaaccttcctagagctgaggccctttaatacagtccctcacgttgtggtgaccccccctccccaagccataaaattatttatttatttatttatttatttatttaggctttttgagacagggtttctctgtatagccctggctgtcctggaactcactttgtagaccaggctggcctcaaacctagaaatccacctgcctctgcctcccaagtgctgggattaaaggcctgagccaccacgcccggctataaaattatattttgttgctactttatttattttttttttttgcctggtactaaaactgtcttttattgtttattcttacatttattttaaaagacttaagacacaatcagtagaaacaaagtaataaattagaagctaagtgtagagaggcaagacaccctaggagctacgtttatgaactcttctcaagtcccagggcgcatgggctgacaggccagctgaaggactgacactatgagcagacagatatctaccacannnnnnnnnnnnnnnnnnnnnnnnnnnnnnnnnnnnnnnnnnnnnnnnnnnnnnnnnnnnnnnnnnnnnnnnnnnnnnnnnnnnnnnnnnnnnnnnnnnnnnnnnnnnnnnnnnnnnnnnnnnnnnnnnnnnnnnnnnnnnnnnnnnnnnnnnnnnnnnnnnnnnnnnnnnnnnnnnnnnnnnnnnnnnnnnnnnnnnnnnnnnnnnnnnnnnnnnnnnnnnnnnnnnnnnnnnnnnnnnnnnnnnnnnnnnnnnnnnnnnnnnnnnnnnnnnnnnnnnnnnnnnnnnnnnnnnnnnnnnnnnnnnnnnnnnnnnnnnnnnnnnnnnnnnnnnnnnnnnnnnnnnnnnnnnnnnnnnnnnnnnnnnnnnnnnnnnnnnnnnnnnnnnnnnnnnnnnnnnnnnnnnnnnnnnnnnnnnnnnnnnnnnnnnnnnnnnnnnnnnnnnnnnnnnnnnnnnnnnnnnnnnnnnnnnnnnnnnnnnnnnnnnnnnnnnnnnnnnnnnnnnnnnnnnnnnnnnnnnnnnnnnnnnnnnnnnnnnnnnnnnnnnnnnnnnnnnnnnnnnnnnnnnnnnnnnnnnnnnnnnnnnnnnnnnnnnnnnnnnnnnnnnnnnnnnnnnnnnnnnnnnnnnnnnnnnnnnnnnnnnnnnnnnnnnnnnnnnnnnnnnnnnnnnnnnnnnnnnnnnnnnnnnnnnnnnnnnnnnnnnnnnnnnnnnnnnnnnnnnnnnnnnnnnnnnnnnnnnnnnnnnnnnnnnnnnnnnnnnnnnnnnnnnnnnnnnnnnnnnnnnnnnnnnnnnnnnnnnnnnnnnnnnnnnnnnnnnnnnnnnnnnnnnnnnnnnnnnnnnnnnnnnnnnnnnnnnnnnnnnnnnnnnnnnnnnnnnnnnnnnnnnnnnnnnnnnnnnnnnnnnnnnnnnnnnnnnnnnnnnnnnnnnnnnnnnnnnnnnnnnnnnnnnnnnnnnnnnnnnnnnnnnnnnnnnnnnnnnnnnnnnnnnnnnnnnnnnnnnnnnnnnnnnnnnnnnnnnnnnnnnnnnnnnnnnnnnnnnnnnnnnnnnnnnnnnnnnnnnnnnnnnnnnnnnnnnnnnnnnnnnnnnnnnnnnnnnnnnnnnnnnnnnnnnnnnnnnnnnnnnnnnnnnnnnnnnnnnnnnnnnnnnnnnnnnnnnnnnnnnnnnnnnnnnnnnnnnnnnnnnnnnnnnnnnnnnnnnnnnnnnnnnnnnnnnnnnnnnnnnnnnnnnnnnnnnnnnnnnnnnnnnnnnnnnnnnnnnnnnnnnnnnnnnnnnnnnnnnnnnnnnnnnnnnnnnnnnnnnnnnnnnnnnnnnnnnnnnnnnnnnnnnnnnnnnnnnnnnnnnnnnnnnnnnnnnnnnnnnnnnnnnnnnnnnnnnnnnnnnnnnnnnnnnnnnnnnnnnnnnnnnnnnnnnnnnnnnnnnnnnnnnnnnnnnnnnnnnnnnnnnnnnnnnnnnnnnnnnnnnnnnnnnnnnnnnnnnnnnnnnnnnnnnnnnnnnnnnnnnnnnnnnnnnnnnnnnnnnnnnnnnnnnnnnnnnnnnnnnnnnnnnnnnnnnnnnnnnnnnnnnnnnnnnnnnnnnnnnnnnnnnnnnnnnnnnnnnnnnnnnnnnnnnnnnnnnnnnnnnnnnnnnnnnnnnnnnnnnnnnnnnnnnnnnnnnnnnnnnnnnnnnnnnnnnnnnnnnnnnnnnnnnnnnnnnnnnnnnnnnnnnnnnnnnnnnnnnnnnnnnnnnnnnnnnnnnnnnnnnnnnnnnnnnnnnnnnnnnnnnnnnnnnnnnnnnnnnnnnnnnnnnnnnnnnnnnnnnnnnnnnnnnnnnnnnnnnnnnnnnnnnnnnnnnnnnnnnnnnnnnnnnnnnnnnnnnnnnnnnnnnnnnnnnnnnnnnnnnnnnnnnnnnnnnnnnnnnnnnnnnnnnnnnnnnnnnnnnnnnnnnnnnnnnnnnnnnnnnnnnnnnnnnnnnnnnnnnnnnnnnnnnnnnnnnnnnnnnnnnnnnnnnnnnnnnnnnnnnnnnnnnnnnnnnnnnnnnnnnnnnnnnnnnnnnnnnnnnnnnnnnnnnnnnnnnnnnnnnnnnnnnnnnnnnnnnnnnnnnnnnnnnnnnnnnnnnnnnnnnnnnnnnnnnnnnnnnnnnnnnnnnnnnnnnnnnnnnnnnnnnnnnnnnnnnnnnnnnnnnnnnnnnnnnnnnnnnnnnnnnnnnnnnnnnnnnnnnnnnnnnnnnnnnnnnnnnnnnnnnnnnnnnnnnnnnnnnnnnnnnnnnnnnnnnnnnnnnnnnnnnnnnnnnnnnnnnnnnnnnnnnnnnnnnnnnnnnnnnnnnnnnnnnnnnnnnnnnnnnnnnnnnnnnnnnnnnnnnnnnnnnnnnnnnnnnnnnnnnnnnnnnnnnnnnnnnnnnnnnnnnnnnnnnnnnnnnnnnnnnnnnnnnnnnnnnnnnnnnnnnnnnnnnnnnnnnnnnnnnnnnnnnnnnnnnnnnnnnnnnnnnnnnnnnnnnnnnnnnnnnnnnnnnnnnnnnnnnnnnnnnnnnnnnnnnnnnnnnnnnnnnnnnnnnnnnnnnnnnnnnnnnnnnnnnnnnnnnnnnnnnnnnnnnnnnnnnnnnnnnnnnnnnnnnnnnnnnnnnnnnnnnnnnnnnnnnnnnnnnnnnnnnnnnnnnnnnnnnnnnnnnnnnnnnnnnnnnnnnnnnnnnnnnnnnnnnnnnnnnnnnnnnnnnnnnnnnnnnnnnnnnnnnnnnnnnnnnnnnnnnnnnnnnnnnnnnnnnnnnnnnnnnnnnnnnnnnnnnnnnnnnnnnnnnnnnnnnnnnnnnnnnnnnnnnnnnnnnnnnnnnnnnnnnnnnnnnnnnnnnnnnnnnnnnnnnnnnnnnnnnnnnnnnnnnnnnnnnnnnnnnnnnnnnnnnnnnnnnnnnnnnnnnnnnnnnnnnnnnnnnnnnnnnnnnnnnnnnnnnnnnnnnnnnnnnnnnnnnnnnnnnnnnnnnnnnnnnnnnnnnnnnnnnnnnnnnnnnnnnnnnnnnnnnnnnnnnnnnnnnnnnnnnnnnnnnnnnnnnnnnnnnnnnnnnnnnnnnnnnnnnnnnnnnnnnnnnnnnnnnnnnnnnnnnnnnnnnnnnnnnnnnnnnnnnnnnnnnnnnnnnnnnnnnnnnnnnnnnnnnnnnnnnnnnnnnnnnnnnnnnnnnnnnnnnnnnnnnnnnnnnnnnnnnnnnnnnnnnnnnnnnnnnnnnnnnnnnnnnnnnnnnnnnnnnnnnnnnnnnnnnnnnnnnnnnnnnnnnnnnnnnnnnnnnnnnnnnnnnnnnnnnnnnnnnnnnnnnnnnnnnnnnnnnnnnnnnnnnnnnnnnnnnnnnnnnnnnnnnnnnnnnnnnnnnnnnnnnnnnnnnnnnnnnnnnnnnnnnnnnnnnnnnnnnnnnnnnnnnnnnnnnnnnnnnnnnnnnnnnnnnnnnnnnnnnnnnnnnnnnnnnnnnnnnnnnnnnnnnnnnnnnnnnnnnnnnnnnnnnnnnnnnnnnnnnnnnnnnnnnnnnnnnnnnnnnnnnnnnnnnnnnnnnnnnnnnnnnnnnnnnnnnnnnnnnnnnnnnnnnnnnnnnnnnnnnnnnnnnnnnnnnnnnnnnnnnnnnnnnnnnnnnnnnnnnnnnnnnnnnnnnnnnnnnnnnnnnnnnnnnnnnnnnnnnnnnnnnnnnnnnnnnnnnnnnnnnnnnnnnnnnnnnnnnnnnnnnnnnnnnnnnnnnnnnnnnnnnnnnnnnnnnnnnnnnnnnnnnnnnnnnnnnnnnnnnnnnnnnnnnnnnnnnnnnnnnnnnnnnnnnnnnnnnnnnnnnnnnnnnnnnnnnnnnnnnnnnnnnnnnnnnnnnnnnnnnnnnnnnnnnnnnnnnnnnnnnnnnnnnnnnnnnnnnnnnnnnnnnnnnnnnnnnnnnnnnnnnnnnnnnnnnnnnnnnnnnnnnnnnnnnnnnnnnnnnnnnnnnnnnnnnnnnnnnnnnnnnnnnnnnnnnnnnnnnnnnnnnnnnnnnnnnnnnnnnnnnnnnnnnnnnnnnnnnnnnnnnnnnnnnnnnnnnnnnnnnnnnnnnnnnnnnnnnnnnnnnnnnnnnnnnnnnnnnnnnnnnnnnnnnnnnnnnnnnnnnnnnnnnnnnnnnnnnnnnnnnnnnnnnnnnnnnnnnnnnnnnnnnnnnnnnnnnnnnnnnnnnnnnnnnnnnnnnnnnnnnnnnnnnnnnnnnnnnnnnnnnnnnnnnnnnnnnnnnnnnnnnnnnnnnnnnnnnnnnnnnnnnnnnnnnnnnnnnnnnnnnnnnnnnnnnnnnnnnnnnnnnnnnnnnnnnnnnnnnnnnnnnnnnnnnnnnnnnnnnnnnnnnnnnnnnnnnnnnnnnnnnnnnnnnnnnnnnnnnnnnnnnnnnnnnnnnnnnnnnnnnnnnnnnnnnnnnnnnnnnnnnnnnnnnnnnnnnnnnnnnnnnnnnnnnnnnnnnnnnnnnnnnnnnnnnnnnnnnnnnnnnnnnnnnnnnnnnnnnnnnnnnnnnnnnnnnnnnnnnnnnnnnnnnnnnnnnnnnnnnnnnnnnnnnnnnnnnnnnnnnnnnnnnnnnnnnnnnnnnnnnnnnnnnnnnnnnnnnnnnnnnnnnnnnnnnnnnnnnnnnnnnnnnnnnnnnnnnnnnnnnnnnnnnnnnnnnnnnnnnnnnnnnnnnnnnnnnnnnnnnnnnnnnnnnnnnnnnnnnnnnnnnnnnnnnnnnnnnnnnnnnnnnnnnnnnnnnnnnnnnnnnnnnnnnnnnnnnnnnnnnnnnnnnnnnnnnnnnnnnnnnnnnnnnnnnnnnnnnnnnnnnnnnnnnnnnnnnnnnnnnnnnnnnnnnnnnnnnnnnnnnnnnnnnnnnnnnnnnnnnnnnnnnnnnnnnnnnnnnnnnnnnnnnnnnnnnnnnnnnnnnnnnnnnnnnnnnnnnnnnnnnnnnnnnnnnnnnnnnnnnnnnnnnnnnnnnnnnnnnnnnnnnnnnnnnnnnnnnnnnnnnnnnnnnnnnnnnnnnnnnnnnnnnnnnnnnnnnnnnnnnnnnnnnnnnnnnnnnnnnnnnnnnnnnnnnnnnnnnnnnnnnnnnnnnnnnnnnnnnnnnnnnnnnnnnnnnnnnnnnnnnnnnnnnnnnnnnnnnnnnnnnnnnnnnnnnnnnnnnnnnnnnnnnnnnnnnnnnnnnnnnnnnnnnnnnnnnnnnnnnnnnnnnnnnnnnnnnnnnnnnnnnnnnnnnnnnnnnnnnnnnnnnnnnnnnnnnnnnnnnnnnnnnnnnnnnnnnnnnnnnnnnnnnnnnnnnnnnnnnnnnnnnnnnnnnnnnnnnnnnnnnnnnnnnnnnnnnnnnnnnnnnnnnnnnnnnnnnnnnnnnnnnnnnnnnnnnnnnnnnnnnnnnnnnnnnnnnnnnnnnnnnnnnnnnnnnnnnnnnnnnnnnnnnnnnnnnnnnnnnnnnnnnnnnnnnnnnnnnnnnnnnnnnnnnnnnnnnnnnnnnnnnnnnnnnnnnnnnnnnnnnnnnnnnnnnnnnnnnnnnnnnnnnnnnnnnnnnnnnnnnnnnnnnnnnnnnnnnnnnnnnnnnnnnnnnnnnnnnnnnnnnnnnnnnnnnnnnnnnnnnnnnnnnnnnnnnnnnnnnnnnnnnnnnnnnnntttcctgtggttctgtcatttctctggtcgatggactagcttgaccattcccacaggaaccataaagcaagtcttgtcacagttccccaagccaccaactccaccatgctgccctcttccttccccgctgcctgggcaggacagatgccatctgggtttccggccagatatgagcagtgccttttggtcgctgttattctaggagccctgctccccagagcttcctgacagcggaattcaaggccttgggacacgtggtataccttctaggggtttgctgttttctgtggctgctctgagactactaagtacctcagtagtcatttaatgtgaattttatattggaatagaaattaagtaaaaccctagatacgtgtgtatctagaccagtggttctcagcctgtgagtcaggaccccttttggggtcaaacacctttcacagggattagataatcagatatcctgcatatcatatatttatattatgattcataattgtagccaaattacagatgtgaagtaccaatagaataatgtgatggttgggagtcaccacaacatgaggagctgtattaaagggctgtagcgctaggaagattgagagcactggtctagagtaatctccagaggtcttcaaaatctcaggcttggggcacagaattttggtgtggctttgttctccagtggccttggagcctggcctgctgggaggttccgggagttggggcagaggggagagctcttagctcttatagaggaagagccaggctgccattttagaagctgggttactccctctcttttctcagacttttgctgaggggatgccctaagcccagtggggaagtcaaggcaggggctggagtcagactgcttggacttgaactccggcctgtccactcacctacttgcgtggatggctttgacctagccacttaacccaagtgtgctctggacattatctgtaccagtgcgcttctcaggggatgctgagctgaattcataatttgtcatgtgtctacaggtgtcttagtcagggtttctactcctgcacaaacatcatgaccaacaagcaagttggaaggaaagggtttattcagcttacacttcccacattgctgttcatcaccaaaggaagtcaggactggaactcaagcaggtcaggaagcaggagctgatgcagaggccatggagggatgttctttactggcttgcttcccctggcttgctcagcctgctctcttatagaacccaggactaccagcccagggatggcaccacccacaatgggccatcccctcttgatcactaattgaaaaaatgccttatagttggatctcatggaggcatttcttcaactgaagctcctttctctatgataactccagcctgtgacaagttgacacataaaaccagccagtacaaaaggaatgccagcatgagtgctgggtgggtactggaaaggtaagggtattgggtccaaagagccagtgcaaatcggtgacctgtctgtaatcaaaaagggcctttaaaacagtagacatttacctgtgattactgtctgctgcagagttgcttaaacatgaaatgcttaaaatgctagaggtggaacaactgatcttcatggtatagatgtgttttagagcccactaggtgctgccacttaagacatgctctctttactaatggcattggtcacatttgcctacagcatttccagatcttttgatgcctacagaattcttacagtaggggaaaaagccttcttccctccccagggctggccaagccttcttcctgcagatgtcagctgctataactcggtgccattcaggaaaattaattttcctctttgtcccagcagccatctgccagctcagcaggaagggcccagcttccgctgccgtcctcacactcctcctctgtgagctgcctggtttctacagggccccagggacagggccaccaccatctgcattcctcgttaccccaggcagggctttgggatgacacagtcttaaaattattttcacactagaactcaaaggaagggttcagcttgtagaatgtaactgcttctgaattcattaacgagaaatcagctttgacaggaagatgatcatgcatgtgaccaaatactgagagaagcaacttaggggaggaaagacttattttggctcatgggttcagcatgacacatcagggaggggtctagggccaagttggtctgtggctgagaagcagagaaagaagattctggcactggtggggccccagcctatgggatggctgtgcccacatctgggacaggccttctctacacatccagaggtgtgcatacccaatgtcctagatgcagtccaagcagtttgacagttgaacttgacatcatgtcctggcaccaatcagacaatctggacagtcttcatttgtgttcttcattgctaagatgagcgtcatggtttattgtatgtttcaggactgtttggctctgaaataaacccacctggtgctcactacctgcccagaagtctgtctccattgccgtgtctattggtgattgaactttagtgatgagcagattgcttttcacaagccttcaagtactatatacccttgtgctgcacccccgtgcgcctctaacaccattgttgttggtagtggtggtgtctaaggattttagggcctctccagggtggtatcagttccaagcctctaagaaaaggaagaatgagaacatggcattgccctggctttcagctcttacttattttgagaaggctctaagcatcgtcccagtgaaggctgatgccgttagtgcccccaaagccctctgttccctggtcctgagcagaacctactttgtagcaatgacaacttgtacttaatggctgcatcacacaggacagtcactgtcccaagcactcagatggtagcccaactccatgaggtcaacagtgttccagtccccatattacagtggagggggatgcagaggtacagaaagacagaaataagacagacatccatgtgtctcaacccataaatgtgtgtccagaaataagacatccatgtgtctcaacctgtaaatatgtgtccaggattgaaactgtggccttctgacccagagccctgttctccatcccttgctctccttgtcccctcccatgtaacagattgtacaattgccccctgaattcttgctttcttgtgagtgaggtcctcggccctcgcagaggctcttctgtgcctcaccagttcccagcatcatgctctttgccctgctgggtgctgaccccactctggacatctgtctcttcattgttgcctctgtttgctgagagccatggaggatgggcaggagagagaatggccccattttacagaatttgtacaaagtcataaatctagaaggagggccacacatccatccagcacatttcctttcccctatgatggtgacctgttaacatcttttatgggaaaagtagtttgggtgtgctaggctcactagtgatactcacactcatggggcagggcagtctttttaagaggaggcacccgattctcacttgaatgattgatgtgtggctacagctgagggcagagcatggcagtgactggagtcgggcttcctgggagactcttctcctgtgtggagctcacagagatgcatttccctgctgcagcagatttcaaagccatttttgtgactgctgatttgtgagttttgctgcagaaatagccatgctatcaatagctaaatgctatgtatctgctctgctcaggacagctggctgcaaagggacagctgctcaagtttgtgaggtgttagtgatggtgtggagcccttcagtgtgcacacagcccttcagtgtgtgcaccagcccttcagtgttgtgggttttaaatcctgaagaggcacatatgtctctactgtcaaggccgtagatcaatggagatgcaaattaggtgagatgcaaattaggtcagaggtgcctaggaaagaccagggagctgatggagaactaaaaggcaggtaagagttggtcaggaagaaaggacatattggataaagggggctgtgtgggattctggggctatgagagtttgggccaggggtcagatgtgcaggtctgaggcctggctagaaaaggcaggcatggaggtctttgcaaactacacagaggcatttggttgttaccctgcagctcctgggagggtcatctttattatagaaagattggtggtggaaggatggaaatttgtttggaaaaggataaagtcatcagccagcttagtgtgttctctctcagagactcaaacactactcaggctttctcagccactggctatcttcatccctggcagagacttttctaggtctgcttccctccatgctatgacacaatacttgtcaggagcagtccagggaggaccagtattttggcttacactttcagaggggtttcacggtcatttcagaggaggcaagatagcagaggtaacgtcttctgtggtggcaggagtgttagtagcagcttgtttatgttgaggtgtttgggaagcagagaaaacaggctgaaacactggcaggtatgaccaaccctagtgcctgactgctgccagccagtccctacctgtgatggttcacagtcttcaaaatagtgtcacacacaagttgagggtcaaacattcaacccatgagcctacagaggacataatggttcctaatgacgtctgcccttttgtggcttgaatcagaatggtccccatagatccgtgtgtttgaatgcttggccatagggaatggcactatcaggaggtgtgaccttgttggaggaagtgtgtcactgcaggggaaaagcataaagtcttatgctcaagctaggcccaatgtggcacacagtctcctactactgcctgtggatcaagacatagaactctcagttccttcagcaccatgtctgtctgcatgctgccacactgataatggactaaacctctgaaactgtaagcgagctccaattaaatattttcttttataagagttgctggccatggtgtctcttcacagcaataaaaccctaagattacccattcagggtacaggtaccagatgaaggccacccatgacttagcaagagtgttccaatgatggcattagcctttaacaaacagcaaccccatctttctggtcccgtatctacgcaggaggaggcggcaacttttgtgctcttcctgtcacttaggagaagggtctgtgttgtacttggccctctcactccatgtgcaaactaaagtctgtgctctgcacctacacttctcaaagtgagtccaaggagccccagttacagatcatgctgtggggagaaaataggatttcctgatcaaataagcctgggaggctggggctatgtccagttaccaccatactatatacatgggcgctaaagtccatggctgtccaagtcccttacttatgcaaaatggcatcccttttgcttatgacttagccactccccaccccacccacacacgaagtcatctgaaggtacttacaatactcagcatgggagcagtgctctgtagctgttgttagattgttcagagtaaagacaagaatgaagtcctgcattcaatacagtactggcttttttcttctatttttagtctgtagtcaaatgattttagatcatttgaacatggaagtctgtgtacgtgcatgcatgtgtgtagatggtgtgtgtgtgtgtgtgtgtgtgtgtgtgtgtgtgtgtgtggtgtgtgtgcatgtgtgtgtgtggtgtgtgtgcgcgcgtgtgtgtgtgtgtgtgtgtgtgtgtgtgtgtgtgtgtagtatgtgtgtgtgtgtggtgtgtgcatgtgtgtatgtgtggtgtgtgcatgtgtgtgtgtggtgtgtgcatgcgtgtatgtgtgatgtgtgcatgtgtgtgtgtgtggtgtgtgcatgcatgtatgtgtggtgtgtgcatgcgtgtgtgtgcatgcatgtgtgcatatgtgtgtgtgtgtgttattcccctctcgtgacgtgcagtaaagactgtgaagctcttaggtacacagtcctgcctaggtttattggataactttttctgagttgtggtggtttgaaagacagtgtccccagaggcttagacatttgaacctttggtcctcagctggtggcactgtttggtgaggtggtgtggcctggctggaagaagcacgtgccaggggagtgttttgagagttcacaacctggtcacatgcccagttttctctctgcctgatgcttgtggttgaagatgtgactgatcttcttacagcgtcctgcttctggcactgtgttccgtgtttcccacagctatgacagactcttaatccatatggagccgtgaaccaaaacactctttcttccacagttgcttttgggcatgcgttttatcacagtaacataaaggtagctaatgcattgaatttttctttttctttttttttttttttttttagacacagatcccttctgtcccatgacatttaaggctctaggacctgtggagtcaaagagccacaggcttttgaaggactatctgatttgtgtgctcttggttacatccaggccagcaaccagcacctagaagccttactctccagcagtgagcatgccagtgtccagaaaggcaggctgtgggcttcctgccgtgggttctggtgttttaagacatggtttgcagccctgccttgaaatctagtatcatgcttaattggtctcagaactatcagctcaccaagccacctgtcactggaaacttgagcagtgctgcgagtccattaataattcagctgacgagtgtcttcagacacagacagcccttacgcctctgcgctcactcatcttcatctgcctccagaggagtcacagagagttctctgttacagagatgctaatgattccagcagtagtggtacctcatgctctcccagaatcccctaaacctcagcagttggaagaggaatgactgatatagaccagtcccactctaattgcattagcccccttggaaggtggtgggtttggagggcgggtcagccagtgacctgtttgtggttgaagaggcaatgtctaccttcagctgaggcagtcctggggagtgggtgccactggcaagtgtcaggcagcttttgttctagagagtagaggcttgtgtactgagcagcggggatctatcctttccttacctttagcattgttcagcactcgggaagaagaaaggcttttacagtttgtctcacatattttggtggaacttgttcgagctgactggatctggtcctcagtcccatccagtagaatgatggactgtcacctctaaatgagaatgtagacagcttccagcccagcagccagcccagctcctttttctttcttttttttttttttaagatttatttatttattatatgtaagtacactgtagctgtcttcagacacaccagaagagggagtcagatctcgttagggatggttgtaagccaccatgtggttgctgggatttgaactcgggaccttcggaaaagcagtcgggtgctcttacctgctgagccatctccccagctccccagctcctttctcattgatcgaggagtgagaagatagagtcaaggtctcnnnnnnnnnnnnnnnnnnnnnnnnnnnnnnnnnnnnnnnnnnnnnnnnnnnnnnnnnnnnnnnnnnnnnnnnnnnnnnnnnnnnncctcctcctccttccttcctcctccatggtcttttgtagagctagggagatgctgagctcctgactcagccccagatcctgcctctgacaccgactgttcttatttccctggtgccatgatgccggggagcgtgtctgcccaggttagcatgctcatgaggcgtctagtcaggttccttacaccctgtcagtcgtcagtcatgtaagataaagacttcctccttaagcttttctgggcaactttgtggggtttggtactggcagttgcctcttcaaattctccagatcttcctgtggaatcgagcatggtctttagagaaggattggagaaaccaacccttctcatccctctgtagccttcatccctgttatgttacagagtgccaagcatgggacagtctgcggctagtcactgatctgagatccgccattctcatactacatgcatactaaaataaataaacaaacacatacaagaggcacaggtggtctgagctgggaatggtgtggtctctaggcctttagccccccaaaggagaggctcagagctctggaagaataattcacagccatcaaactgtgacccagcctccagcacctgccacaaagctgctcagacacttacccaggagcagtggcagagcaggagcaggtagtgtgactgcaggtcagagaagtgagtccatggggcacagtgagggacatgtgcgggctgtgccaggcacgccttgacctccactctctccagtcacaagagctgctcggagctggccccatcctgcccctcagcacccggagccttgacaaggggatccagagcatcctgaagggagtgagcctaaggcagtaggtatcaagggcttcttccatgggcactgcttgtggacccaggcccattaggagaaacactgttgggatagtggtcggagcgccacagatgcctatagcatatgtaacattgctaggtgtccatgctcagcacttcctatgtaggtgcacttcttcacagctagtacagaattgatattaacattgccccattttcctgatgagaaaataaagacatgggttatacatacaccctcctaagaccagcccaagtccctgataaggtagagccaggactccaggcagggccaagactctgtatcaagcttgtctcaggctggtagaggccctgaagcagcagagagggcagatgttggggctcccctccccgggagtatgggactgaccttcgctggtcatggttcagtcctcccatgagcggatcattctgtccttggggccttgatgtttgccttagaaatctaaacttttcactttctgaaagaagagagaccgaccatgtgagtgttgactggaacatgagcctagagaagctgccagcgccccagtcctccggcaggaatcctgcaggcgcagcaggaacttcccaccctgagggtctgagagccagggacagagcctgctgccacagttgtccctaagcagcctgctggccagccaatgacccctcccgtcttttctccttcagctggggcccttgccttgttgttgcaactgcagagcaggctccctagctattgttcttggaagcttccagtgctctgaggacctctgagaaaagaacaaacagctaggaaaacacaggagagtttaaaagtgtttgtgagttctgtgctgcgcggaacaaaagaggcattcgctagactcagcagtgttctagggtagtgaggatgaagcagccctttgaggtctgctcatgggctctgctccgtggtggctggagacgctgcttgtgtccggtgcctggcacctacccgggagagggggctgggagctgccttggatctcagtgccttcaatcctcacccggttcccagctccctcctttcatctcactagaaggaagtcagtgccatcgtccagtcccggctgtttgatgccagccacccagccacccggctctcacagaacacctctaattgcctgtgttcagcagaaataatgagatcatatttacagagaatcctatggttccactagtgatgatgtggctctccttgctggatagtttgtctctcttattacataggtgttgtctctgttttatcaaaacaactgagactgcaaggtgggaactggcattgtgggcctgccagcagcgccttgaagaagagctacaactcctcagatggcactgcagtgaggggactgagacttgacgcctcatctccaccaccagggacccactgtcatccttgtctaggaaagtctccatgcccagcctcttgcctgctgaatgggcttaagtcactgaggttcccaactccctttccagcctccggggtgtagccctgaaggcctaggccagtctgtgaaggtgctcgcctgcccagtcctgggtgctggcctgcagcgcctcagcagtggttgtaaaggagctgccttctgcctgtcttctgggggccagcacgcttgcatcaggccgttcctccttgtgtctttcctgtgagtcatggctgtgcagactcagtggtggtgtggtgtagcatggaccataaagcattatttctccaggaagatctgtgttggggatgaaaacagccttggtccttggtgccagagaagggtgggagggagtcctggctggatgcagctgtatccatccatggtctgtgacagcagttggggggtagtcagctttcttcaaaggatgggcttttccattgaggtttcagacaggcctttaggactgtccttgcccactccacacaatcccatgactcctgcacacttttgggggtggcatgagtgttccttgaggagtgtgcctgcatcctgtccaaatggctatttctctaagaaggagcagctgccctggaggaggtacccagcatctgcctgtgggaagaatagtgctgttgagctaagatgagaaagccgaggtagtagaatcgctgtgcctgttcggggaggcggggagggagagcgagagcgccttgcaagcattccctgaaagtaggttcctgaggagagagttcagcagtgagagaaggaactctcttgaggacacagtttccagaaaatagatgagttgtcagatcagaggaaactcctccccacagtttccagtgtcactcttaggagacaggggcacagaggctagagagcatctccctgagtactgtggccctgggtggccatccttatacactgaagcctctaattagtgcttttccctatggcctgtaacagtggctgcccgtgagaactgggtccagcagaaacctcagagtgggagaagtcagggacccctgtgtttgctgctttggcttccacgtgcagatgctgctggcgtaggggtacagtggttgctgttggaagtgctgactgaggacatctgcgctgtcagggctgtggctcttccttccagatgctcatgtgagaggagagaacataggagggatgacatctcatgtctggaatcaggagaaccttgcagacagtggaagcagttggcaaagagcaactgccttcgtggagtgtgaggggctggggagcagatgccttcgtctcctgttgtctggaagccccttcccttcttcccatccacataactcattataagaattatttaccatctacagccaatcatttaaaaacacacaacgcactcgtgcaagctcctttaaagtaactcagctggagtcacattaatcactcactgtccctgagagttgccttgctggctcatcgatacttcatgaaacatctccggagtgagcaggcacacctcatatttcattcttatttattctatagtaaggtagtctatattttattcagtcattcttatttccgtgggcattcactttgcttctggttttttatttaatgtataagtaatgccattatttataaatgtgcttgtgtgtctttgtgaattactgtttttatttcccaggggtagattccatagaatattgagctgaagggtaggtagatttataattttgataggtgtttccagattgttcatcccatagaccataataattttcctttatattagcagtctatacaaccacctctttcctgcccactcgagctcggctgtcattgtctggttgtgctggcctgatgtgtgggcagtaacacctcattgctctgtagatttccagttgcctgactccagtgaatctctgcatcctttcctaagactatctgctgcttgagttgtttgtccgcagatcacctgctgtgtcttttctctttctttcccagcattcctagggtgagaagaagcctctgggccaggtgtgtagtcaagaatgtgtagtcaagatacagatctatagcttgggtagtgacagatcggaggttctatgccgctctgtcttaaggatctgtgacatttgagctcattgaaacttgtgtctagttctcatcttcattatggagcatgcaaagttcttccggcatggtaactaacacacacatttcttgcttctgacatgggtgtgtaacacataggctttgggagataaatgcatatcaggtgctagagaattcctagtcagcagtctgggtcggggagtagagcctggggcaagaattggttttgagtgccccatcctgagtgctcattgctgagtgccccatccagagtgctcattgctgagtgccccatccagagtgctcattgctgagtgccccatccagagtgctcactgctgagtgccccatcctcttcttttcctcagatcccagccagcactgtgtgcagaacagatgccccacatctgtgagccttatgacatgcaggatatgaagagaacttgagtctggcgtcaggaggtgcaggaatcttttcccagctctccaggcagaggtcatccttgggacctcagaccctccctccatcatgggtgcacaaacgtggctctggttttagggagagccagtctggctggctgtattcttgggtctaccggcagaaggtggcacactataaagcttcccttgagaggtttggactgggtgagctttcaggataagtcgccacccttacagaacggaatgcagagatggttccccagcagatttttatctcactctgttaattgactcttggagtgttcgtggaatttcactcccttgggcctggctctcgaggcctcatggcctggcgccgactctgcagtctggagccaagttggacaaaggctcgctgctcctcaggctgtgcccagtggtcatgttactatctttgcttgtgctattctggccgctaaggctccttactggctcttggctgcctttcacagcagctcaggatacagtcagggctgcctacagtcctcttcgagtgtgcatagtcatcgttgggtccctgcctgccttgtcattgagtcttggggacatagtgtagtgttccttccaaggaaactctaggtctgtagtttgttcagtaaatgattagaaagtgaagcagaaagttaaataaaaggtaagtacgtgtgtgtggccaaatcagtgagagagagagagagagagagagagagagagagagagagagagagagagagagagagagagagagagagaggcttcacaaacacagcatcagcgctgggggtaagacatgggtgctggggcttcacagcctgcccttgaatccattctccactgccacgtaatgctgaggctttgacaggctgtctttgtacttcagtttccacatcggtcaggtaggagtcaggatgataccctcttgtagaaaaattgaaaattaaaatgtgtaagaacctctgaacaagtctcagcacatagcaagtgttaatgtcccttagcagaccagctattccaggagaaattacatcgacttcttacagacttgtcagaagtggagaaagaagtggggttgtcagagccccagctgtaaattcacctctgtttagatcctgtgtgtctagtcagacagaggttctctcgggaagattctacccttactatggcaagagaaaatatcaggaagtcccatggaccaagaaccaactttggccagaccctgcgtgagggcacctgagagctctttctcagcaacccccagatgtgttcccatcatacaggaagcaaggctcaaaagggaccagtcccttttccaggatgttagatcagactccaaaactcatgctctgcttaatggagccgagaggtgcatgcctgtgttcatgtgtgcatgttcctggcaagtgggtgggcgtcatggactgcctctgtcttgctcaggagtgtgggttgatgtgggctgatggtccaggagtctggggcatccagttagcctcagcccgtgttgacccagtgttccacggatcacacaaggcttttgccaggctgtacctagatacctttgagccttgctgccatcctctgctcagtgagaaatggtcttgtcggctttaagacacaatgactccacgctcacattggctgagctggtactgattatggattagtctcggcaccgaggcatttgcacagcacatacgcagcaactgtagtgccgagtacagcgggcaagatatcagttccgagggtatctccagccagtctcaacagtttctctgcgtatgcagcaggcacgctctgtttgaacaaaaactacgcaagtaggcgggtaaatagtagccatatttacacatttcccctcaggaagcagcgtcaggccatttcacttctactttaaattgagtgtgtattttggagaattctattctgtggtaactgagataatatagctcccctgctctctggggacagcatgtattagccttgtctgtcagcctcaccagcctgaagacagcaggtttctttgagaaaaatgtatcattatgaagttggcagccaaagtggtgtacgtatgaggagggaatgatgcaggaatatcctgagtggccactactactatgtctcttccctgaaatccagtctccatgacaggtgcaccccttcttaggaaatgctgatgccatcaaacatctaccccaagagaactagactagctggtgggattcatggaagcccagccaaaagttggttaagtcccagcctgtctctccctccttccatttctctctcttcctctctctcccatcctggcccccttatctcccagtggcttctatgttgatgtcctacttcagactttactgggggagagaatcattgcccatgtccttagctgaggtgagctcagtagagcagattgtgatccaatacaactgttgcccttatagaaagaagaaattacagcaggcactcagaacaggggaatgccacgtggaagtgaaggcagaaatcggggctttgcctccatcaaataaagaaagggccaagatcatcagttagccaccagacatagccagaggcctgggcaggatctcaggagcctgagctgtaggccgaggaattcctgttgtttaaaccatccagcaggttgcactttggtccagcagccctagggagtgaatacggatccccctgctcctggcatggagagcatccggcaggtgagagcgagcacaggccttttgaatggggctgctgtccaggagtgtagatctacaacatggtggcatctgctatagtgcagagacagattaggagaatcgccagacagggtgttttctaattctagatctggccatttttagttaagacttcattgcctggtcagtattttggaaatatactttggggctgtggtgaagagtgtactgcagatgaggctcgtcaccgtgccaggcttgctgtgccacagccttcgtatcactcaggagtgctttaacagttgttatagaaagaaatcctggctttgcttccctagggtgaagcacagcatgtttcgtgtgtgtgtgtgtgtgtgtgtgtgtgtgtgtgtgtgtgtgtgtgcgcattcgcgtgcgtgtgtgtctcctgtaggcacatacgcagagatatttatcagggacagatgtaagaaagagagaactggaagaatagattgagtttcactttgaatatgttttacaaacagatatagttctttaaacaaagaaatattttactaaatggcaaatgagggggagagagttagcagttagttggatgtgcttgagaaaggcgccagttgtgcctaattccaaacacttgggtatatctggttgtatatttttatacatgtaatttgtgcatttctggctagcatctctgcagaactgttttcggtacatgattgcatttagcgaagggaaatgaactgacaggagaggcctatgattgcacttgtatttgtggctctccagggctgcctctgtgggtctccaggatcttgactgtggtgtctgatctgtggagtgaggagtgagactcatcgtggagagtggtgtgcagagcgcccttagaactgtcttccttgggcaggaccattttcaacgtgtattaaagttgatgtgattcaactgtataaagctatatagcattagtcttatttgctgtacacagaacctctccccccaacccctgctccctcatcccagcactggctagcacccactggacaagggagccccactgtggaaaatgagtttggcaatgtttcatatcagggtttaaattctcccatttaaaaactgaggtggtgttctcaccatgcctgtctcgtgaggatatgagattatgaagccttgctggtcagtttgaagtgggaggctcagaaagactggtgaggtttagtcctgacagtccttgttaagtataccctagagcccacagcccttccttccctctgaaagttgggaggagacagcatgccgccttgccacagggaagctgcaaagtgaaggctgcactaggcaaacagaaccgagcgctgtcttccgcaaggcacggggcagatgccccatgtgttggggatttatttcctaatcctgttaccaacagaaaaggaccctaaggagtctctaattttattaccagccaggagcagtttatctttggtctgtggctggttgaccagggctctctgagcatctccttgccattctccctatccttccaggggagagcctggaggttctaacctgacccaggagagtaaatgggggaggatccctctcttgggggctcaggatgggggcacacacttgggtcctgatttggaggtagctgagcagtggggaaacaaatgaggcttcaagttaaaactgggttgctgctctcacctaccctgccctagcttcctggacagccctccctgaccctccctaaccttcctgtgctatgtacagcaggactgcagtagcactcactgccagcaggggtcacacctgagttgcactgagttgttagcagaccttctatgggctcctcccccaccccaggctgattggctgtgctctgtaaatgttcagcctacagacctggatgccactctgaggcacagccaactggagatggttaatcgcctgggagaggcgaaggggaaggagtgcacagtaaatcacagttctccctctataaagaacactagtagataacaaatgacggtccttttggtctccacaaaagccttgtggagttatcagtgattaaagtaactcatggttattttctgtcactttatctaataatgacaagtgagatactggatgtaaagaactcatatttagcttaaagcagtccttacccgcactagaatcagtacctgtgtggttccaaccgacactaaaggctacaagcagggaaacactgcctggcattaatcagaagccttgtaggagcatataaatactacctctaaaaggacactgtcaccataaaggaaagccaggaaatgggaggcagcaagtccttaaaggctgtgacaagcatcaggaataaaggaaaggtgagcccaagatgctggggacactgtaagtctcagcaggatgaccccaggggtgccggtctagatagtgtacgtgcatcctgcggaccccaactgaagtaggtctgcagttcattgctgtgtagactctggtttctgtccagctgtttccccacaaatcaggccctgcagaagtagtccttgctaaccagagcagacctagtgtgacgtggaaaggcatttnnnnnnnnnnnnnnnnnnnnnnnnnnnnnnnnnnnnnnnnnnnnnnnnnnnnnnnnnnnnnnnnnnnnnnnnnnnnnnnnnnnnnnnnnnnnnnnnnnnnnnnnnnnnnnnnnnnnnnnnnnnnnnnnnnnnnnnnnnnnnnnnnnnnnnnnnnnnnnnnnnnnnnnnnnnnnnnnnnnnnnnnnnnnnnnnnnnnnnnnnnnnnnnnnnnnnnnnnnnnnnnnnnnnnnnnnnnnnnnnnnnnnnnnnnnnnnnnnnnnnnnnnnnnnnnnnnnnnnnnnnnnnnnnnnnnnnnnnnnnnnnnnnnnnnnnnnnnnnnnnnnnnnnnnnnnnnnnnnnnnnnnnnnnnnnnnnnnnnnnnnnnnnnnnnnnnnnnnnnnnnnnnnnnnnnnnnnnnnnnnnnnnnnnnnnnnnnnnnnnnnnnnnnnnnnnnnnnnnnnnnnnnnnnnnnnnnnnnnnnnnnnnnnnnnnnnnnnnnnnnnnnnnnnnnnnnnnnnnnnnnnnnnnnnnnnnnnnnnnnnnnnnnnnnnnnnnnnnnnnnnnnnnnnngtgtacagacatttgtttgaggtaactgagcgactccactgtgggcgccatgtaacaccttactattgagttgctgcatcctgtctgtgacttctctagttctgtttctgaagtctcatttctctcttgtggcccctggcctcctatccctgcatcccactcacacaccatggtccctcgaggtcagctcaatggcaccaggcacccagagtggtcctgctaagtccatggtcctaggctcctatcttcattcaccatgagcctttactcagtctgactctggttgtctgtgatgcttgcttgccattttcaccttggttaggttaggaaacagcccctgtaaaggcatccagggagggttagggagtgtgtgcagtgctggtctatggatccgactgaataggtagaggaaaaaagatgtgaatgggtcaggtgtcaggatcatcgctctctgctctctgcccctctggtgtgtgagagctccatgctcctgctgccacagctcatgctgggctcagtccttcctcctcattgcgggctctacttcagactgtgaccaaatagccttccttaagtactttcttgtcagttacttgccgtagcattgagaaaggggactagttggcatactatagttatatatgtactaacgtatgaaagtaaataccagtgggaggtaaatttgcagggatattagtcttggttcacttgatcagtgagtatttagaacatatgatcacatggctgagtaggacccttaggtacatgcacgttaggcctgtccagccaccagaatcgaggtagtctggggtcagctcctgtcttcttggggagcctggacaggttcattccgtgctgtacaaagacgccatttgtactgcttgcgtgagagaatgttactgtttcttccacttttttgtttcagttgcccaagtcctgagccacagtcctctctggctggctgtgtgatagattttaaaggtcacacaaaaatgtggcctcttcctcttccccttgagtcaagggagaagcacaagaataatcaataattctaaaaggcaaaaagcatcgttgttgctgttttaaatttagttcttgtcttagcttacttaggtctctcctggattctgagcttgtaggagtcggcctatgcaactcggaaggatccagaaactatcaatactggctcctgggtgtgacaatgtttctgcacttccctttactcccaaataaaaccacttagtgtggcggctaggcccagcctggtatcccagtctgatatccttcccacgtagggcttgtgcccccctcttctccctagctcccacagcattgccccatgcctgcctcccatcaggcagcctgtccagtgggatcatttcagtctacagatgcttaaaatccagacagttggaaagtcttccgcctcagtcacattgttatcaaaaagaagagagaaacgtgggtaaggcgtggagaaaagaaaatccttgtccattgctgttggggctgtagacttacagagtcaatatggaaagcagaagtgctcccgcgtgtgcgtgcgcaaaggaaggcagtctgtgctgtaaggaaacctgcagtgcagtccgcgttcactgcagcagtgacaactgtggccagatacagagtgtccacgggtggatgtgtggatacagaaaatgtgataaacgtacactggaagatccttcaccctgtaataaggaggatattctgccatggccacaacgtgtgtgagctgagggccttctactaagtggtataacccaggcacaggaggaagacagcttgatctcgcttgtacacgggatctcaaaggcaaaagctaggtgtttactacacagagatgattctggaggcaaggtgatagctacggccatagaggtcagggtaggaagaaaatgtagggctggggaagtctcagatctgatggacaccaagggggttgaaggcaatagcgctgttagattaagggtttttgctataaagagtatagattagatattctacatgcatatgcgttcacacgcatgtgcgcacataataaaaatgaacacataaaattaatttgtttatctttgttaaccatttatgtatatataaatcatcacactgtaaacattaaacacatacaatttaaaaatcaattctttgctaactgttgaaaaaataaggcatgcaggacatactttctgatgtgttccaatttcatatatttatcttagtacagggccagctgttctcatttctgttcaggaaacatgataatcagagattcatttctaaccaccatactttactcagattacactaaatctatagtatacaaagtgtctctgggactaattaatgtttttaaatgtttacctaaagcacatagaaattgtatacatttctcaaaaagagaaaagaaaaatgacccaagggccaggcaggctttgcagcaggggatgttttgctcggttccctgaggtgctcatcagtctgtgttttcccatgtgatctaggaggttaatgaaggcactgtggggcccattgttatttctgcactgtgaattgattagccagaggatgtacagtgtggcagtgtgtggccaggcctgtgtgtctctggcagtggcccaacagactttgaagatagcatgctgcttcctagtcacgacctctcggccatgtgctgtgttgtgggtgctcctggtgctgtgccagctccttaccgatgctggcaggagtcctggctgtgtggacacagtagagacctttctcggaaagtcaagttcagcccttgctgtttgctggtgaaagtgcatctgtctggactacttcacttcagtaagcgtgggctgggcccctgccttgtgccaggcacggggccaggcagtggggattcaggtatgtaaagacaccatttctatccccaacggtatgacaactcagtgggtcagagtggcttatggggcccttgcagacttcactaaggaattggcctctgggctgtggtttgattagaaggtagctgtgtggatggtgaggaaagagggcacagcagctaaggccctggtgagaatggcatatgcagaatcagcaggaatgtcagtgtggatggagcagaggaacctggggtggacagggcatggccagatggcccggcttctcatggcctgggatcgggtcttcagaaagtggggagcgtggcgtcactgctgtcaggacagatgaacagcagacacctgcctcttggctagatcacactgtctaacagtgtgctacaactacgtccattcccataggtcacaccgctggagacaagacccggtgctgggtgtgtagacaggaggtccagggtaaatatcatccttgtggccatcagaaggccaccgatgagggcgggacagtgtgcccattcactgccagagcagtgacttggtgggaacaacagcggaggtcaggagagtctttcacaggtaccatctaaggccctcctaaaatttccatccctgtgccttacactcttgttttcctctattttttatgcccagcaagaaataaatctcaaatatttaccagaggtacacttaaaagcagctttttctaaaagcagcgtttacactgaggaagatttcaagtgcagctgtggcactgggttgtgcatcatctggctgtggcttggcttagtggcctgggaaagaggatggcgattgactcttgccagcagtgtgtctcaccaaggcagaaccaccgcacctgggctgacagtgtggaccccagttggacggctttgtggtggcagtctctgtgatgacacaccttgtgtctctgggacgagctgcctgagtgatgatgggcacagggagcatgcccaggtgtggcagcccacgcacctgccgcagagagcatgcgcagatatgagtccacgcacctgccacagagagcatgcgcagatatgagcccacgcacctgccgcaggcccgcattgtgcatggggagttgtgcaggatgattggttcctcttcggtttgttatttccgtctcctgagaagggtgaagagaggaaaaaaaaccaactattttcacagaaagtgtgtttgagaacttgtctctaccccacatgctcttgcctgcctcagaacattccatgctaattacacaagctgctgctgccgccacagcttcctgttggtgtccacggctctggaaaccacggaaactggtgacatctatgcctgcagcaggctgcagtacacatgaagggggctgactttgggtgagggcagtgtgcccgctgcacgccaggctcaggcctgctggaggaacacagctcacagtggcttgtagaggaaccgtgtggcactaggacataggaagagagacagctgctccatccactgattctgtgctggaaacagaccacggactgagagatctcagccacggacagtggcaggagggtctctagagagctggtcccgtgtctgtatctaacgacttggtttcctctttgagacagggtctgtctacttatccttgttctcctgtaactctagaccaggctggcctcaaactcacagagatccacctgcctctaccaccctagtggtgagattaaagtcacacctgccttcttctgccacagttttaaattgctaaaatatatgcaacataaaagttgccgtttggaacatctttaagtccataacattaattctgcccaaatgtcccaccatcaccatcctatttccaaaacagttgtattacccaagcagaaatgtcatcctctgaacggttgccctgcatctttcctcctcagcccatggcaagctctcatctacttatgtcttatacatctgcctggtttagatggtccatgtctcctctgtcactctgtggccattagaagccccggacacatactgttcccagctcccatcagggctcagagtagggctgtggcctggcctgagaggcagtgaagcagaaaggagaggtctcaccgttactagctgggcattttgacggtcatccttacatcctgaaagccttagtttcctcatctagaaaatgggtttaataatgtgtacctcccaagcatgcatagacagctcaagtatgtaaatgtgtagaggagtgcttagggacaggttttgtcataattatctgtattatcgtaacctgtacctccaagtcccataatgactaaaagaaatcacttataaattgttcatgaagtagctggcaggtaataattattgaagtaaatgccagctacccatatacatacatgccatgtgcattacagaaaaaccaacacagtggttaagagcattggctgttcttacagagagcacagttttaattcccagcgcccacatggtgtcctacagccatcttgaactccacttccaggggatccagtccccctttccggcttccactggcaccaggcaaagcagcctgcacataggtaacaataactttgtaaagcaacagccagcaaggggcttagacaggctgtccccaactgagagtcaacgctcgtccagcagcagattgccccaccccaagtagactgtttcctattttctttccaagcagcagagaaatgaggagtcccaggcagtggagactagctgactgcagaagctcatcttagagccatggcaaagtcaaaaccagaagcttcgaacgtgaggaaggtgtcaggggttcactgcccagcctcagcgctttcgccatttttgaagttgggagacggctccttttgggatcagtctttctaacctccagcaaactatggccccatcccatcannnnnnnnnnnnnnnnnnnnagtgcttagggacaggttttgtcataattatctgtattatcgtaacctgtacctccaagtcccataatgactaaaagaaatcacttataaattgttcatgaagtagctggcaggtaataattattgaagtaaatgccagctacccatatacatacatgccatgtgcattacagaaaaaccaacacagtggttaagagcattggctgttcttacagagagcacagttttaattcccagcgcccacatggtgtcctacagccatcttgaactccacttccaggggatccagtccccctttccggcttccactggcaccaggcaaagcagcctgcacataggtaacaataactttgtaaagcaacagccagcaaggggcttagacaggctgtccccaactgagagtcaacgctcgtccagcagcagattgccccaccccaagtagggcccactgtttcctattttctttccaagcagcagagaaatgaggagtcccaggcagtggagactagctgactgtagaagctcatcttagagccaaggcaaagtcaaaaccagaagcttcgaacgtgaggaaggtgtcggggttcactgcccagcctcagcgctttcacccttttgaagttgggagacggctccttttgggatcagtctttcgaacctccagcaaactatggccccatcccatcagagttgagagaagtgagtggcttcctgttgtgtggggccctacggtttccatcagagtcccattttaaacacacagaaggaaaagtatcctgattggaaacctgaccacacttgtccccttgtcctaatttcagtggccagctaaacaaagcagcgcttctgggaaagagctgtgagaagggttaccaagatgaagctggagggatggcctccccagggcaaagacacactgactcggactgcagggaacgtgtgtgtgtctgtcactgtgagtgtgctggcttgtgctggtcatgtgtgcgcacatagcccctagaagggactctgctagatgtcacccggctacatccttcaacacgcacggccttctctaaagctccaggaaagaaggttgtccaagtttctcttcctaccaaagctgagtgagtggcttctggaagcacctggcttggttctgttgggctgccggcagaaccagattcactgggcaccggtgtccctgccgtgaaggctgccatgcacacctgagtgccttagccttctttctgcaggtctcttctccacaagagttggcagtggccctggtgcatgcttcagggagctggtaacaagaacacttgaggatgtacccagcagagtgacccgtccctgcaagcactttgggtgcctcacccagcactggccagtgaaggaagcaagcaagccgtcctccaccaccagccaagttacctgatgcttcatctcctgccccagtcttgtcataccttacccttcctcctatactggggagccatctgaagctaaaggaagagagattgcacctaaaaggtgcccgggtgtcagatactgcatcccgcacacggccctcacagcctatcctctgggatagaatgttgagttctggaggagctggggcaggacacactgactggttcagagtcctctgtctgctcctccactatgcaaacgctcggccacgtgacgctgtgtcaacaccgctgagctcggctccatttagccgattccccagacactcatttcacaggcacagggaaaccagaggtgctcttatgtaagaggacctgagcggggagggaggcagggagctttgtgagtacacattgctgtgacagagggcttcagggagctctcgggaagagtcggggaaggaggaacacttcacagtcaggggttctgaggggcccccaccatgcatgcttggttccttcctgggtggaacaggtcaggcttaggaaggacctggagatgggaagatctggctctgcagggaccttaagaccccagatccagcccagggtcccaaaacggagaggctcacagccagcagggagtgnnnnnnnnnnnnnnnnnnnnnnnnnnnnnnnnnnnnnnnnnnnnnnnnnnnnnnnnnnnnnnnnnnnnnnnnnnnnnnnnnnnnnnnnnnnnnnnnnnnnnnnnnnnnnnnnnnnnnnnnnnnnnnnnnnnnnnnnnnnnnnnnnnnnnnnnnnnnnnnnnnnnnnnnnnnnnnnnnnnnnnnnnnnnnnnnnnnnnnnnnnnnnnnnnnnnnnnnnnnnnnnnnnnnnnnnnnnnnnnnnnnnnnnnnnnnnnnnnnnnnnnnnnnnnnnnnnnnnnnnnnnnnnnnnnnnnnnnnnnnnnnnnnnnnnnnnnnnnnnnnnnnnnnnnnnnnnnnnnnnnnnnnnnnnnnnnnnnnnnnnnnnnnnnnnnnnnnnnacatgtgcaggggttggagagcacatgggggtgccactgaaggttcccagcagtgggcgtcacaccgttaagacctcagaccatgatcctgcagtctgaggaagtggtcgggaaatggactagggttgaggaagccatgtagaggtcgtatagatcatgttaggggagagggggctgagttccttggctgtgactaggccattaggttgggaaagagtgccttcagcgaagccccctctaccataagactccatgtttctataccaaaaggaaggaagggaagaggctccaggggtcagagatgttctcttcctggttgttcccctgccccagcccttcttctcacacaactgccatgagggaggggggtaggtcaagcaccatctcatgagaccacctagaagagaaggaacgaggaaggactaggcagaagtgtatccggacagtgagcacctcgtgtgctactcctgaaaacggcaagcggcgagatgatgctcatgggagaccgcccataccccaatactgaatatgtcaggggctttgctgccaacggtaatcagatttcaatcaaaagcgagtaaccaacccctagcaaaacccacggcacactcagcacactggtggcacatccgggtgacagatgaatgccggggttcagtgaccagcatccccttgaaattcacttctgcaagctgcatggcaccagggcttcagcacatgacaggatcctccagctgatgagtccactgagcagttttggaaattgagaccccaggacaggctgtggttctgccaaggtcacctgctgatggttgcagggcccacacgtgctcagataagagcagaaggggtgtgagtctggcaacctcactgcccagtgaacttgaattgtgcttctgtgatctcgtcagacatgttggacactgcctgcattgtttcatggcgtcctcccaacatccctgggtacagtccagaagccaggggcttgtgtatagaagccaggcacgtggagaatgacagttctccagacaatttccagggtgataagtggaggaccaaaatttgaatgtggtccaagctgagcccagctgcccctccagcccagcattcttgacctggtcatgcactggtgatgtaaggaggggccagcccctctcccacatctgcttccatggccggcagcatgttannnnnnnnnnnnnnnnnnnnactggttcagagtcctctgtctgctcctccactatgcaaacgctcggccacgtgacgctgtgtcaacaccgctgagctcggctccatttagccgattccccagacactcatttcacaggcacagggaaaccagaggtgctcttatgtaagaggacctgagcggggagggaggcagggagctttgtgagtacacattgctgtgacagagggcttcagggagctctcgggaagagtcggggaaggaggaacacttcacagtcaggggttctgaggggcccccaccatgcatgcttggttccttcctgggtggaacaggtcaggcttaggaaggacctggagatgggaagatctggctctgcagggaccttaagaccccagatccagcccagggtcccaaaacggagaggctcacagccagcagggagtgctctcagtgagagctttgtccttctgtagaggatggtaaatttgaaaatttccaggatcccataggtgcccacctgtgtgtaagatggggctgagtctgccttcttcctgtgttcccttgtctgagcaggcgaggcctggaggcctggcacagccaatcagagtcctgctcgtgaggcaggcatctcttggtcttgggcaagggtcagggaatctctgggaggttagtgagagatcagggaggagaaaccagtagaggatgctggctagctcagggcatgtggatttcagcagtgcagccagtcagggtctgctggtggcgtgtggagcctggcctggccgtgctaggcatgttgcctttttcttttctgcttcttccacaaggtatgtccacagcccagatttctccctctggtggagacctctgagaggaagccagtgttaagaactctgtcctcgaggggagcagtttggactctcctcatagccctgggtttgtggtcataggcttttcccacagtgtgggctagatgcagatgcacgcccaactgacatggatgtggcccaatgatgacacttcctctgtggtcagcagtcatgcagcctgaactgccacagggaagaaagtaaaaggacagctgggccccaagaggaaaggcgtccctgcacagagggctccaaaaggaaggttggaaggcttgtgtccagaactgatggtgggtttgaacaccttccttggacagtggctggagctggtatctaactttaataccagttttgatctgggtctcaagttccacacctcacagtcattcacaccctccttgtctggtctgggtgggcccaggccacaccccttcttctcctgtgcactctccaggtagtcgctggcacacctgtgtagacagaattctgactccagcacacgtgggaagaggctgggagagccatctttgccttctggaaggcaccccagactaggcagagactcagaagaatcatctggaaacccgaagagtagaggcaggcaggacgtcgctgacgaggagccgaggaacacactgcagtttaacaggaggagcctctccctagaaagctggcatggggaagnnnnnnnnnnnnnnnnnnnnctagaaagctggcattggggaagtggcaaagagaacatctaaagcctgtgggcctgggtgaagcccaggttagcgtggccaggaaggaggataggcgtgtttgtcttgggccacctggagaaagggccaagcaggccagcatcaccagctgtcctagctcccaaacctggccctgagattgggaacatgtgcaggggttggagagcacatgggggtgccactgatggttcccagcagtgggcgtcacaccattaagacctcagaccatgatcctgcagtctgaggaagtggtcgggaaatggactagggttgaggaagccatgtagaggtcgtatagatcatgttaggggagaggggactgagttccttggctgtgactaagccattaggttgggaaagagtgccttcagcgaagccccctctaccataagactccatgtttctataccaaaaggaaggaagggaagaggctccaggggtcagagatgttctcttcctggttgttcccctgccccagcccttcttctcacacaactgccatgagggaggggggggggtaggtcaagcaccatctcatgagaccacctagaagagaaggaacgaggaaggactaggcagaagtgtatccggacagtgagcacctcgtgtgctactcctaaaaacagcaaacagcgagatgatgctcatgggagaccgcccataccccaatactgaatatgtcaggggctttgctgtcaacgataatcagatttcaatcaaaagtgagtaaccaaccctagcaaaacccacggcacactcagcacactggtggcacatccggtgacagatgaatgtcggggttcagtgaccagcgtccccttgaaattcacttctgcaagctacatggcaccagggcttcagcacatgacaggatcctccagctgatgagtccactgagcagttttggaaattgagaccccaggacaggctgtggttctgccaaggtcacctgctgatggttgcagggccnnnnnnnnnnnnnnnnnnnntgatttcccctcccccagttacttcacccacttgaggccaacatgttggcaagtgcctctgtgactctccagacaaacaccagtaagatgcattccagggttcacctgactggttccattcacaccctcccggctccggcaagccattttatctgtctgttatttatcccaaagaggattgtccaagggaccttgaaaattagcattgaggtcaagctgttctcactctaatccctccttctctataggttacttcacctgccatcttcctaaacttcctccatatccttgaccttagatatgccccagggctcccctcttcctggcaaatccctgagcctggtcctcctgtccctactttagctttcctcattagaagctggagacgacagccctcccctcactcagtcctttagatattagtgtgaatattagtaaagtctaaacagtctaggacacagtaagtgctctctgatcattacccatcaggtccttcccacccccgccctttccccagcaccctcccatcagtctggttgctctggcacatgcttccttgccctcctctagcctctctgacaagatgccgtcagctcccctctgcttcattcagttcataccctctccagtccagcatgccctgctccttggtatcccttacccacttctcccaaaggtcactgtcacctcctgtgcacggtcaagctcttgagccccaaggcccaccctcggtggcccacttcctcttgccaaaccttgtgctctaaaggtgccacagcctcccagaacagcacccacggctagaaaccaagggacatttcagactcaaagaaaatggacccggaactttatattgctgtgactgcatgcaaaaataaacctctttttaattaaaaagatgagcgctagatgctgatggcttaggtgtggagggcaccacatggggagataaaacctagagaaaggcctgactgtgcggagaggagatggagtggaggaaggcctgctggcctggatcacagggttggctgatgcgtggcctgcagacccagccaggtctgtgtggctctgaggctcctctgagatccctgcaacagaggagccccaaggcctgagttagtatcagctgctcaggttttagtgcagaggagaggtggctggggttcccctaggccgccatcttcctgactccacttcttccagccgctaaatgtctgaactcaacaagagtctggggttccttcatcagcctgtgtcagccatctgctgggcttctttacagctttgtatcttctcctcacatgccagccctcccagcctgcactgctgctaatggctccctgtccctggcttgcccttccccttttccaggtcctccttgtgcagctcttccagaatctacccaactccagcacctccgtgccctgcagtttgtaggatggactggtggccgtctcctaaccctgcctcgtcttcccagctccagtgcagcagggctaggagaaaggcttgtgactaaggttttgcccaggcaggttgaagagcctgctcccaggtggcatggcatgaagcctgcagtgtggtgggggctcaacacctcctgagaggggtcagagcttcagggcctggctgggggcctggggaggcctcagactgatgctgtgattcttccgggctctgagaggactatgggtgtgtggagggggctaggctgtctcatcagagtttctgtagcccccagagattgactggtcatagcctgtgcagctgtgggaaccaaacagcaatgtaggtcaccttgaatatgcccaagtctggcacaggaagccatgtcgaaacagaaacaaccagatggctgggtggacaagggctggttgctgtggtacgcacccttagcaagctaggcaggcagggaaagacatctgcagagtcagccctcctggggctgagcgcctgcagtggcagacaaagccatttcccctgggcacactgtttcgccctctgctcccggagcccacccgaagtcccatgagagttctcttatccctgtgcccagtctaggccattgcccagcaggccacagtggcccacacagttggcctcatccttgcagtggggtgttctgctcgttcgtcttgaggtcagtagatgctccttcagtgatacctagctgctgccctcaggtatcctctggtgcccagagtatctcagtgagaatgaggctttgggcgtctcctgctggctgacatgcggctgctgcttctcttgtcttgtgggtccccaagccctgactagggaataaaggacagacaccccatacagaaaagcagggatctggtggggtccatgcacactgggggagccacggctccacaccagcaacctggaacctcagtgcggtccttgggtagaggttggctagtcttacatgcagactataagcatccaggaggagggaggagctttagttgctcatctttgcacacgccggtccctcatttgcactctgtctccaagggaaggctttgacactgtcggacagtgaaatggcagtgcccatgtcaacaagacacactccgtcaggacttccccgacccaggctctgtctgtccctttgggccctcagggttcacattgctggccagtgtcccttttgtcactgtcttgtctctagcaatagccacctttccactctccaggccaagctccccacccaccatgacattttctcagcccgtggcagcagcaaagtcaagaacctggggggttccaggtgcccctccccacattttgagcctgtagatggagaagattcggtgagatgaggatgagccctgatgtttgcctaaactccagctgctgaggcggtagctcccagcactgttgaatgtcacctttcttgggaatggagacgtcaggatgtaactgttggtgaagggggatttgttgtggaataggacagccccgtactctgggtgagcagagatacctgtgcacacagagatcaccccttgaaggtggaagtcggtgatggctgaagacactagcagaagccagggcagcgttgagggtgttcttcctcacagccggcacaggcagctccatgccaccatccgacatttaacaccgcagtcgcagctggctgagtttctgttgcgtggcctgcctggtgtgcctactttgctattaggacatagtcagctgatgacctcagagttcagggacatggagggaaagtgaaaggtcctctttgcaggtggtggcagaagaaagtctcttgaaagcttggctcttacagcaacagctccccagtgccctgtatgaccctccctcccaagctgaaggcaaaagcgcaccaatccctaatctgagtgtggtctgctctgtccctgctgtgtggatgggtagtggtcctgatccctctgccctctagtcctattacaaatagccccctgccctaggaacttttcttatcctcctaggctgagccagggacacagaccatacgtctgcagaacatgctggccagtgaggctgagcggaggctggttttgcgaggggaggcaggagggtcaggactcgccatttcagatgaggagagcctcaaggaaagcactgtaatttgtgcctcttacaaggtctgctgggtctctattcccgtggagtcccttcctcctctcaggtagcctggttctgcccctgagggtccacccgtactcatgggcctttttagcctgggaagctgaaggctcaaccttgcctcatgctgtcttccatattagggatatggagtttgctgactcagttactggcctacaaacagctggtgtttgtaacccacatttcctacgagggcctccaaataagggcaggtgtgcgtccatcctaccccttccagggatgtaccatcaggaagaaagggcttgaaggggcttcatttgcactttttccaacaggcctcactgacttttggaagcactcattatttacagtggaccatctgtgcgaggctggtttccagttgaagactatgtccaatgagaaggaaaaacctaacccctgctgttatggcacccaggtgatcatggggagtggagcgagaccacacagagcagagcggatggctgtgagcatgggcagcttgcccgagaaacttctggaagatcagggctcaggaccacatgcctggattcatccagagaccctgggacatacatagccagcccaggcccctgtgaggctgcatactgagctgattcagagtggttcttaggtctgcccccagagccagtgacatgacagcagtggctatagatatcctggtccccaggtcccttggcctcaggtgtgttgaccaaattcagaaattgcagaagaattggaattcaggtgccattccttggaacattagcctgtggaatctgaggaagtcagagaaaggtaactgcaaagatcagaagcctcctctaatggaccaaagacctcggtgtcccgggagcataggagagggctgtgcagtccaccccaaccctgccttcatggcacacagggagtgtggtgccaccgactcccacgcaagaactcggcttgccccaaccctgttccgttctctcttcgtgcctgtaaagctgccgtggaggccggggaaaccagcggatccaaagtcctctgtgtgctgccttcagtccggatagagggaggagcactttgaccagggcacacagaaggccattctgtgctcagggaggttcagtttcctttcaggctgtgtctgcttgcatttctagtttccccgcccctttttgtccatgatatatcaaaatgtgctgatgccccaatctggctcttcctagctctttgttatagaatgtttctgcctggtgctgtccctgcttggtgctgtccgtctctgcctggtgccatttctgcatggtgccctgctgggtgctgggcagtgtgttcccagggagccacccgggttttagtttccacctggaaatgttctctcttcatcttccaggccttcttatggtcacttttgataagagagggaaggtctggatgcttccaagcaagggtataccccatatacacctgaccccctaactgtaaactccttgctggaggaccagagacttctccatggtgggtagattactcagggtagtggctcagcagccttacctcggcctgctctctgctgccacccgacacaaaaggctgcacagactcacccctaccttcttcatagtcctttctttcttcccaggttcctgtcatctggggagcctacatggggtagaatcacctgaggaccctgtccctcccaccagaccctgatctctctggggtcttctgcaagagaagggaggaagcagtgggcaggatggagtctccatagaactctcttcctccctgctaaatgtcatgttcccacctttggaagaggtagctggcttgtaacctgaccctgaaattaaccacctgacagtagggtcgagtggtatcgtgttgacacgttggcgacccatcatggcaggttgtgtggcctggagggccacagcatctcagcttgctctcagagcttatctttgccaagcttttatcagcaggcaggtgccagatcaaagctcctgctcatcttagcccattcctgaccagactctaacaatgggcctgtgtgctccattggttggtgtcccacgagcttgctttcccttaccaagatcaaactgtcggctgcctttctgacatgtgagaccacaaagagcgcttgtctgtctccttactgggctcatgtgtcagaaccaagaatggacctggtgcaggtcttgcatgctggggtctggtttgcttttgaccacaactgaccctttacctatgtcctatcctgtgaacagtgtgaggcaatttacctgaggacccaggctcaccctgcccgtcccaggcactgctgctgagccttgtctttgagcacaggtttggggaccccataccccagatgctgtaacacccaagatcttgatgcttcaaatgctagaaagcagaatggccagctctctaagcatgtcagtcacagggaggtttccagatgtttccttccctccagctgttacacctcaagagcctaggttggcttttccaaatctgctggagaaatgtctaaattgaggtggcgtcccctcctaaatgccatagtcccacttacagctgcttttcaccctaacctgcaggcatctgctgagcgctatctctggaccccagcctgtacctagcccctcagaaatgctaggctcagggtcgtgaatgaagcttgttctaaaggggagagtgttgggatcagtctgagtttggctgcctatggctttgccatccatcattcaactcttcccacactgtgtcacgtcctcttcaagaccataaagacagggtggggagttccacgttgctgccgtccggaggacgtgaactttgggccaaaggcctaggtttcgtctctgcttctcaccagctgtgtgagttgagacaagttacacagtctccccggggaagtgttttcctagctctgtggtgatgggccatctcacagagcacaagattccgggacctacctgccatctctacagaccctaacacagtggcagtgacagtgatgacctcatcaacatggtcaccctggggttgtggaggatgtgagagcctgagtcttggagctagggggcctggattcaggctctggctatgctacttgctggcgatgtgccagaatccctctgaagcccagaatccctctgcttttgtttctaggataactccgtttcccttcccttcacaggcacacgttctggcagttccgccatgagaaccccaagaccagagttggggaccctccgcctgaaggactccctggcttcaacagtggagtgatgttgctgaacctggaggccatgcgccagtctccgctctacagccatctgctggaaccttcgtgggtacagcagcttgctgacaagtaccacttccggggccacctgggggaccaggacttcttcaccatgattggcatggagcaccctgaactcttccatgtgctggactgcacctggaaccggcagctgtgcacctggtggagggaccatggctacagcgatgtcttccaggcatacttccgctgtgagggccacgtcaagatctaccatgggaactgcaacacacccatcccagaggactaggcaccagctcacccgcgatgctggtggggctcccgggcctggggaagaaagagagactctgctaggacactctttaggggtgaggtgctgcagacctcccagctggctggctcctatccagccaatatccaaagaagcttagctgagccttgctgctgctcgagctgttttcctccagggcagcccgaaggactgacacgggtgtcttccaggaggtggtcgaagatacggaaggaaggagaattgcacccttgtccacacggaatcaaaacccttgtaaagaactggctttgctagaccaactaagcatttcaagcggcaggctctaatgcttggtgagagaagaggtgggtgctactgtggctcccagtgagcactgaatgcctagtcagggttttaacaagcagcccagggcttgagcctccaaaggaatgccacagtcccacatcctttcccaggaggctttgtacctcctccagatgttcatgttgcttggtgctggcttcaagagcagcacctcattagataaagactgaacacataaaaaaaacccttactatagtgtccagagctcttatccctcctctatcccagaaccccaccttctcttgtctgtctacctgctccaggtgacctgacttctactaaagaatcaaacccgtcatccaaggacagaggttggccatgccggggcatgcactagattcactccaaggaattcactccaagtctaaagtactgggtcacaagtacaattgggggggcttgggaaagggtggcctcctgctctcattgtagtctctggagaagaaagaaaaccaaactcgtaattgtccactgtgtcatgccagcccctaccccttcccagaagtgagtaccatttctctgtgtgcttgagacgggctttgtgagtcagctgcccacatgaagccccacaggccgtgtctgcacagtccagctcatgtcctcaggcaagaaatgggagattcttattgtatatagtcagtaccatgagcgacagacactagctgatgaatagactttgagaactcttgagtcacggtgtttgttctctggccagtgttcagggctctggatgggcagtaggatcagcatcaagcagaaggcctaagaggcccaaccggcaggcctgcacgtgggcgcagtgggtggtaggtactgccctgtttgcttccaggtgcagaactatctcgttctagctcttagcaggctcatcccctgccgggaacaagctcagaagtctctggctccttagcccagacctcccagttccattcatgctggtgagtggcacactccttcactggccctctgccgggcccagttcctctgttctccttgctacttgatttcctattcatagtgtctggttattagatgcctgcgtgcgccaggcatcgtcttcaggatttatatgtgccctagataatattcatgaaaacctcatccagttcactccagctctaaaactgatggatgaaaacagagacacggacaggttctctgctgtgctgtttactgaagctttttactgtgcaaaaatgttggaaacagcttaaaatgttggctagagaagcagataaataatgcatactgcaaccgtatggtggaatatatcgcaaatcatttgaaggaatatttaatgtaccaggaaatgcttatgctagtgagtaaagaatacacaat

SEQ ID NO: 110 - DNA, 2359 bp, Mus musculus
gtgagagaacagcttgctggcccgtgggagtgttctgctctgaggcttggtcccaggcccaggggagaaagggctgtgaggatatgagggagcccagagagaggtcatcttccatgatgttgctgtgctgacagataagctcttccccgtcgtggaggccatgcagaagtacttcagtgctggctcggggacctactacagcgactccatcttcttcctctcggttgccatgcaccagatcatgcccaaagacaggcacacgttctggcagttccgccatgagaaccccaagaccagagttggggaccctccgcctgaaggactccctggcttcaacagtggagtgatgttgctgaacctggaggccatgcgccagtctccgctctacagccatctgctggaaccttcgtgggtacagcagcttgctgacaagtaccacttccggggccacctgggggaccaggacttcttcaccatgattggcatggagcaccctgaactcttccatgtgctggactgcacctggaaccggcagctgtgcacctggtggagggaccatggctacagcgatgtcttccaggcatacttccgctgtgagggccacgtcaagatctaccatgggaactgcaacacacccatcccagaggactaggcaccagctcacccgcgatgctggtggggctcccgggcctggggaagaaagagagactctgctaggacactctttaggggtgaggtgctgcagacctcccagctggctggctcctatccagccaatatccaaagaagcttagctgagccttgctgctgctcgagctgttttcctccagggcagcccgaaggactgacacgggtgtcttccaggaggtggtcgaagatacggaaggaaggagaattgcacccttgtccacacggaatcaaaacccttgtaaagaactggctttgctagaccaactaagcatttcaagcggcaggctctaatgcttggtgagagaagaggtgggtgctactgtggctcccagtgagcactgaatgcctagtcagggttttaacaagcagcccagggcttgagcctccaaaggaatgccacagtcccacatcctttcccaggaggctttgtacctcctccagatgttcatgttgcttggtgctggcttcaagagcagcacctcattagataaagactgaacacataaaaaaaacccttactatagtgtccagagctcttatccctcctctatcccagaaccccaccttctcttgtctgtctacctgctccaggtgacctgacttctactaaagaatcaaacccgtcatccaaggacagaggttggccatgccggggcatgcactagattcactccaaggaattcactccaagtctaaagtactgggtcacaagtacaattgggggggcttgggaaagggtggcctcctgctctcattgtagtctctggagaagaaagaaaaccaaactcgtaattgtccactgtgtcatgccagcccctaccccttcccagaagtgagtaccatttctctgtgtgcttgagacgggctttgtgagtcagctgcccacatgaagccccacaggccgtgtctgcacagtccagctcatgtcctcaggcaagaaatgggagattcttattgtatatagtcagtaccatgagcgacagacactagctgatgaatagactttgagaactcttgagtcacggtgtttgttctctggccagtgttcagggctctggatgggcagtaggatcagcatcaagcagaaggcctaagaggcccaaccggcaggcctgcacgtgggcgcagtgggtggtaggtactgccctgtttgcttccaggtgcagaactatctcgttctagctcttagcaggctcatcccctgccgggaacaagctcagaagtctctggctccttagcccagacctcccagttccattcatgctggtgagtggcacactccttcactggccctctgccgggcccagttcctctgttctccttgctacttgatttcctattcatagtgtctggttattagatgcctgcgtgcgccaggcatcgtcttcaggatttatatgtgccctagataatattcatgaaaacctcatccagttcactccagctctaaaactgatggatgaaaacagagacacggacaggttctctgctgtgctgtttactgaagctttttactgtgcaaaaatgttggaaacagcttaaaatgttggctagagaagcagataaataatgcatactgcaaccgtatggtggaatatatcgcaaatcatttgaaggaatatttaatgtaccaggaaatgcttatgctagtgagtaaagaatacacaat

SEQ ID NO: 111 - protein, 180 aa, Mus musculus
VIFHDVAVLTDKLFPVVEAMQKYFSAGSGTYYSDSIFFLSVAMHQIMPKDRHTFWQFRHENPKTRVGDPPPEGLPGFNSGVMLLNLEAMRQSPKHLLEPSWVQQLADKYHFRGHLGDQDFFTMIGMEHPELFHVLDCTWNRQLCTWWRDHGYSDVFQAYFRCEGHVKIYHGNCNTPIPED

SEQ ID NO: 112 - DNA, 216050 bp, Homo sapiens
  misc_feature (1)...(216050): n = A, C, G or T/U
gctgggattagaggcgtgagccacccggccgggccaaaagtattaacatttttttaattcaaaatcttggcttatgctgttagacctttttactagatctttactcctatcctcaacttttttctaattctctagcttttggtatgacatctcttgcctcaaaaatctcactttttaaaaactgacaaaacttactgcactattaacaacatctgtagcaatgagtgtgttataaggtggatgcaaggtatcttataggagataattttaaaatgttacaataataatcaaaaacagtattttatggttgaaatcttgagaacagaattatgccaagcatttgtataaggctaatgtttagcaggaagcattcatgatcaacgatttatcttgaaaataagattccttcgtctgagggattgatctgtatgtgtgtgtatatttagtttctcatgacaagaaaaatggtattcagtcagctataatatcagtatctataatctatttctcggtaaacatatttgtacatatacacgtttatttttctaatttaacagatgtccttggtatttatttgcattttgtcatagcattcttgctcatatgacctgcagtaaaacaaaaacaaacccaacttttaaatgcaaaactgattttaaagccattttcttttttttattttttattgaaacagagtctcgctctgttgcccaggctggagtgcagtggtgcgatctcagctcactgcaacctccacctcccgggttcaagcgattctcctgcctcagcctcccgagtagctgggattacaggtgcccaccaccacgcctggttactttttgtatttttagtagagacagggtttcatcatgttggccgggcggtctcaaactcctgacctcaggtgatctgcccgcctcagcctcccaaagtgctggggttacaggcatgagccaccacacctggccttaaagccattttctaggattttgttgttaatttttgtagagatgtagtctcgctatgttgcccagactggtcttgaactcctggcctcaaccaattctccccccaacccccccacccagcttcccaaagtgttggggttataggcgtgaggcactgcacccagctagatttttattttatgagtttaggaagcagtggattaggtgcattagttttaattacgcattaaagtttgagtaaaaaattactttttcaaattgcttttaattaaaagatagtattatttttccctatctgattatcagtttgtcttgattatcagtttgtcttgttaataacttgcatccatccaaaacattagtatttggttttagtcatttcttttggcctttatcaagggaaatatttatttaaagaaggtctcatttactccacctcatttagaatgacttttcccccccgtgtgttaataaacgtatttctttacattgctttaaaacacttgcatctttgctcttttctaactctgagctttcttctgtggctgcatctgaggtgcttttttcaggtatagtttttttttttctttcattgcataatttttcagcatttatttttagttgccccttttcttccaaaaatgctcatctgaacaaaattttaatgtaatgaattataaaatagtactagtaataaatatgaatgttgtttgattaatacttgtgtaaatgtttaaagtgtctttattttatttcatgcaggtgatgaaacttatcaggacatatttcgtgatttttcccaaatggcatccaataatccagagaaactaaatcgtttccagcaagattcacagaaattctgaatttttttaaaaatgggaaaatatgaaatctggtgaccccctaatgtatacagctaaaaattcacaatttttttactgctttaattctacttaattttggtagatattgaatggcttggaaaagaggtacccattcatatatttataaattaaaacatagttatctagtagtaggagaggaacctagtttaggacctcttttattaaaaaagcctatttaaagggctatttctgtagacagaagttcagtctagatttaggccatctctaggttacaagatgataggaggttagacaaaagtgattcttttgccaatgggtggtggcattgatttttttcctccatgcatcttgcccaggatcactcagtcaagcatgtcttcatcaagtggaagccaactgtcctgcctgcctcaagaatatgtgttttctttagcttccctgaggatttttggtggttcagaaataggtgtgtgtgttgatgtgtttttggtaacctagctttcatacacataatatatgatttattagaactagagaatgtgttttccccgtttgttcataaatgcggtcggttatacttcttaggtgacaggttattgtccagtactttaatgtatgtatgtataatggctgtacaggtagaccataattcagtcctttagatttattttatgcagcaaaaagaagctcttttttttttttaatcacaaaaaaaaaccccagttcaaaatgtgtagttcttcattgttgggttgattccccaaaaccttgacagatgtatcgatggaataaaagtatgttttaaaggttacttgaatgtcacaaaattatgccttcatcaaaactttaaaggaaaaatcaatttataaaatcatgtaggccatttttatatttgaaatttgtccttttaaagatagttttgctgttgctcctagtgaaagaaaaatctctgtacaaaggagaaaaagaaccccacttattcttagttaatactaaaatatatagcaataaattgctgtttattttttctacatctattttgtgtacttgtacacagtgtacattcttttaaattatatcgtgtatatagctttagtattcggttacatgattcacagacccctgaattccaaaatattatggataaacattaccatttatatgctacaaattagtctgattccatctttgaaaatgtcttaaagtataaaataattaatttgctttttttttttttttttcccgagatggcgtcttgctgtgtcacccaggctggagtgcagtggcacgatctcagctcactgcagcctcctcctcttgggttcaagcaattctcctgcctcagcctcccgagtagctgggactacaggcacccgccaccattccgagctaatttctatatttttagtaaagacgggtttcaccattttggccaggttggtctcgaactcctgacctcaggtgatcagcctgctttagcctcccagagtgctgggattacaggcgtgagccaccgcacccagcctaatttgccttttgattccttcccattgttgtcaacaattaagtctattcttcttttagaaattatatgtaaatgatattattgatactctttctaaataagaggttttaaaatatataaaaactttatgatccaattatagataaattttctaacatttcccagtcactagggttttataagttgattaaacatcaaatcagaatctagccaagcaggaattatattgaaataagttcacattacagaaaaggttccataatttggccaaactgcatgcatgtaatgcttatttagtaatggtcactgtatgttagataaggataaaaatatatttgtgaattacttctgaggaaatgctaacttccacagcattgtatttaattataacaataacaggaacattaaatctttatctttgctgtttcacctcaaagtcatagatcatctggctttttaggcaccttcactaaaggcaaaaatctgatttgtagtttttattagcatgtaccttgaaattatttgaccaagaagctcaaagaaaagaagtacgttaaagaaaaagaaaaaacctcacttttcctttatagtgtcccttcctgttttaattcctaaagatcctgacttttatctgaggaagtctaggtagttttccttttggatctggccattggtgcgtgtttcattcagatcacctctggaatctctgtggttgtgaaggcaattccttatgagactcttgcctcctgtggcttacgtgatgaattgttaatatggcagtaattaattagtatctacttaaatttagtggtcagaaatgtatttgaagtgccttaaagatgatcatggttcagaatatcttcagagaaagcaaaatctttaatattgcagggagcctagcaatacaagtacacatttctgtggcttgatttcttgaatatgctgagacccaatttggactacatttggcagaaatgatggagtaaacagcaaggctttaaattaaattaatagttacaaggtaggttggctcttaggtgaatttagccatgtcaactaatagcttttatatggtatgtaacaaatctgaattatgttatgctgtgaattattcagtgcattataagaaatcttagttaatcatgcttttgggcttcattagtcaatgtgattggccttttattttctttccataacttatctgctattattagtttcttattccttattattaatctgttagctcattatcattagcttactaacttgaaagttagattaatatcaaaataagaatagcagcactatgaagagttaataaaatgcaatttcatgttagagctagaataaaagtaattgagcagtcatttgcaaatgcttcattataacatttatgtgcttaagatttctaaggttttaaaaagttacctttaatacaatccttagaaactcagaaatttcctgatattcattagattatggtgtttgcctaatttataccggttttcactgtatattttaatgaactttgattggttacttttccagacatacagatttaatttggaatatgaactttggttcttcatgagtgcattttgaaaaagaaaaaaagtacacattcagaatctggccaatttaagtttgtattttaaaaatattttatgcatgttaagtatggtcgcagtaaatgaaattgtgtttaagactaaatttactaccgttttgaacagacattcccagatcattcttatattgtcagataacacttgtgtataatatcactttggaccatggacatgagctggaaaaatgatgtatttttgtagattgtatgtccagaatgactttagaaccgcatgatacggtggaaggagcactggactagtcgtcactaccctttttggattcagggctcctcacaattaaaatgagtgtaatgaaacaaggtgaaaatatagaagcatccctttgtatactgttttgctacttacagtgtacttggcattgctttatctcactggattctcatggtaggatttctgagatcttaatctaagctccaaagttgtctacttttttgatcctagggtgctccttttgttttacagagcagggtcacttgatttgctagctggtggcagaattggcaccattacccaggtctgactgaccaccagtcagaggcactttatttgtatcatgaaatgatttgaaatcattgtaaagcagcgaagtctgataatgaatgccagctttccttgtgctttgataacaaagactccaaatattctggagaacctggataaaagtttgaagggctagattgggatttgaagacaaaattgtaggaaatcttacatttttgcaataacaaacattaatgaaagcaaaacattataaaagtaattttaattcaccacatacttatcaatttcttgatgcttccaaatgacatctacagatatggttttgtggacatctttttctgtttacataaatttatccacttaaaatgtgataatgtggagacaaagcaagatttgattacataaacttttctctgcattggtcttttcactatcttatttgctaacttttcttatttttcttcaacctccccaccctccattttttggatattaaacagggaaagcttgctacattataaagattgttggcaccatttattttacacaaaggctaaaggttaacttttggaaatgatgagctacttttatatatgtgtttactcatgctttgtgatatttctggatcattccagtcataaagacttattacatgtactatttcttgctacctgtgaaaaggtatattttaaagaatgtataaccaacagtccatttactttttattagtatgtagaggatttgtatctaattcatgaatgtagttttacagtagtttgtcattgtaaatggagcaaagtacattatcttctaaaatgtacattatgtaagaattgtaaatatacttaagtaatttgtatgccaaaaaattacaataagtcaataaagatctcacctctggcttagttctttcatggtgatttacattttcttgtgaaatacactgtgaacatatctgtcaacagcagttatttttaaggtactattatttttaaggtatttcttcccagccctttcaaatccacattcatcctatttgctgattacttcaatcaagaaatccatttggatcttttaagtatataattctctttgttcacagagctgttatagcccctaattcattggcaaaaagataaaaggttttttttggggggtggggggaggggcttgctctaagttttttccattatgattgacattaatgttcctaatctatgcagcacattcccattttatccttttagtaaacagacacacacacgtttgtcagtgaattgggactgaaggaatggaaggttgaaaaaaccaaactggaagtgtatcacctgcatttgctttaaaaaaaaaaaagctaattgaaagcagacacataaacttttcaatataacttgctttattcagcttcatttcattttcagaatagttctgtggagaacccacatcaatagtctataaatattttaagtgaaaacagtttaatttttcaattattgcaaacacaaagctttttgcttgtggagaaatgttaagaagaagcaagagaatcatccacaattccattatcttgtgctgtccaaaatggaactcactagctacatgtggctacttaattggaattagacaaagagttcatttcctcagtcgtactgctacattttaagaactttatagccccatgtggctagtgactattgttttgaacaggggagattgtagaatatatacattgtcacaggaagttctactggatagcactgagggagatactgttacttttttgtgtatacccttctagacctttgggtgtgtgtattcatacatttatataatgggatcatacagttacccacttctttcacttaatagatggggagaactttatgggaaatttcaagcatgtacaggtagagaaaatcaatagctataagctcatggcttatatttgttctcctacccatttttcccctttcctggactttttggaaccagatcctagacctttcaccagcaaatcattccgtatgtacatctaaaagttgaggactttaaaaaatcgtaacacttcttaaactgtaaaactacataatcaatattcaaattggtttctcaaatacgatttttaaaatagatcgtgcaaatcagaattcacataagttccatacgttgcagttggtgaatatgtttcttagtctctgtaggtttttttttccatttgttaccattactattttttttttggaattggggtctcgcactgtcatccaggctggagtcctgtggcgatcgtagctcactgcagccttggacccctgagctcaagtgatcctcccacctcagtctcccacatagcttggagtacgggtatgagccacctcacccatttgttagttttttaaatttccacctgcagtttgttgaaaacatcacttttaatgactgcattattttagctttaaccactttattgatgaccatttgattctgattttttgccatcatgaacctagctttgctttatttttatgtttgttttttgagacagggtctcgctctctttcgccaggctagagtacagaggcacaatctcggctcactgcatcctctgcctcctaggttcaagcgattctcttgcctcagcctctcgagtagctggaattgcaggtgtccgccaccacactgcctactttttttttttttttgagacagggttttgctcttgtcgcccaggctggagtgcagtgttatgatctcggctcactgcatcctctgcctcctaggttcaagcgattctcttgcctcagcctctcgagtagctggaattgcaggtgtccgccaccacactgcctactttttttttttttttgagacagagttttgctcttgtcgcccaggctggagtgcagtgttatgatctcggctcactgcaacctccacctcccaggttcaagcgattcttctgcctcagcctcctgagtagctgggattacaggcgcccgccaccatgtctggctaattttttgtatttttagtagagacggggtttcgccatgttgggcaggctggtctcgaactcctggcctcaggtgatctgccctcctcggcctcccaaagtgctaggattacaggcgtgagccaccattcccggcctaagccaccatgcttggccttgctttattcttatggttaaatattttgaacattcttaaattattaggaagattttctagaaataaaaatgctgtttcaatggttgagtatatttttgagactcatccaatgtggtaggcaccgtgttaggtactgggtatattgtggttaataaaaaacaaatgtatattctgttctcttggagtcacgtgttcttgcaatgaagaaagatgagactagggtagtacatatatttaggtggccctcacagaattattgaggatggcacttagcccagacactggataggaggtatttagagatcatttgtgtaggtagtgacatgtaagccaaggtctgaagcagagaggttggataatccatgcaaccttacaatgtggaaataacaggaaaaaccgtttacctaatctctggtcagaaatcagagaacttggccaaagaactgaagggttactgtacttactcaagttctttgtctatttagacagcatgcacagcacttgcacgtgtttacttaaaaactactggtatagcctcaattcttagaagactgaagttagtacgtttttatctagttagcagtgtgcaactgcctagggtcaaaattgctactggctagctgtgtgactttgggcacgtgacctcggcgtgcaaaactccctggtaccctcaaggaggctcttgataaagtgttaaaagtctgtttataaaacaaaagtggatgaatgtcgccctccagggctttgcggtgctggggctcggggagcagcctcgcaggttcgtgcgggcggcgggggccccctgctggccacatcctccagcctccctccgctcggcctccggcgcgacgtgcggcccgggccatttcctcccagggcgggggaaaagggaggagctgccggtttaaattgcctagctgcagctcgtgtgcagggagaggccgagacggcttaaagcctccaagaaattgagggaaaaaaggtgcagagattaaagttttacctcttggtgcctccagcttcgcttttggctaacctaagttcctctgttcgggcgcctccattcccttcaacactcagcttggatatcctctggggctcgccgcgtagggcgccatttctcagccgggacagcgggccagccctcagcacgctggagtccggaatccccccctcccaacgccgggcgccggatcccaccctaacccctcctctaatacccttggaacctaggacccagcggtttcggcacgcccggccccgcccctccgcgcaccggcgcccgcgattggctccaggcggcgcggccccgcccctttcatggccgccgcctggcgccggggctaagtggccgccggcgtccgggtacccgagggctctcccgcgttgctggcaccgctggcgccgcggtctcgtagcgcatgggcctcctccgaggcgggctcccatgcgctcgggccatggcgcgcctgggcgctgtgcgctcccactactgcgccctgctgctggccgcggcgctggccgtctgcgccttctactacctcggctcaggccgggagaccttctccagcgccaccaagaggctgaaggaggcccgcgccggggctcccgccgcgccctcgccgcccgcgctggagctagcgcggggctccgtggcgccagcccccggcgcgaaggccaagagcttggagggcggcggtgccgggccggtggactaccacctgctgatgatgttcaccaaggcggagcacaatgccgcgctgcaggccaaggcccgcgtcgcgctgcgctcactgctgcgcctcgccaagttcgaggcgcacgaggtgcttaaccttcacttcgtgagcgaggaggccagccgcgaggtggccaagggcctgctgcgggagctcctgccgcccgccgctggcttcaagtgcaaggtgagcgggccgcggctgggggctcccggtgggtggcccaccccatcctaggcgaggtcagtttgcgctcccggaggggatccggggaactagcgggtaggatcttccctgagctgcccgcttgcaatgtagtgttcacaacctgcgggagggctcgttcgggggcgtgtccgggagccagacgccctcagctggtgctgaggagtggagctgcgtttttaatgaccgcctcgttttcctctcccccagttaagcgcagcccccaggagagtccgcgcgcccccattttgctaacgttgcagggttcagcactgccttcagagtctgcacctctgtttatgttcctcagtttttgacttctgaggatgggactggtcaccagtagtcatcctgagcaactggagagggccttggtgaggcctctggaagtgttgaagttgcagtgacacttctcattgctcttaaggtatttcagtaggatctggtcaaactcattgtgaaccatcttatctcctctctgtgtccctttttccccttcctccaagggtcatgaacccatttagagaagcctggagttcctccgaatgaggaagagaaagctcaagaggaacagatatgatctggggagagcacagctggccgccttgtcccaggctggaccagtctgcctccatgacagcttccatctctgtttatcatctgtcttcactgcctggctctccttgtctgagatgtgtttctgacatagtgtgaattgcctaggtcaaattgcttatttgattttgacctaatagttgtacagaggggatccgaggccagattttaaggagtagtaggtaatattaaagggtggagactgatgttggttggggaagcatgctgagacaggagttgtattatgtgagtgactaggggagctgttgccaggatcctacaggcttcgggagtctctgatagctccttgttgcctacggggtgaagtcccagtttattggtagggctgttgtgttgtgagcctggtccacttctctggcttcacctctcctcctttgtctacatgcacctcataccttagctatgtagggagtgggccttatacatgctgtactgtctgcccacagtgtcctcttgggcccttggccattctttactcagctttcacctctcctgagaaagtccctagaccctgggacctctgaaggtcctcgctggaggaggagcctggcaacctgtcccaggtgatcctaatgaccctaatatttgagaaactttgcactagttcacggtagaaaactgagggcccttggccatagggtcagtctgggcagatcttgggatttgaccaggtctccaaacaccgccttgaagatagcattgtcatctcttctgggcctactctgcaccgttgccggatctctgtccccttgtccccagctcccgctgcagcgctagctgcacagccagtgctttccagcctacttgcctttgcttttgtcattcccactgttggggtgctccttctctccatctccaagtcttgcccatcttcagataccatcccctccttggagccaaggaagcgtcccttctttccttttctacttccctggtgctgtgactgtatcatgtcttatcatccatccctatgtacaatgcctggcactcttagttggcaccagaaatattggcccaggggtagatccagcctcagggccgagcccctcctgtcttggagtaagtgtttcatgctcggactaccccactttactgggcccagttctggcagcctcactcaaggcctggaggcagctgcaaatgaccagagggaactgatacctcctctgttgaggggtgagggtttagtgtctggggacttctagccagatgtcagtgattggataaggggttatcagtcctggcataaaattgctcccgttacttctttttttttttttgagatggagtttcgctcttgttgcctaggctggagtgcagtggcacgatctcagctcactgcaacctctgcctcctgggttcgagcgattctgcctcagcctctcgagtagctggaattacaggtgcccaccaccacgctggctaaattttttgtttttttttttttgagacagagttttgctcttgtcgcccaggctggagtgcaacagtgtgatctcggctcactgcaacctctgcctccaaggttcaagtgattctcctggcccagcctcctgagtagctgggattacaggcgcccgccaccacgcccggctaattttttgtatttttagtagagatggggtttcatcatgttggccaggctggtctcaaattcctgacctcagatgatccacccaccttggcctctcaaagtgctggaattacaggcgtgaaccaccgcgcctggcctccgttactttgttttgttttgtttttgataagaattcttgctatgttgcccaggctggtcttgaactcctgagctcaagcaattctcttgccttagcctcctgcatagctgggattacaggcacacaccactgcacctggcattcccatgatttttgagttcatattttgtaaatttttctgtttgtgatgaaaagtgctctttttttcctttaaatgtgcgattctaaaaggtttgcttcattttacttgtgatttaattcttcctcaggtttggaatattcctgaaaagaacatatgtcacatgcctttcctctgtctggagttctccctgcctccatccttggtactcagctttcaggtctcggctttggtgttctttccttggtaaacctttcctgagcccccattacacactttcaaactccaagcactgttccttagtaacatttatcacagttgtatttatataatcgttggagtaattatttgtcttccttgctagactctaaactccttaagggcactgacattgacgtgtcttaaatgctgcctccctagcacctgacagatgagggaattttatactggaattgttttttcagtattgactcggaagaaggaaactagaatttctcactctggctgtgccagagctggaagggatttggagtatatagcatgacaggtgaggaaactcgcccaaggctttctggagaagttactcagttgtggctggacctgcatcctaggtcagtgctgttccctttgtgctgtatttcccctttaaggagcacttctgtcttgtaaagtccagggggcagtttattcccagggagaattgatttgagtggtgttagaactgtctgaagatagcctgggggctcctcttcccttcagttggctctgggacctcagcatggctgcaagatgcagagcagggccacagtgaactggcacggggctggtgcccacacaccgaggtctcaggccattttcaagtggcatagaaacaccttgtagctgaaatggttgcagaaatagatcacagaacattattagtgaccttagattttattttggctaattggatattagctaaaaaggattcatgtatcttgttttaaatatgtttgaaggttttaattaatctgttagtttattatctgtgaacagggaagcatattatttgttaatcagtaaacttcagagcttgctatgttccaggtaccagtataggaggagctgcttctagcctatacagtaagtccattttctaaatgcatcagaatcacctggggacacttgaaaatacagaatcctgggccccaccccagcctgtgggctcagaatctcctgggtggggcctggaagtctgtatttggatggagttacagaggcaggcttgggcgtcactgctgtaagaaatccaggagtgctctcctgctggtctctaagacccagttcaggcatcctgtcctctgggtaaccttccgtggggagcatgatgcctggctcacagtgggcgttcaggaactgtttgactgtgactcttccatccaggctattttggctgtgctgatctgggaaaggctgccacattcaccttgctaaaatgctgccttttttttgtctttttcttttattttttttttgtgatagagtcttgctctgtcaccaggctggggtgctgtggtgcggtctcggctcactgcaacctctgcctcccgggttcaagcgattctcctgtctcagcttccggagtagctggactacaggcacccaccgccacacccagctagtttttgtattttttagtagcgatggggtttcaccatgtgggccaggatggtctcgatctcttgacctcgtgatccacctgcctcagcctcccaaagtgctgggattacaggcgtgagccaccgcacccggccagaatgctgcctttattgtatcgcttccattcagaacctccagtggcttctggctacctgtcctcccaggtcatttcaatgtcctagacccacagcagtggctgagcttcctgaattcttctcatggcgctttgcttgctctgcttctgagcatctgttgtctttctgtcaagtgcagtctcacacttgtaaaacttagatcaagacttatcccttccatgtgcctttcctgccagatcaggtttgacagaatataccatgaaacccccaaataatggtggcttaaacaaggttgaatttatgtctcgtttcaatgcagtccagaggtaggcatttctgggctggcatgggggcttcgtgaagccaccacggtcctcggctccttccagctctgtgtttcaccatccctgagggtggcgctgtcttcgtggtccaggatggctgccggggctggggccatcacatctgtgttgctgggtcgcatttactccagtttagcccagtgctgctgtgtgtattgtttcgggtccagtctcatcacatggttctactctactgacttctgggaaaatgatcacagtgaacaggcctcaaggcgcctctcatgtctcctctccttccccatgctggccagctctctgcagaggcggtggggcccaccagccactgcttgtatggcctccatggagcacagcaatattgcttctttgtggtatttcccttgtgctatcagctcaaatcttaactgttcagaaagaccttccccgaatctcttttctaacgcaagcctcatgccagccttcatctttcccatcaccttgtgcatttttttcttttttttttttttgagatggagtctcgttctgtcacccaggctggagtgcaagggtgcgatcttggctcactgcagcctctgcctcctttcaagcgattctcctgcctcagcctcccaagtagctgggattacaggtgcctgccactacgcccacataatttttgtatttttagcagagatggcgtttcactatgttggccaggctggtcatgaactcctgacctcaggtgatccacctgccttggcctcccaaagtgctggcattacaaatgtgagccaccgtgcctggccttttcttttactctttttttttttttgagatagggtttctgtctgccgcgcaggctagagtagagcacagtggtgtgatcacagctcactgtagcttcaaactcctgggcttaggggatcctcctgccttagcctcctgagtagctagaactacaggcatgtgcctccatgcacagctaattttttttaactgttttgtagagatgggatctcaccttctttcccaggctggtctcaaactagtgatcctcctgccctagcttcccaaaatgttggactgcagttgtgagccaacacgcccggctgtgcatgtcttttatagcatgtattcattttttcatgtattcattcatagggtgttgttaagtgcatatcctgtgccagacactgttctaggtacttgtgaacagcagggaacagaacaagtttctgccttcatggagcttaaattctggggttgcagggaatgtataggagatggatttttaacaaataaatatggagtgagtcagattgtgatcaattctacagagagaaataaagcaggctgcagagatagcaagtgtgtggttgtcagtgtggggagttgttcgccgtggtgcacgggtggccagggatggctccacggataaggtgccatttgtgcagagcctgaaggaagtgagggagccacagccctctgggcgggactccgtccgaggcacctgcaagtgtgtgggcctcaggttggagtgtgctctgcatgtttgagcaagtaactatcctgttaacttgtttgtagtctctctgtctccctcctggaaggtaatctccagaaggcagagaccttacctaccttcatctattgaggtttacgggaaccccatagatgccatccttatttcttggcctgagttggaaatgatagagcgggcaagcagtctcttaacctgggacacaagaactggacagacttctggaggcacagacagctctggcagctgcttgcctccctgcagggatgggcaggttctgcatacatagatcctcctgccttaaggaggagttagtgtgcaaggaggagaggaggatggggcagggagcaacaggccggagtgtttgtccaggagagcatcctccatagagaagcacagaacaatgaagaaggggtgcttcctctttttcccgtcgacactatagtctcagcactgtttctggcacattctctgttctcaataaatatttatagttgactaataactatagtgattaaacccaggatatcctagaagagttctcagtgatctgccccttttccctcaaacctcagcctctttcagagcctgagactgggttgctccatttcctggtgacaaataggaggaagaaggaaactgcacatcccccatgatccttgtctgttttctctcaccatcacaatacccgagactgggtaatttagaaaggaaagatatttatttagcttgaggttttggaggccgggaagtccaagaggatggtgacagcttctggggagggaagcagaggcatgcagaaggggcacagcgtgaggggcgcctggctttataacagccactcttggtaactcatccagtgccgtgagtgagagtgagaactcgctccctcccaagagatataacccaggcctgggagacaggcatgaatccctcttaatgacttcatcagctcataaaagccccacctcccagcaacgtcaccggggctcacatttccaacacatgaattccaggggacaccctttaaaccttcgcatccactttacaggttgggttaccttacaggttgggttccaggaggagcatgtgccaaggactaggaatactggacaaatgttaaaatgcagtaggggattctcagagtttctttgagtgcaagagcaaacctgtgagtgacttggaaaagttgaataccttagctcattggtggggcttgagagaagcctggatgtgaagaccttgaccttgatgctggctgtctcattgatgaagctaatgacaaacaggtgaccctggaaatgcaatggattttccagcttgtcacagcagcaggcaccttgcacctgaatgaaacttttgatgatggtctggaaaagaggtgatcaaagaaacatgtcctgaagggagaggctctttgaaaagataggccgacattttatatggcagtgtttagagaacagtgcatattttatcaaatgcatttaacagtggcattcttttaaattgtaatatactcatgaaaacagctgtagtagtttgtgtaccaatgtatgtttcttatggaaaactttatgatcacagatctaaggggaataactttgtatagtattgtatcaaatacaataaactctggagaagcccgcaagtatgtgttgaaatgataaggcagagccttggggtcatgatatagatgaaatacactgatcgacggggatttataaaatctgtgggggcctcaatgcacggattaactgctccagctttgggtatcagtcattcctcatgacttcctgactgttccttgttcctgtaggccatattttaaaaagatagataattacttttttttgcaacaaaaattgaaatataattcatgtaccataaagctcactcatttaatgtatacaatccagtggtttttagtgtattcccaaggttgtacagctatgaccactgattctagaacacttgtcacctcagaaaccctgtatccattagcatcaccctccgtcctcctgtctcccccgcccctagagactacaaatcagcttgctctctgtataaatgtgtctcttctgagtattcactacaagtgggctcagctaatatgtggtcttttgtgtctggcttcttttagcctagtgtttttagggttcatgttgtagcatgcattaatgcttcacccttttttatggttggatactattccatcgtatggataaaccacatcatccattcatcagttgatggacatttgggttgtttccgctttgaggctattatgaataatgctgctgtgaacatttacttagaagtttttgtgtggacatatgttgtcacatcactggggtataacctagcagtggaatggttaactctgtttaaccttttgaggaactgccaaactcagtagctataccattttacattcccaccagcagtgtatggaggtcctgatttctccacatcctcaccagcacttgtaatcatccatcttttcaattacagctattctagtgggtgtgaagtgatatctcattttagttttggtctgcatttccctaatgacaaataatgagacgattacatgttgctaaggacaactacatacatgtatttggtattttttaatatatttaccaaaatgcattttcttaaaaaaaccccaaaaaacagttaccttgactttcccctccttaccctgtaaggtgttacaacatcgctagaaatgggcatattccgaggacatggtttggacatttctgacgtgtacactgatgtgcctgaagtcagcaaggggatgtttaccagtatgaagtcttgatgaggagaataatagtagcaacatttgttcccctcccctcccctttttcttttcttttctttaatttcctttttcttttctttttaagatggagtcttgctgtgtcccccaggccagagtgcagtggtgtgttctcagcttactgcaacctccatgtcccatgtcccgggttcaagcgattctcctgcctcagctcccgagtagctgggattacacaggcgtgcgccaccgtgcccggctaattcttgtatttttagtagagacagggtttcaccatgttggccaggctgggctcgaactcctgacctcaggtgatccgcccgcctccgcctcccaaaatgctgggattacaggcgtgagccaccgcgcccggcctgttcaggcctttagaatgtataaaagtgcagacgcctcacttgagcgtggctgaggctggggaaagaggtgtggcatccctgaggctgagagcaggtggcttacggagctcccagagcagcaggaggcacttcaggaccccgctagcagctctgccaaggggctgtgggtgtggggatgagggcagggctgtagcccacctgacaatctgtcatccgcctgccgatgacacccccaataaatccattcaatatgaaccaaaactgcgctttctgggagtgcagcttccctctcatctgcttcagggagcgctgcaggttcgccaaacatcggaacaggaaggaagctctgggcgtagtgtcccccgtccagctgataccctgggccagaaaggggcagtgactaagtgccacagcgagctgcctttagaagcagccaggcacctcctctgctgtttgagggaggtgatagcagcagccccgtctttttcggaggggtcggttgagaggtagcccaccctaatacccacagcgaaggtggcagggcctgtcgtcttcacctatcctagggggcttcgcctccttgtctcctcctggatgtgcctcgcccgggacgggaggatgcagtccgacctccgggaggcagaatccgcgcggtgtccggggctggctttccaggtgccccgtgcccgaggctgcccaggggggtcagtgttgcgggagccggatgggggctccggtgcaggcacaggttttgtcctgtgctccgggatgtgcgctgcgggctccgcggctgcggtcagcacggggccccccgtctggagaggaggggccgcgggcgtcgggcgttgggcggggctggcccctcctccgcggcgcggtccctcccccgcccggggccgacacacgggccgagtgcagtgccccgcgcggccgcctgggggcgccgctgcaccgcgtctgcgcgcccgacccccggccggcgaggtgcgcgcggctgcagcccccaagcctgaggctcccgcggggtgttttttttcctcctctagccccgcccgcccttgtggtttcgaaagcactgaactgaaaggcagtcggcggggctgcggcgggcggtcatttccttcctgggccgccggtaaaccggctttgatgagccctttggacaaggcggggccgagccgctgggacgggcgatgcggcagcacggtcggagggaggctgcgtgggaggcccgtcgctcctgcctggtcctccccggggccccagccacatcctttccagtccgcccggtccccgtcacacccggcgggcctccgcagccagtgtgggaaacgtgtctgttggagccgcgtggtgggggtggcccctcggtatcctggcgccggtggggaatttggcaaaagacccgaggccgccagaggccggctccgggggccgccctggtgctgggtctgtccctggcgctggcctggagcccggcgtccttaattgcgggagggactcggatgccaccttacaggcctgtcgcacgcgactgtcctcgcggtgagatgagggcttcccaggcctgtacctggggcgggaggcctctccctgggaggaggagcccggccgcctgcttgctggaagggccgcctggcagggcccgaaggcctccctgctgcccttcctcacagccttcccatccagggctcttatctttcgccctgggaccactcacaccgtcgtgtgggttgtggaagacaagtcaagatgaccagggccttacccgcaagccacagggaccttgacttcacggctctgactctgagaggccactctaactacttgcctgttctgagcagtggagctaggcctcatcagctgacagaaagcctgctgttaagttaatgtgttttaaattaaggccattggttttatttattagggcgatgactgttaagcagccccgattaagccatcctctgctggtgggactagtctcccagaggctggcccctgcggccctgctcaggcaggcctggggatagcacagctgtgctgccgggataacagatgaaatgagacagctcacagcctggcacatggcaggtgcttggtcaacggtggctgctaataatggtaccggaataggtgtgttgggaactgacaccctgctgttgtcactctagaaagcgcatacctgtttattcaccatgctgataccgttgattcagttggagggcagtgcagctagcttgcaaaacagctttctggccaggtttatttccggtgtccccgtgttcttgcaagtcttcaattctccaaactacggtgttttttccttctctgacactcctccctcccctacctcttggcaatatattgtttgcctctctctgaaagcacaggatgccttagccttatttgatgttcaggggcatccacactttctctttcctgctggaaggaagaggctcatcttcatcacgtcccttccccaggggccctagccctacctggccctggacagaggctctgcagtgctagccggcctgtgctctggagtgggagctgctgcttgtcaggatgatgaagcctttgtagtcttgtgtagatgacagagtcgcctctatgaacgttccttagtttctcgaaggttccaattcaaatttgtttatagtaaatggtgcacaattatacaatttctggtcaaattttgatgttttgtttccctcttactggtttttgatttgttttcttggtctgattgcacacagtaactgtttatagtcatttttgggcatcagccaagtgtaagctgtaaatgacttaaaaaggccgggcctctggggagacgctcatggatccacatagccccacatactcccagagcctgctcctatgcctggctgccacactatccccctgagtggggtctctagcctcaccctctgtggctgttgcctcactgaaggctgtgaggtggccctgcttttgccagagcatcacagcagcccaggatgtgacctctgtgtgaccgctcaggtggccaggctccctgagtcctggtcagcgtgggattctgcaggggcttcataggctcagcaggtggatttgtcagtctgaaaaacctgcacaagatcaggcatagtgcaggctttgcttagggcacccttggccacctgctgtctagggggtaggaagacacagggtcgaggattgtgggtgtgccggggctgctttgtgaggatggagaggctggctggggggcagggagcttggaggatatacacccatgatacgtgggtagcatgtgacctgcccaccttagagatgagggaactcaggcagctggagccacagactggctctgtcttctgtccctggcaggagagtcatgaccagaagatggggcagaggggggcagctggggtagggcggcctggctgggtgagtgtgtggctctctgggttggcagagagtcagcagtagccaggactctggagcgggagccacagggagagctacggggcccgtgccggcccagccaggatgtacctggctgccatggtgatccacctggctggactgcctggggttgtggtgtaccccggccacttcccatctctgggactttgctcaggggcttcttccccggatcacccattcctcccatcttcatctgattaactcgcctttcatgatgaagctcggacggtgccagttatgtggggacctacctctcacctccaccctggtgagcccctttcccctggctcctgccgagctgacactggcccttctgccagctgctgggggatgagcactgtgtcttatttcattctgtgtctccaggatgtagtggcgcagggcctggcatgggtaagactgcataggctcgcacactggaggagctggatgccaacacggtgggcagtggggtgtgagtgcagccatggaaggccggggtgggatggctgggcaccgatgcccgtcagatgtcctgtgcacatgctgctcagacttgcgggacatggcgtccttggccgcttacagaggcctcaagcttgtaaagaaagcttcccggtccctcttgtcacgggttctcctgcagaaagtcatccagcctgacactagccatgaagtgtcagcggtgttttgggttttggaactgtcccccttgcattaccatgaagaaatgctgatgctggcccttgggaggtacaaggggcttcacttgtctcccttacctgagagccctgggaaggttgcttggtctgcctagagccccggctggcaggcagtgccctgggcaagctcttcagcctgcacctgcccctgggcgctcacttcagctggagtgtggtggacagagtcctgcccagatgttattgatcctgagttctgggtcttcctctgaccctggcttctgttagcaaggccttctgatgtctttgcctcagtttctcatcataagaggagtggggacgctccggctctgagtaacagtctgttctcttccaggcgtgtataaacagtgctgggggcttacagagctcatgccctttccagaccccatcctgaatgtgcgggtgagaagttgcggggtgtgaggaggctgctcttcccctctttctgggataatccctggaatgaccctaggtgaggcttccgtgctgacttcccttccgtcctctgggaggtactggttcgtttctcgggccctgccctgtgcagggccgcacctcaggcctgcgcggagcatgagggcgagggacttggaatgaccagagctgtctcaggtttatcgtcaccgtcaatgagccacagttgccaccatcgcaggagaccctgggtggcaggcaccatgctggatcctgcttttcctccctcatttaaccttggagcagccaggcctgtgaggggtagctagtctcccctaggaagaggctgcacagatgagcttgctcggagccatgattggagtccggcttgctgattcttcagcactctgcccgatgcctgttgattttggcggtttgttcttgtccctccaaagccaggaatgctctgtgagagctggggccccaccagaagggttcccacggtgcccctgtgcctgctgctggctgggtggcctcttcccctggtcagctgggtggcacagaacaggggaatcccagggctgcccggggtggaccttccctccctcctccaggagctgcccatagaacagcagggagcctctttctaggaggtgggatttacaggctgagatgttggagccccacctccctcatttagctgcagaagaggtctgggttggagggagtccagactctggtcctggagttgagtctattcatgttatccatgagaaaacgggggcccagagaggccaagcaacttgctcagggccacacagctgctcagtggacaagggagactgggagcagctctcctgtgccctctctggttccctgcactcatggtctccctgcctgccttcccttgtgttcggaagccagttctacgctgtgcttgctctgtgcgccggtttgtcttctgttttggtttctagcctgacacagcttttggatctcacccacttgtgactccctgcagtcgtctgtgttttgtggacaatgaaaggctttgctccacgtccactgatcggctgctccagaaggaagctttgcagcctcctcagctgcaggcccagagtcatggctccctccaacccattgcctggccctgctcagcccacttggatggagctgagtccccagcccgactgggtcctgctgggggctgagctcgtgggtgcgagccgtgtggggtagggaaccccgctgctgtctcccacctggctctgcactcctgcagccccagtcctgccgtgactgtcacagggatctccaggcctggtcggcggctccctgttgtgcgagcatggtactcggaaaccgccttttctgctggtttagtccgactgaagctccttgctgagggactgcattccctctgcaaacctatggccttatgggtctttctgatgctgctgttatcccctgctctgtccgcagtgctggtgaatttcccagcctggggcagttggggacagggtccgagtctgacttctttctctttcctgtgcagcgggtgtgggaatgggcgtgtgtctcttgaatgagtatggtgttggctacagatgggccgctttagatcctggctctacctcatctttctgggaggtggggggtagttgtttacattctctgaaccacctcctctctgtagcaggggcccagtcctatcacctgccccaaaacattggtgtgagggcgacgttaagtgactgaatgtgcacagcgcagctgtttgtgcttgacgcgtgctaggtggacccttaggcactgccctggccccgtgaaggccctgcaggtctgtgtcccacccttggtggctgtgcccagctttagcatgccacctcatggtcctgctcagtggctcacctgctcaccctgtgtcaggtcccagcctggcgcaggtggctgcccctgaatctgggccttgcgagcctgttgcctggatgcccaggttccagatgcttcaccttgggaaacaaaagagcagttttggcacagagatcccgcagcctacagacttaattatgccccgtggacgtgctgagcaagagtgagagggtgactgagcctgcagagggctctgtgtgatgccatgtggcccccagtttcctcacaggggaaaaggaacaagcttccggctcagggaatggcttcccaggagcagatggtactttgaaaatcacctcgtcaggcttcgagcctgcgtcctgtggttgggagggtgaggggcgtgttgtttctgctgctgaccccagtttcagggcaaatttaacctgtggtcagtgcagggtggggctttggtcccaggccctggggctgaggccctggagaacctgccaggcctgggcagtcactgctgacgtctgtggccagagtctccaagcgctgagggccccctggggcctgatttatgggggtctttgggggacttgttccagcctggaaatgtgagagggaaatctccccaccccagtgggggtgccccctggtgcacagctgggcagtgggcacccccgtgacttgtccgagagcaccgtttccctctggtgttaccctttaaaactcacttgagggaagagtgattggctacatagttgaatttgctgagcagcgtttgcagaggatgtaaactgccaggtaggctggccctgcttactggtctcttctttgggctcactgagtgactgagtggctttcgctttgatcagaaatgtgaacaggccgggcgcggtggctcacgcctgtaatcctagaactttgggaggccgaggcgggcggatcacctgaggtcaggagttcgagaccagcctggccaacatagtgaaaccccgtctctactaaaaatacaaaaattggccaggcgtggtggtgggcacctgtagtcccagctgctcgagaggctgaggcaggagaattgcctgaacccaggaggcggaggttgcagtgaaccaaaatcacaacactgcactccagcctgggagacaaaactccttctcaaaaaaaaaaaaaaaaaagaaaaaaaaagaaatgtgagcagttgaagattttagaactgatgtggctctcagagagttgggagacattttaaggcaaatgcaaaatgaaaacgtgtcttttgcttaaggctgtgtcttaagcaggggccttgggaaatgaaacgggatcttgccgcttcgcctcctgatttctggagctgttgacttctcagcctttttctgtgacatgtgcagcatctggacctgatttacgggagtctttgggggatttgttccagcctggaaatatgagagggaaatctcactgccccaggagaggagtcagtgcttagggcagccttccctgggccccggggagagggagggtccaagaaaagggcaggagaaagtgcttggagaaaagcgggcagctggggtgcagtgcctgggctccacggagagccctttgtgacttgcttctccaggtagtggaaagctgtaaatctcattcaacaaaccgtcttcattttcccacgttcccttgagcccttgtttcttgcaggcctaatttggatagagcaggggaattttgttctctactcacgttactgaataggggacccacctgcggtggcgtatgccataaacgcctccccgcctcgccgcccctgccctgtctccagcttattgttcatatcactgtagcatacgttatagtcatatttcttttgtaacctgagctgtgagtttctgtttttttcacacaataaataacaccacagtgaatctctctctctctctctctctctctctgtgtgtgtgtgtgtgtgtgtgtgtgtgtggttttttttcttcttttgaattgttcccaggaaccttccttgattctccacaagaaacacttcccagtcctatgtggtcctgttcccacaaattaacacatgtgaagatcaggtctatcagggctgctcctcagtgcccactctcttgcctcttcattataaagaatttttcctgctaatttatattacacagccccgctttttgcctctcacgatatattttttagatgttaaaaaattttaattctaaaataagccaaaacagaaaaatgaaaacaaaaaaagtaacagatatctttgtttctactgtgtaagttaaataggtgctaacatttttctctatttgcttaagattctttttttaaggaaataaaatattatagacgtagctaaagctcactctatttcttctccatcctactccctccagaggtatttactgtcacaaataagaagttggtgttttgtgcaatttgtatgtttttaatttttaccacatatgtatgcataaaatatatatgtattactgctttgtatgttttcagcagttatgtaaacagtctcatatatccatttgacatttcattgtgagtatgagatttcatagccttatgattttgagatttatctttgctgatacatggaagtcttgccctgtcattttaattgctgtgtagtattttattgtgggtggacctccgtttactcatttgccttctgagagatggccgggtggttcccctgttttgtcactcccactactgtgaacacccaggcgaacaatgtgcttgaggctctccagggtcacgcctggaaggggctgctgggtcctggggtgtgtgcatcttctgctttgcaggaccctggtgagctcccctccaggtggctgttccccttcccattccatgttctcttgagcacttggcggagactcccttttattggtgtgggtcttgctgcctttgaggcaggaggtagtagaggcttgggggcaactttggaaataggataggagggaaactttgagagcagacctgcgtggctcctttgtgccacctcagacttcctggctgtgcagacactggggccaaccttccgagagcgttcagagtctctgtggagggtagagaggagggtgcctccagctgcaggcggagcagcccctcactgaagtctggacccggtgctcagcgcagcttcacaggcgtctgtcctggcctcactcccttcatgggcaggtgcagggctgtatgagaagggccgggggcctggcttctgggctggctcctatagggacctgctgcctaacctgtggatagcccctttccacctggctgggccccgccttccctgtcagaaacacatggggtcacatgagtgatttgggtgaccgcttggctctacccatattggtcatccacttgatttttgcagttagcaagtggtctctgcttttcctaaccatggtctgctaggcttgagccttggggagccagcaggtggggtggaggtgggggacctgcccgcggggcagcaggggcctcgtgcgaggatgacttggctgtctccttcctgcagctgtgctcagtgagatggtctgtgctttcatgtagcttgagggagtcctcagatcccagggccgtctggccagtgcacatttatgccgacagagggaagcctaggttggtccttgtgggtcattcacaaaagccagaggcaaacgagtgctgctttgagatgagcatttttaagatccatgtaaccccgtccagtattgctgctatctgaagccatcattcagcctgggcatctactatgtgccaggtgctgtcctgggaacttgggtgtatcaatgaacagaagagacagaacaggtgaaaagtccctgccttgtagcgcttacatcctggcaggaagaggactagatgagctgttaaaatgtctcgtttgctgcctgggagacagtgaagtaggggttcataaaaggttaggtttcatttctttgttccatgaaaagcagatgaataaatcatatagtatgttagcaggtgagtacattataccgtgtgtcagcaggagaagaggaccaggagtatgggggtggttgcagtgttttttttttttttttgagatggagttgcactcttgccgcccaggctggagtgcagtggcgcgatctctgctgactgcaacctctgcctcctgggttcaagtgattctctggcctcagcctcccaagtagctagagttataggcatgtgccaccacgcccagctaatttttgtattttttagtagagacggggtttcaccacgttggccaggctagtctcaaactcctgacctcacgtgatccatccacctcggcctccgaaagttctgggattacaggtgtaagccaacacgcccggccagttgcagtttttaattggatgggcagggaagctgtcactaaaaggtgacattgagtgaagacctgaaggaaagaaggagctggctgggcagccctggggaggagcatctgggcagcaggtgtgaggggctgctgtgtcggaggctcagtgcagtgtggcctgggtgagcacagtggacatcagtgccagagctagcaggaggagggcagctcccagcctgcatcagagtgaggattccagctttgactgggtcagaggaggagggctctggcctccgtgtggagagtagaatgctggggagacccttaggaggccatcaccctggctctggggagagaggatggtgcttggcctggggaagctgtggtggtggtgggtggtggagggattctggatccatcaggaaagggccgctactaggttgggatgttgaggttttctccactagagtttatttatgcgtggacttgaagtatgtgacatcaagagggctacagaccacacgtttacctcttttgacagcgcttgggtttgtagtgagcaggctcagtgggagctgtgccccttaatgaaggagtcaaataggacaagtgaagcgagggcaacccttgtgcctgaaaggttgagtgtgttctggaatcggcgagacgtgggctgaaatctgggctttggccatcgacctagtcaccctgggcagggaccttcccctctctggccacgactgcctcctttccacggggcatggttatggtgaggatgagatgagctcatgtccatctacgttgctgcctgacatgtttcctttctttgtgatcccatgaagagcaggtgccagtgtgccatgtgcctgtcacgtgccatgcgcctggtgtgagccgcgtggccattgtgtgctgatgtgagccgtatgcctgatgtgagccctatgcctgttttatacagcatggtgctgcttagagaagtgccagatcctgaacatcgcctggtgggtgtaaccttttgaagttacaggaagggatttagttagaggctttagatgagacattaggtgaattaggtgagtaggttctgacgtcaggcggggaaatcagcgtgttgaactccccctggctgctggtgccgcacttggccttttaaacagtgtctcacccacaaaaggaggcgatggatgtgaatagggcatctacaattccgtctgcatgtttccttcctgcattttcccagtgccctagagctgtctgcagtattacctacttaacgtatattttaatttggctcctgtattagtccattttcacgctgctgataaagacatacccgagactgggtaatttatacaggaaaaaggagtttgttttttgagacagagtctcactctgtcccccaggctggagtacagtggcgcaatcttggctcactgcaatctcctccctccgagttcaagcgattctcctgccttagcctcccgagtagctgggattacaggtgcctgccaccacactcagctaatttttgtattttcttagtagagacggcgtttcaccctgttggccaggctggtctcaaactcctgactgcaggttatccacccgccttggcctcccaaagtgctgggattacaggtgtgagccactgcgcctggccaaggaaaaagggcattttaatggacttacagttccatgtggctggggaaatctcacaatcatagtggaaggcaaggaggagtgagtcatgtcttacatggatggcagcaggcaaaaaaataagagaaactcccgtcttttgtggtggtgttgttgttcagggaagcgggagctgtgcagggaaactcctccttacggaaccatcagatttcatgagacttactcactttcacaggaactgcacgggaaagacctgcccgcacgattcagttacctcccgcccagtccctcccacagcaggtgggaattcaagatgagatttggggagagacacagccaaaccatgtcaactcctttttcttcttcttttctccttagcccctcctgaggtagtatctgttgaagtcaaagttctaaagctttcttcttagtactttgcacaacagtataagcctgtaagtatctaagtggttggtccgtgtgcccacaggacgcccttttgcacccctctggatgtgtgtgtaccaatctcagcgagcactggatgagcggctttgtgaaacccaggagagcaggcagccttggaaagtggctgataaggtttggctgtgtctccacccaaatctcacctcaaattgtaatccccacgtgtcagaggaagggcctggtgggaggtgattggaccacaggggcgggacttcctccctgctcttctcgtgagagtcagtgagctctcaggagatctgctgtttgaaagtgtgtagcgcttcccccttctctctctctgtcctgctgcactatggtgagatgtgtcccttccgccgtgattgtgtgtttcctgaggcctccccagccaggcagaactgtgagtccatcaaacctcttttccttataaatcaccaagtcttgggtccttctttacagcagtgtgagaacaggctaatacagcagctgagcctgccctggggtcggagggttcgagcctggcagggctgtctggggatcatggctctcccccttgggctccagctgtgtccccaacccagagagccaggaaggaggtggggggccattcggaactggggctcaatgccagtttcaagagaggccggcccctagaggaagctgtgcacgagggtgaggtgcggaagatggggacgagcctcccggcccaggccaccttcctgcctgcgggacagaatctggctcagtgcctcctttgggtgttactcatggtaaaactgcagtgttctttggaggtcataggtcatgggatggttcccacacgaaaaaaggacaaatcgaggaatctggctaagaagccttcacggccctcccaccgctcggcttggtgaatacgtggactgtgaccgaccaccctcagatttcacagtgaaatcctggaacggccgttcgccctcttctcccatctcacctccttcttgtctttccctcgctgccatacctcttcccctcctttttggggtggaacacattattttgtagaaaaacggcttctactgtccggaaaatttagtattaaatgtcaaaaagcaaaacatgatttatagaaaaggtgaattagggaatgcttctacccactgtgcaaggattatttcaaaaaagttcactcagagtattctttagtgagtgccaaaaacagatggtgagtgactccgtgcatttgtaatgtttctctgtggagagacagaaattgggaccaggaggctggagcggcaggtggcgagtggcgccgggagtctgggactggctctctggctgtggctgtgggggctggatagaccgtgttaaagaaatcctggatttatgcttgtggaacccctcagcctgtgtcacggtgtctggaaggccatgtggccacattgtaacatcactgttggctggtcatgaacacacagagagtccagaggatagcacagacccctgctcacccccgcctctcctttggagctgccttgtggtttattcctcatcagcctggaggagtgtccggggctcaccccctctgcctctgctcactgctcattcctctcatttttcccctgagtcttgctctccctccagggacatggctccatcctgctggtttgccatagttcctcatggtcatcctggaaattcatctggaaggcccgtgtgtttgaaggtccacaaggtgccgtacctacaagacagacacactgtgtattgctgtgcttacacggtcttcgtctctgtatctgcttgccaaagaccctcttgccattggaggtgaggaagacacgagcagggtgaggggaagaagaacaggtctggccacacttggcacagagagggcactggatcctttgcgcaggtcttctttcttccagtcgtgacagccttgtcttcctggggaccgatgcttgattgttgctctgttaggagcgcctgagtcaaaagcaaattgagattttgaaagagagaaggggtttattttagccatttatcctcccttcattacaggcaagaaaaaacctggtgtaaacaccagtgtgctagatggagaaggaggcgaagagaataaatcagcaggtgtgtgtgtggttgtgttgtcttctgtattagaccatttttgcgttgctataaagagatatccgagattgtgtaatttattttaaaaagaggtgtaattggctcatggttctgcaggctgtagagaagggtggtgccagcgcctgcttctgcgggaggccttaggaagcttccggtcatggcggaaggtgatggggaagcaggcacatcacagggtgagagcaggggcaggagagagtggaggcgggtggaggtgccacacacttctttctacaaccagatctgccgtgaaccgcctgagcgagagctaactcacatccaaggagatggtgctaaccattcatgaaggacccgcccccatgattccgtacctcccaccaggccccagtccggcgttgcgaatcacactccaacatgagatttggaggagacacacatatcatcctctctgcctcttcccactcccacgtgaggcaaacacccgtagttccttcagctgccgctcaaattaaatggcttctggaccccttgcctccttgggacactctagaacaggtgtgtccagtcttttggcttccctgggccacactggaagaagatgaattgggccaggtgcagtggctcatgcctgtaatcccagcactttgggaggccgaggtgggccgaatcacttgcaggagttcaagaccaacctggccaatatggtgaaaccccatctctactaaaaatacaaaactagctgggcgtggtggtgcgtgcctgtaatcccagctactcaggaggctgaggcaggagaatcgcttgaacccgggaggcagagattgcagtgagccaaaatcacaccactgaacttccagcctgggtgacagagcgagactccgtctcaaaaaaaaaaannnnnnnnnnnnnnnnnnnnnnnnnnnnnnnnnnnnnnnnnnnnnnnnnnnnnnnnnnnnnnnnnnnnnnnnnnnnnnnnnnnnnnnnnnnnnnnnnnnnnnnnnnnnnnnnnnnnnnnnnnnnnnnnnnnnnnnnnnnnnnnnnnnnnnnnnnnnnnnnnnnnnnnnnnnnnnnnnnnnnnnnnnnnnnnnnnnnnnnnnnnnnnnnnnnnnnccttacaggcacgtgccaccacccccggctaattttgtatttttagtagagacgggggtttctccatgttggtcaggctggtcttgaactcccgacctcaggtgatccacccaccttggcctcccaaagtgctgggatcacaggcgtgagccaccgcacccggccgggagtgggtttttttttgttttttttttttttgagacagagtctcatgttgtatttgtcataatgatctaaagtttaaaaatttttaaatgaaacatgtttttttttttttttttttttttgagacagagtcttgctctgtcgcccaggctggagtgcagtggtgtgatcttggctcactgcacgctctgccccctgggttcacgccattttcctgcctcagcctcccgagtagctgggattacaggcgccctccaccacgcctggctaattttgtatttttagtagagacaggggtttctccatgttggtcagtctggtctcgaacagccgacctcaggtgatccacccaccttggcctcccaaagtgctgggattacaggcatgagccaccgcgcccggccgggagtggtttttaaatgaagattcctgtgcctgactgccgaccctgactcagaatctctgtgctcagtaccctggagtctgtgttttaataagtctccccagcaagagccatgtgtgcgtgcagcaaagctggagacccaggacccagagctgccctccttgcagcgagggtgaagcttgcaggcttgctggagacacgccgtcctgttgacatgtgacgtttcatcacctgctgtccagtgggccggtgtctttgtgttacatttgctcctaccctgccctggtcatatcaaggttttggatgactggaatagggcccatctctgctgacacaatggcaatcttgcaggagtcctagaacgttcattgcaggtctggttacctagaaactagtgatggttcagtaagcacgaggtggagatgagggtgaggaggtaacgattggacgtcgtgcagtgaggacagcgtggggaggaggggctgtcacttttgaactgtcagtaaagtaggttgtgagaatggatattggacatggctttagaaattagctgggcaggctgcttttcccctctcagctgtttgtggtgctgcctgacaaaattcaattactagtccatccaggacatcctgcagaagcgataatcgtcacatgagggaggggcccagcctgtggttctgtctttttctttccttgtaaaaactgcacgtccattatgactgttaccttttccatttaaagctaaccaaattcagagcatttaccacttacccttgcagacctttgttttcaaagtgagctcaagttattggtgggggcaacaggcagccactgatagtgtcttcaggacatgttagtgactaagaaaagagagatcaatagacctgtggctctacccgtctatcactcaattatctgtctgtcactccaggaaaacctcatttaaggaaacacctttgatataatttcagacataaattttagattcgggcatggctattctgaagtagtaatagagaagttattaagaataacttttaggcagacagttaaggtaaaggttctcggtggaaattttcttataataagaaacaacccccgaaccatctctttttttttttattatactttgagttctagggtacatgtgtacaacgtgcaggtttgttacatatgtatacatgtgccatgatggtgtgctgcacccattaactcgtcatttacattacgtgtatctcctaatgctatccttcccccttccccccaccccacgacaggccctggtgtgtgatgttccccttgctgtgtccaagtgttctcattgttcagttcccacctatgagtgagaacatgtggtgtttggttttctgtccttgcgatagtttgctgagagtgatggtttccagtgtcatccatgtccctacaaaggacgtgaactcatccttttttgtgtctgcatagtattccatggtgtatatgtgccacattttcttaatccagtctatcattgatgggcatttgggttgccgaaccatctcttttctaacagaaaaggcgtcttgaagggctgggccagcaagctttgatatgcgaatgccagccattagaaactgggttcactcaacatggcgattcccaccctgttcttgtcactgggtgtagcaagtgttatggccacctccagataacaccttgtgttcagaacatcatggcaccctacatttgcatattaaaagggctaaggtgggagggccaggtttttctgcgggctgtgtaaataacatacctggacaaatcaattccctgggccctatgcagatcagaccccacctcctccagcctcccatgtgaacccccgcttttccactgcactttgtttctccttgttccaaaccctatcccttgtctctgtacgggtgagctgttcccttctttcttccttctttcttgcctattaaacttttcgctccttaaaaccactcctcatgtgtccatgtcattgatcctgttggcgcaagaccaagaaccctggtgttgctccagtcatcaaagtcgtatcagtagtttgcaggttgggtgtaaaattgaggcaacagctcctactgacaaagagagtgattgtagcccgggtcttctgtctagcaggttaaaggtgagaaggaggcctgtgctccggaatgtttagagtaagtcctatgtggaagaaatctctctctttgggtgagggctgggatggagaagcacatgacatgcccgggggagatgctggggtcagaaggaactgctcagttcccaggtgctgcggggccacggggcaacattctgtgtctgaaacagttgtcccatcgcccctcctctctgcccctttatttgctcgttcctacctgcagcaagcatttacagagcctccactgcatgggaagcacttgactaagagctggatatgcagcaatgaatacgacagacaaggtcccgccctcatggtgccttacaggctggctgggagctggggagagatgggcagtaagtgactaaacactgaaaaatatgacatgtctggtgataagtattatggaggaaatgaatctggtcatgcaatagccaggactgatgggtacatgtgtgtgttgtgtgcatgtctgtgtatgttgtgtgcatgtgtgtgtgtgttgtgcgcatgtgtgtgtgtgttggtggtgagggtggtagctacttttttggtgagggaaaatctctggaggtgacgtttgaactgatacctgaatggctagaaggattcaggcagaaggttctgggggagggttctctgagcagagtagacagtgcataggccctggggtgttcaggtgtctggcatgggtgtaggaatgaaagactcctagtccgttagcagatttttcttcgcttctggaaatgcgccttcacattcttggtgcaggttaattggaaaacaatgttttgttttgttttcccagaaagtcatttttcctccagttcttgttggaattgctgacaagccttggggagagatcaataggtagtgtagctctgcccatccatcactcaatcatctgtctgttgctccaggaaaacttcctttaaggaaacacgtttgatacaatttcagacatgaaaatcaggacacagaatagctgtgccctaatttaaatcctgtggggcccatagtggggtctattgtgtccccaaccaccagcctcagagcctgtcattttgtttgcttgtcctccaagtgtatggataccagacatcacagggcacctgcccttgcttcaagaaggtgtgaacagctcctccttgggaatgtgccaagtaggtgtcggtcctgaaagacccgccctgcttcttcaggtcggccttggtgttctgccaggcttgacgaggcctgagagtgggagagtgggagaggccatttccaattgggaggcagatgtctttacttagtgacttttctgatacattaagacctcttccgttcagaattgtgtttgatctacctataggtttggagcgttttagtgactcttttttttatttgagatggagtcttgctctgttgcccaggcaggagtgcagtggcacaatctcagctcactgcaacctccgcctcccaggttcaagcgatcctcctgcctcagtcccccagtttatggttccttcaggaggtggattcagcattggcaggggcaccaggattgctggacttgggtagagtgtgcctgagctttgtgccaccaccttccctccaatagctgtgctgggggatggtctctggcggcgcatggggaggagatgggtgaacccttggcctccggccgacctgtggcgttgctgtctgtggccagaggagtggctgttcttcaaacaggccttgggatttccgggaaacctggcatctttccgtgcgtggggccagcccttgccacgtgccttcttggctcaggagtgtggctgcgacctgactcccagtggggccggccaagtgataaaattagttttctccaccaaatggagctaaaggcttggcctgagtttatgtccccagggagtgtttagaggagcggtggcctggctctcaggcatctcagtgccagcgagcacagggctgggtggcaaagacgcctgcttctgcctggcaccaggctctgccatgactgatggatgcttcagcctccctgcatcacaagtgttgagtttgctgtgcatggtagaatatgaggcaagcttcacctctttcccctcctccctacactgtccctttcgaaagagttgagcctttccaaggtcttttatatcacacagcactttctcggttacatattttagtttgaacaacaaagtactgtttgaggacacctttgcctgaaaagaaagctcagtcattactgaatttagatgcagaagtaattaaaaataaaagtaggcagagaaatttaacacagatttaatcatttctggggcaggatattcctggggtgggatattcctgaaggttagtgaatggctacaaatatatgattataggccggtgaagaaccctactttgagaaatgtcattaggtgattaaaaacaacacccaactgccctcatgatacgaacatgggttcttgtgggttggggtgacatttctgatgccaacattctacataaattcacagggaaccgtatccaacacatcctaaacagctggtgaggaggacgtgctctgggtggctcagcttgactctgggcttcataaaggcattgctgttgatgcacacgaagggtttgaagagaaattattttgtaagctgggtgtgggaaatagtattttatagtcaacaggatttttaagtatgtgtatgtaaacaaattaataaaacctacaaatcgtgatcagacttttttgtctacattcctaaaaatcatatattccaggttggcattaactattgttttgtgtcttctcattggctaattgccttcagtatggaagtcatcttatattcctggtttcccaggttgtatgttcttcttgcagctctcgaggtgggggacttgaaagggaggaggggaggtcgaaggggtggccttttctctcccccatccctctcatttcctctcttcactcttgctttgctgccccctgccgcactgccaggcatcagcccctggtctgggcaaaggaccccagagtatgacaggtgccagcccatccttgggaaggttagtttgcaaacctgttttagtctttgggaggcctgggtattttgattcacacttgcagggtctgtgatttgcctcttgctgcataaagtctattccatgaagcatactcatttatctttaagcagatttattatatgaaatattcatgggtgcaggcttggcagcacagcgtctggaacaatgtactgagtacagtttgtcctcagaagtctattcatgctgatgggatgcagttgtctcctgtgaagctttggggtgagatggggccagtagggagtgagctggctgaggatagctcttcatctcccttagtttggctgcagcagccctgctctgcgtgtatgcctgcgcagatccgttctttctcttcctgcttagtgaacacagaggccttcccttctgcgagaaccctcttgtcagcttccagcttcctgtgtaattcgaacggatagggatgatttggagggagggaaaagctggcttaggagtgaaaactgatctgtggggagaaggcatttcggggactgggaggaggtttggtgctaacacttaggagtaagcacagtgtggcaacccccgggctcaatgtgtgttccacatggccctgacagacaccacaggaagcatgtggtgacagtcctgtattacccacgaagaaactggggctcagagaggtttagttacttgcccaaagtgcagttcacttagtttagcaaacctgtatggatgtatgggtggcctgtcatgtggccagtggctggatacagggcacagagcagtcacggcctctgcctacgaggagtgccccatgcagccgatagagaaacagagccctgaaaagtgagtcagacagggtgagtggagcccccatgcgatgcagggtgttaggaagggcctggtgaattgtgggaggctgtgggaaggctggaggggaggattggaaaactggataggatcttaccaggcagatgggggctgggagaggtaattacagacggtgggaagagcaagtacaggcatgcaaggatgtaggtcatccaggtgtggccagtagacgggagactgcctggttcagtgctgcccagtcacacgaggcggggaggtcgggggacggggccagaaccactattgcagcggcttagaggccttgctagaggattcggactgtaactaagggagcgacgagtcgtcggaggtcttgaagccagggagagagaaaaacgaatttctctatttggaaaacaattctggaggtataacagaatggggcagtggggaaggtaggaggtagggaaacctgtcagagaggtcgcaggggcaggggtgagaggaagcggaggggtgtgggaatgagaaacataatttgagatttctgttggaaaatagcaggaactggtctggattctgtgtctggaaaaaagtattaaaaacaaacaaacaacaaacaaaccagtagccagaaaaggataaaggaaacggtaccttagaagagaagcatgaagacatttttaaaaaggcttttataatgaggcagaagatttaaagtgttacataaaacaagttttagggaatgaggaggaccaatgtggcataaaaggtttttatggttaggctggaggtggagcaaggtggccaaacagaagcctccaccaaccatcctcctcacaagaacaccaaatttgacaacgatctacaccaaaaaagcaccttcgtgggcactaaaaatcaggtgagcgatcacagtacctggttttaacttcatattaccgaaagaagcactgcagagggtaggaaagacagtcttgatcactgactccatccctgtggcggtggccacatggtgctcagagagaacctgtgtgacggggaaaggagagtgcagcagttgtgggactttgcattggaactcattgctgccagcagtgggtagaactcagccgatgcccacggagggagcatttagaccagcctagacagaggagaatcacccatctcagcagtcagaacttgagttccagcaagccttgttaccataggttaaagtgttctgggttctaaataaaccaggccacaaggactgcaacacccaggtgagtcctagtgctgtgctgggctcagagccagtggacttgggggttacatgacctaatgagacaccagccagggtggctcagggagcacttgcatcccctatcccccaaacccaggcagcgcagctcacagctccaaaagagaccccctccttctgttagaggagaggagagtaaagaggactttgtcatgcaacttgggtaccagctcagtcacggtaggataaggcaccaggcagagtcatgaggcccccattccatgccctagatcttagatgacatttctagacaccctgggccagaagggagcctactgccctgaagggaaggacccagtaatggcaggaatcatcacctgctgacgaaagagcccctggaccctgaataatcagcagtggtaaccaggtagtacataccatgggccttgggtgagactctgagacctgctggcttcagatgggatccagcacattcacagctgtggtggttaacgaggagagactccttctgcttgagtaaaggagagggaagaataaaggggactgtgtctcgcagcttagataccagctcagacatagggggagcaccaactgggcccttggggtccccagttccaggccttggctctgggatagcatttctggacctaccccaggccagaggggagctcactgccctgaagagagtcccaggactggcagcattcaccacaagctgactaaagagtccttgggcattaagtgaacattggtggcgctctggcagcactccccatgggcctgtggtggtactggacacagggagagagtcctctgcctggagaaagaggagggaagagtgggaaggactttatcttgtggttttgttgccagcttaaccgcagtagaatagagcaccaggcagatttctagggcttccgattgcaggccctggctcacagatagcatctctggacctgcctggggcccaagagaactcactgcccttaagggaaggacacaagcctggcagtctttgccacctgctaattgtagggccctagggccttgattgaacatagagagtagtcagctagtggttatagcaggcctcgggcaaaactcagtggtgtgctggcttcagatctgaccaagtgcagtcccagtggtgatagtgacaggggtgtcacccctccccaatctccaggcagcccagccaggtgtatatctctatgtctatgtctatgtctatgtctatgtctatgtctatgtctatgtctatgtctatatatttatagatatatagagagattgcattcatctgggagatagggaagagaacaagtaattcggagaattcttccagatgtgatctaagaccatcaaggtggtgcatctacaaatctgcaagaaccacggcattgctgggcttggtatgccccctaatgcagatacagctgcagtgaccaaaaacttagatcacaacacccacgtcctttgaatacctggaaagcctccccaagaaggatgagtacaaacaaacccagactgcaaagactacaataaatacctaactcttcaatggccagacacctacaaacatccactagcatcaagaccatccaggaaaataggacctcaccaagtgaactaaataaggcaccaggggccagtcttggagaaacagagatatgtgatctttcaaacagagaattgaaaatagctgttttgaggaaactcaaagaaattcaagatagcacagagaaggaattcagaatcctatcagataaatttaacaaacaaattgaaataattaaaaacagtcaagcagaaattctggagctgaaaaatgcaattgacttactgaagaatgcatcagaatctcctaatagtagaattaatcaagtagaagaatgaaatagtaaactttaagaggctatgtgaaaatacacagttagagctgggaggatggcttgagcctgggaggcagaggttgcagtgaggcaagattgccccactgcactccagcctggatgacagagccagaccctgtctcaaaaaaagaaagcaagagagcgagaaaagaaagcaagcaagaaagaacagtcagaggagacaaaagaaagagtaaaaaagaatgaagcttgcctacgagatctggaaaattgcctcaatggggcaaatctaagagttactggctttaaagaggaggtagagagagagacagcagtagaaagtttatttaaagggataataacagagaacttcccaaacctagagaaagatataaatattcaagtacaggaaggttatagaacaccaagcagatttagcccaaagacgtctacctcaaggcatttaataacaaactctcaaaagtcaagaataaagaaaggatcctaaaagtagcaagataaacaaatgacataaaatagagctccagtacgtctggcagcagactttttggtgagaaccttacaggccaggagagagtggcatgacatacttaaagtgttgaagggaaaaaacttaaatagcatatatggcaaaaatatccttcaggctgggtgcggtggctcatgcctgtaatccgagcactttgggaggctgaggcaggtggatcacttgaggtcaggagttcaagaccagcctggccaagatggtgaaaccccgtctttactaaaaatataaaaattagccaggcatggtggcagacgcctgtaatcccagctacttgggaggctgaggcaggacaatcgctttaatctgggaggcaagaggttgcagtgagctgagattgtgccactgcactccagcctgggcgacagagtgagactctgtctcaaaaaaaaaaaaaaaaaaaaaaaaaatccttcaaacatgaaggagaaataaagacttacccagacaaacaaaagcttgatggatttcatcaataccagacctatcgtacaagaaatgctggccagacgcagtggctcacgcctgtaatcccagcactttgggaggccgaggcaggcggatcacaaggtcaggagatcgagaccatcctggctaacatggtgaaaccccgtctctactaaaaaaaaaaaaaaattagctgggcgtagtggcgggcgtctgtagtcccagccacttgggaggctgaggcaggagaatggcatgaacctgggaggcggagcttgcagtgacccgagatcgcaccactgcactccatgctgggtgacagagtgagactccatctcaaacaaaacaaaacaaaacaaaaatgctaaagggatttatttagtctgaaataaaaggatgttaatgagcaataagaaatcatctgcaggtgaaaagttcactggtaatggtgcagagaaaaacacagactgttaaaacactataattgcaatgtgtatatttctgatatcttaagtacaaagatgaaaagataaaccaatcaaaaataataacttttcaagacagtacagcaagatgtaaatagaaacaacaaaaagttaaaaagtggggagatgaagttatagagtttttattagttttctttttgcttgttttttagtatgtttgtttatgtaatcagtgttaatttgtcatcagtttaaaataatgtgttataaaatattatttgcaaatctcatggcaacctcaagtctaaaaacatacaatggatatgaaaaagtaaaaagcatgaaaataaaacataacaccagagaaaatcacctttactaaaagggaagaccagaaaacagctagaaaacaaataacaaaatggcaggagtaagtccttacttaatcaataataacattgaatgtaaatggagtaaactctccaatcaaaagacaaagagtgaatgaatagattttttttaagacccaatgatctattgcctacaggaaacacacttcatttataaaaacacacatagactgaaaataaaggtatggcaaaagatatttcatgccaacggaaaccaaaaaggagcagaagtagctatacttatatcagataaatcgatttcaagaaaaaaatataaaaagagacaagtttgttgtataatgataaaggggtcaattcagcataaggatataacagttatatatgcatccaacactagtgcactcagatatataaagcaaatattatcagagtgaaagatggagatagaccccaatacaatgatagctggagacctcaacaccccactttcagcattggacagatcatccagacagaaaatcaacaaagaaacatcagacttaatctgcaccatagacgaaatggacctaatagatacttacagaacatttcattccatagttgcagaatacacattcttctgctcagcacatggatcattctcaaggatagaccatatgctaggttgcaaaacaaatcttaaaacattccaaaaaactgaaataatatcaagtatcttctctgactacaatggaataaaactagaaattaataacaggaattttggaaactatacaaacacatggaaactgaacaatatgcctctgaatgaccagttggtcaatgaagaggttaagaaagaaattgaaaaatttcttgaaacaaatgataatagaaacacaacataccaaaacctatgaaatacagcaaagcagtactaagagaagtttatggctataaatgcctacatcaaaaaagaagaaaaagttcaaataaaccacctaatgatgcgtcttagaactagaaaagcaacagcaaaccaaacccaaagttagtggaagaaaagaagtaataaaaattagagcagaaatacatgaaattgaaacagagtaaacaatacaaaagatcaatgaaatgaaaagtttttttttggtattttgaaaagataaaattgacaaacctttagccagactaagaaaaaaaagagagaagacccaaataaataaaatcagagatgaaaaaggagatattacaactcatactgcataaattcaaaggatcattagtggctactgtgaacaactatataccaataaattggaaaacctagaagaaatggataagtttctagacacatacaacctactaagatagaatcatgaagaaatccaaaatctgaacagaccaataacaagtaattagatcaaagccataataagtctcctagcaaagaaaagccaaggatgcaatggcttctctgctaagttctaccatttaaagaagaagtaataccaaccctactcaaactattctgaaaaataggggaggagggaatacttccaaactcattttatgaggccagaattaccctgataccaaaaaccagacagacacatcagtaaaagaaaactataggctagtatccctgatgaacactgatgcaaaaattctcaacaaaatgctaacaaaccaaagtcagcagtacatttaaaaaaaaaaaaaaatcattcatcatgaccaagtggaatttatcccaaggatacaagaatggttcaacgttcacaaaccaatcagtgtgatacatcatatcaactaaatgaagggcaaaaaccatatgatcatttcagttgatgctgaaaaagcatttgataaaattcaacatcacttcatgataaaaatcctcaaaaaactgagtatagagggaacatacctcaatataataaaagccatatgcaacaggcccacagcaaataatcatactgaatggggaaaaactgaaagcctttcctctaagatctgaaataacaaggatgcccactatgttgaatagcaacatagtactggaaatcctagctagagcaatcagacaagagaacgacataaagcctatccaaatgggaaaggaagaagtcaaattacacttgtttgcagatgatatgacctcctatttggaaaaacctaaagactccaccaaaaaacaaaacaaaaaatgtattgattagaactaatcaatacatttagtaaagttgcagaatacaaattcaacatacaaaaatcattagcatttctatatgccaacagtgaacaatctgaaaaagaaatcaagaaagtaattccatttataattgctacaaataaaatacctagggattaaccaaacaagtgaaagctctctaggatgaaaacaataaaacactgatgcaagaaactgaagaggacaccaagaaatggaaagataagccatattcatggattggaagaaccaatattgttaaactttccatactacccaaagcaatctacagattcaatgcaatcccaatcaaaataccaatgacattcttcacagaaataggaaaaaaatcctaaaatttatatggaaccacaaaagacccagaatagccaaagctatcttgagcagaaagaataaaactggaggaattacatgatgtgacttcaagttatactacagagttatagtaaccaaaacagcatggttctggcataaaaacagacacgtagaccaatgcaacagaatagagaacccaggaataaatccatacatctacaatgaactcatatttgacaatggttccaagaacatacactggggaaaggacaatctctttaataaatgaagctgggaaaactggataaccttatgcagaagaatgcatctagacctctctctcttgccatataaaaaaacaaagtggattaaagacttaaatctaagaccacaaattatgacactaccaaaagaaaacattgggggaaactctccaggacattggacttggcaaagatttcttgcgtgatacaccacaggcataggcaatcaaagtgaaaatggacaaatgggatcacatccagttgaaaagcttctgcacagtgaaggaaacaatcagcaaagtgaagagagagcccagagaatgggagaaaatatttgtaaactgtctatctgacaagggattaataaccagattatataaggggctcaaacaaccctgtaggaaaaaaatttaataatctaattaaaaattgggcaaaatatctgaatagatgtttctccagagaagacatacaaatggcaaacatgtatatgaaaaggtgctcaacatcattgatcatcagaaaaatgcaaatcaaacctacaatgagatatcatctcactccagttcaaatggtttttctccaaaagacaggcagtaacaaatgctggtgaggatgtagagaaaagggaaccttcatatactgttggtgtgaattagtacaatcactatggagaacagattggcggttcctcaaaaaactgaaaatagagctagcatatgatcctgcaatcccactgctagatatatacccaaaagaaaggaattaagtatatcgaagacatatctgcacccccatgtttattgcagcactattcacaatagctgggatttggaagcagcctaaggttccatcagctgatgaatggaaaaagaaaacagtacatatacaaaatggagtactattcagccataaataagaatgagatcctgtcatttgcaacaacagtgatggaaccggagatcgttttgttaagtggcataagccaggcacagaaagacaaactttgcatgttcttatttgtgggaggtagaaattaaaacagttaaactcgtggagatggagattagaatgatggttatcagaggctgggaaaagtagtggagtgagttgggggaggaggagatggttaatggatacaaaaaatattggcaaagggtgagtaagacctagtatttgctagcacaataggatgactacagtaaaaagtagtttaattacacattttcaaataactaaaataattggattgtttgtaacacaaaggataaatgcttgaggtgatggatacctcatttaccttgatatgattattatgcattgtatgcttgtatgaaaatatctcatatactccataaatatatatacatactctatccacaaaaattaaaaataaaaaaatagtaacaaagtttttctaaatttaatagtgttttagaaattaaaagagacccaagaataaaaggaaaggtgaactaagagagatataggttaaaaagaaatataagagaaataagctatgtaagagatacaggccgggcgcggtggctcatacctgtaatccaacactttgggaggctgaggtgggtggatcacctgaggtcaggagttcgagaccagcctagccaacatggtgaaaccctgtctctactaaaagtagaagaattagccaggcatggtggtgggcgcctgtaatcccagctatttgggaggctcaggcaggagaatcacttgaacctgggaagcagaggttacagtgagccgagatcacgccactgcactccagcctgggcaacaagagtgaaactctgtctcgaaaaaaaaaaagagatacatatagaagaaataagggaaataggccgggtgtggtggatcatgcctgtaatcccagcactttgggaggccgaggcgggcgcatcacgaggtcaggagatcgagaccatcctggctaacatggtgaaaccccatctctactaaaaatacaaaaaattagctgggggtggtggcgggcgtctgtagtcccagatacttgggaggctgaggcaggagaatcgcttgaacccgggaggcggtgtcagtgagcccagattgcacccctgtactccagcctcggttgacagagtgagactccatctcaaaaaaaaaaaaaaaaaaaaaagtgaaatataggccaaaagcagaaccaacagtagggaagagcagacggtggtttacagggccacgaccaccgatggctctggaagtgcaggtagtgcaggcagcaccctgagactggaagggcaggtggagggaaaggggaaaggtgagtgatggagtggagcccgcctattggagagcttcaagggcaccacttgccactgtctggcagggcaagtgacagtgtaaacagggcagtcaggggttcacgtggctttgccttttgctgctggcacctgttcaggtgggctcttcggagttgatgaggtggtgattgagcagctaggatgcagtgtggcaggcttgtcctgtcacataccagagaagatggtggcgggaggtggcgcttgcagaactcttaggagcactgaggaagaaggtggaggaacacccagccttctggcttgagtgcctcctgtgtgtcgtagaaggatctagatcctgtgggggcacatggaacaacaggaaaaacttgcaagacctgtgggaccagtacatggtcatctggtatcacatgtgaagctggggctgcgcatgggccatacttctcatcttctggagtagagttagacaaggaaacccaactcaggatcgcgttagtactcttgtctgctctaatcgcgggttgagctgatgtcttcatcctttgttggttgctgttaaggaatgaggatgcgtttatggtggaaagagtgtggggctgagaatctggaggccagggtcaagttctgactctgcatttattatctgtgtgacttgctgcaagtgtaacctgtctgagtgtctgcgtccttatttgtaatttggaggctataatagtgatgtctgcctcacagaagccctaggttgtcgtggggatcagtgtgggtatgtgagagtgtttcataaattgcaaagctctgccgtagctgattatacctctggacttctaagtgctttgaggaaagtgtacctggttattccttatacttctcacagtgcctccagagtgtcagtgatactcaagaaatgctagttgagtgtgagtttactgcagcacagagcagtttccgggttccattttccagtggccagaccctctccttgttcacactgttggatgagggaggtagagctggagcatcggactggcctatggaacagatgcagtggccaccaggaggtggcgatgcctggagcagtgttagccatgcaatgtgatgaggatcacacactctcacgtggtttccagtcgctgggcacagagctaccttcaggggggcccagcttcatgttcaaaagcaggaagcagactaggggctgtttccatttcctgtcctcccacttctcttccactgcacagcccgtacatgcatgcctgcatgccacccctcacacagtgtccccatctccttagtgcggcctcaattctgactcctggttgtttctcgtttccttaactctccgttgctacccctagccccatcccctgcttgtggaccctggagaggcactgtctgcctctgcctctgtgggcccaggtgcttgttgggtgttgagcttgcagtgagaactggtttgctgagccttggttttttttgcacctgctgcaggtcatcttccacgatgttgctgtgctgacggataagctcttccccatcgtggaggccatgcagaagcacttcagtgctggcttgggaacctactacagtgactccatcttcttcctctcggtcgccatgcatcagatcatgcccaaaggtaacctgggcttccaggagcaatagcccctgggtgtctgacttttgcatccatttccctggttccaacactgcccaggccctgtatcagggagaatagctccactgaacatgaaagagtggacgagggagccagaccaagccctttgtaccaccgagcttcctacaccaagaatcaagggcagggccttggttgcatagctcccggggtccatttatgaggacacagggggtctctgggctctggtctggactctgccccttgcactcgcccccttctttccccactgctcaacccccatactttgtttgctcatctgaaaaatggtgggttggattagatgatcctccatccaaatttatgctcttgttctttctagtttgaatctgtatttatctgattttaaaatagcaaatctagatgtgagaggtgcaaattacgaccatgtagaacttctgaagaaactctgatgcgcaattagaaggattttctgggcgtctgtctccaggaaagagagatgcatcatccagtgtgtgataggtccagcttatgtggaatttctggcaggtctggtcatgcttggactggaagccttggagggtctaactcctagagtgtgtctggtttctaggatctccctacagtgatccttaatgggttctggagccctggatattgaccagtgtattaatctgttctcacgctgttcataaagacatacctgagactgggtgatttataaaggaaagaggtttaatagacagttcagcatggctggggaggcctcaggaaacttacagtcatggaaggggaagcaaatacgtccttcttcacatgccgacaccaaggagaagtgccaaggaaaagggggaaaagccccttataaaaccgttggatctcagagaactcactcactagcatgagaacagcatgaggataactgccccccatgattaaattaccccccaccaggtcccccccaccacatgtggggattatgggaactacaattcaagatgagatttgggtggggacacagccaaaccatatcaaccagtttctggccatggtgaaccatgtcctgagcctcttaatggtgagaaggggtgtttggggccttagggtagcagttatctgaactgtggctggatgagttttccagcagtttccagaccaggcaggtcctggtagcccaggggacagtgggccatatggtggaggcctgctcctccagcccagcagaccagaagtgaaaaagaaggtgcttggtgaaccagagactcaggagttgagagttgaagctcggttcctgttgggaggttgtcctgccacagggaaaagcaagcccatccattctggctgggactttgcaggcaagttccagcactctggaggcctctgagtgtcctctttgttgtgaggcaagggctcagggggctccactgggcaggagtctgaagaagagaggagacgagctcaccgacagggcctagggtgaagatctagcattggtgagcctttgcagtgacccaggtgcagctctgtcagctcaccaacccttctacccatcctgtggggttacaggtgaagctgaggagttgcaagacctgcccagggttatacagccttttaagtggcagagccagggttggaagctgcttctccaaatagttacttctaccccatcaggtgccccatacatgacctctctggacagcccagtacaggagctgtgggtggctcagacttgagaaggacgtggttctgttctagattctagagggcagacagatggaggtgttgctcacagctccgccattagccacgtatgtgcctagggctgagccactttgtctctcttggcctcaccagtttccccacctgtgaaatgaggggctgcggcagtgagctgtttcaacttgcattctgaagagcccagggcttgcaggaatccccgctaggggtttctgtagttctagggagccagggggaggcacgcctgccctcccttcacctccctccctcctgcctctttccctctgtcagctgtcaggttcctgcccattgcgtgctcaactctgggctgggttatgctgtggagtacccagcaggaggtgaaatacagctcctcgtggtttgtcagggaagagaaaattcttctgcctccagctataggacagccaggcaatgaattgtgcagggaccgatgacaagagttagggagctcctaagctctgggagagggtgagaattatgccaggaaggtgctctggccctctctgacttagccctgtccaagagcctggcatagctcaggggggcagtgatgtctgcagagaaaaggctctggctagagctttgcagtcgatgcagtaaatggacgcatcattggtgtccctccaggtgtgggccccaccctctgaggggcatgcatcaggaggtggggaaggagttattttagatgtgcctccagccgacccaaacacacagtcttttcaggggttcttcaggggagtgataatgtgcttccagcaattcttttttatttttaggcggagttttgctcttgttgcccaggttggagtgcagtggtttagcaatctcggctcactgcaacctctgcctcctgggttcaagcgagtctcctgcctcagcctctcgagtagctgggattacaggcatgtgccaccacgcctggctagttttgtatttttagtagagacggagtttctccatgttggtcaggctggtctcaaactcctgacctcagatgatccgcccgcctcggcctcccaaagtgctgggattacaggcatgagccaccgcgcccggcagcaattcatttttacatgtgccccaaagccttttcctaagaaaacagttattaggagttactaaaatttgatagtcataaaataaaatgagcggtccttgagtttcctgtggcgtctggggtgtgtcctgccaggaagtctggcctggcacacttggcagcactggggagttcctaccgagatcatttggaattcctgcagtttttggaaggacactctgttttcagacatcattcgtgctgtcttgagtttgtcatgattcttaactgctgccttttttgcattcattgttttttaatcatagaaatgagtgttgttttgtgctttggttgatggttttgttgtcatgtaattgctgcattcttgttacattggctattctgtttctttcatagcattcgtttttctccaggaaagtgagagtggagtatgggtggagcctgaacccttggtctcacccaggagggctgggtcagaaaagcctgtgctcctctgagttcctcctggaggtcctgtctagtgtttgccccagaaatccaaattctttttctgtgtttaaagctctcctcccgccttcccttctgtagcatgagggtcatccttctgtacctaaactatttttaaaatgtgcttactttttttttgagacagagtctcactctcgcccaggctggagtgcagtggcacaacctcggctcactgcaacctctgcttcccgggttcaagcaattctcctgcctcagcctcccaagtagatgagattacaggcacccgccaccatgtccggctaattttttttttttttgtatttttagtagagatggggtttcaccatattggccaggctggtttcgaactcctgaccttacgtgatctgcccgctttggcctcccaaagtgctaggattacaggtgtgagccactgcacctggccatcattactgattctttatcttctttatattcccaacatgtagctttttaaacatttaggcaaagtaggagttatcctatatatcaaatcattctgagtctttttttatagatgaagatttgaagttgaatcttcatttcaacccccatgaaagaaattgtacaaatgaagctatgtcatgattttttcagttaatggctcacgtccccattttctgtgtaattatagtctttgaaaattttttgaatggttttattgagtagatgaacctccgttcactttctcatttccctgttctcagctagctagctgctttctatattttctagtattgtaaattatacgatggatatccacatgcatacagattattttctctcattaggattcttccctatgatagctcccaagggtagcattactgggccagaggtgacccttataaggccagggtgtgtcaacccccagccgcccagggttgtcgactcacacaggtgagcttctgtatagtttgaagcctactggtgtctgtacagttctaagcctgttagtgtctgacctctcacatgggccacctcaggcagccacttaagagcttcgagacagtggctgtccccactggacaggaaaggaaagggaggagctgagaggttaggccgcttctccgagttctccagcgatctgtgtcctccttgccctgggagttctcagtccggagcttatgcccattctgatgtccagatgtggacacccagcctcttacacatgcccagccctgtgaaacttacaggacttggcatccttgcctgtcttctgggccccatgtcgcagccccacagaggggacctggctgggatagggttgggctggtcaaacccatgagttttgccctgatcgcccccttggagcaggagcgcccagaaccacatctgagcaagggcctcaggaagaacgaaggggtcctgccaggcgggacatgctggctctgactttggtcagagcttgtttttctcttccttgcttgttggggattcacatgcggctggtctcgctgctcatgcttgcctgcctgtgtgccctccacagacacagccactctctgctcttcacccacatccacggggcttttatttccatttgtctgtggtgttgggtttgtcgccactggaagcatcttatgcaatggaaaaaaaaaaacattttttgccgcactggagctggagggagccaagggcaactcctccaggactgccagcttccccctcctgggtcacatggcctgaggcgctgctggctccagctcagcagtatgggctgtgctagggcgcatgctctgtggttgtgggttctccctgagcagggcaggcaggcctccagacaagcagcagggctctaggctggccagaggcccccaggagactctcctgtcatcccccatgcacccctggaaggctctcctgtcctgcagtcaatcctttgtcaatacccagcctatgctaagcgctactgtttgcaagacatggtgctggccaccctgggtgtctcagagatgtttgctgggctgctgcttcatgggctcatgtcagtggggcaggtggcatggtccagcaatgagggcaggcaacatgaagagccacccaatgctgagggcttcagaagaggacaggtcacaggcatttgcaggaagaaggaagccttcctggaggaggtggctgtgaaattttctccaacttgccttgtttttgatgaccttgacagttttgagaaataccggtcagctgttttatagagtgtttcccaattaggatttatctgatgtttttctcatcattagactgaggttacgggtttttgggaggttatgggaggaatgccgtggaggagaagagctgtttccctcacatcatatcagtgacacaccacattctatcaagggtacatggtttatcactgttgctgttgacctcgatcactgggctgaagtcgtgtttgtcaggtttctccactgtaaattattcttttcccccttgccatactatattctttggagggaagtcactctatgtcatccatgcttaaagaatgtggatagtcacttttcaaaggtcacatgtcccttgcttggaccccatcacacacaacctgctggtagtgtctgcctcctgacaggtgccactggccatgggctgtgggagcccagaggcttcgaaggaccccttcagcatttcatgcgataggctccattcattgtactgctcggggctgtgagtggctgcgtctgatcgtctcttaatgtccagtgtagggagcactgaggcaggcaggtctgagcaggctgaaagggggattggtgtatcagagagagtaggagtccaggctcaggatcggacagagctgagtgcagattgcaacactgtgactcccaaggtcaaggcttcgtgatcttgggaggttatttaaaagaggccctatggtgtcgtggttaagagcatgggcccggccgggcgaggtggctcacgcctgtaatcccagcactttgggagaccgaggcgggcggatcatctgaggtcaggagttcgataccagcctggccaacatggtgaaaccccatttctactaaaaatacaaaaaaattagccaggtgtggtgatgggcgcctgtagtcccagctacttgggaggctgaggcgggagaatcgcttgaacccaggaggcggaggttgcagtgagcctagatagcaccactgtactccagccggggtaacagtgtaatagagtgagactctgtctcaaacaacagaaaaagtaatgctgccaaaaatgcttcatatatccgccccagcctcccctccccccagctcccagcatcagggtttctgaaatctccataacatttagcatgtgattattgccaccatcagccccagcctgctcgtttcctgcggagatctatgggagtggataaaagaccagacaaatgcaagctgttataaaatccctcaaaaggtaggatttgggcccgagcctctgcccgaatctcttgaagcctagtgtgacgcttgccattgtagaaaagaacagcaaagccagctggcaacaaattggggtggccccatccagctctcctggcctcctgagtgttatcacccctgagagtccttatttcagtgtctgtcatgggggccttactgtcttgaggctgcaggcagatggttggtctctttcaaggacattcttgggtccactttgggtcagtgctgctgggtggcaaaggctggtgtaagattcaggtagttgacactggatgcttcttagcctaggttcacaggcctgcatgagaaagaactgaggcagggccagaatgcctgcaggcttggggcaaaacccacatgggaaattctagaccagcagctccttccctccctccttcccttcctcattccttcttcccttcctgcctgcctgccctgaaacactgaggtcagtgtgtgtgtggccttttgcagaaagcctttaaaataccatcttttcttttttccttaagtaaaatttgacaaatgtagtaaaagccatattgagttttcatttatttgttctgtactttttgtacttttactcactgccatgggaggtctgtaagttttagggtacatgtgcacattgtgcaggttagttacatatgtatacatgtgccatgctggtgcgctgcacccactaactcgtcatctagcattaggtatatctcccaatgctatccctcccccctcccaccaccccacaacagtccccagagtgtgatattccccttcctgtgtccatgtgatctcattgttcagttcccacctatgagtgagaatatgctgtgtttggttttttgttcttgtgatagtttactgagaatgatgatttccaatttcatccatgtccctacaaaggacattaactcatcattttttatggctgcatagtattccatggtgtatatgtgccacattttcttaatccagtctatcattgttggacatttgggttggttccaagtctttgctattgtgaataatgccgcaataaacatacgggtgcgtgtgtctttatagcagcatgatttatagtcctttgggtatatacccagtaatgggatggctgggtcaaatggtatttccagttctagatccctgaggaatcgccacactgacttccacaatggttgaactagtttacagtcccaccaacagtgtaaaagtgttcctatttctccacatcctctccagcacctgttgtttcctgactttttaatgattgccattcgaaccggtgtgagatggtatctcattgtggttttgatttgcatttctctgatggccagtgatgatgagcattttttcatgtgttttttggctgcataaatgtcttcttttgagaagtgtctgttcatgtccttcgcccactttttgatggggttgtttgtttttttcttgtaaatttgtttgagttcattgtagattctggatattagccctttgtcggatgagttggttgcgaaaattttctcccattctgtaggttgcctgttcactctgatggtagtttcttttgctgtgcagaagctctttagtttaattagatcccatttgtcaattttgtcttttgttgccattgcttttggtgttttagacatgaagtccttgcccatgcctatgtcctgaatggtaatgcctaggttttcttctagggtttttatggttttaggtctaacgtttaagtctttaatccatcttgaattgatttttgtataaggtgtaaggaagggatccagtttcagctttctacatatggctagccagttttcccagcaccatttattaaatagggaatccgttcctcattacttgtttttgtcaggtttgtcaaagatcagatagttgtagacatgcggcgttatttctgagggctctgttctgttccgttggcctatatctctgttttggtaccagtaccatgctgttttggttactgtagccttgtaatatagtttgaagtcaggtagtgtgatgcctccagctttgttcttttggcttaggattgacttggcgatgcgggctcttttttggttccatatgaactttaaagtagttttttccaattctgtgaagaaagtcattggtagcttgatggggatggcattgaatctgtaaattaccttgggcagtatggctattttcatgatattgattcttcctacccatgagcatggcatgttcttccatttgtttgtatcctcttttatttccttgagcagtggtttgtagttctccttgaagaggtccttcacatcccttgtaagttggattcctaggtattttattctctttgaagcaattgtgaatgggagttcactcatgatttggctctctgtttgtctgttgttggtgtataagaatgcttgtgatttttgtacattgattttgtatcctgagactttgctgaagttgcttatcagcttaaggagattttgggctgagacaatggggttttctagatatacaatcatgtcgtctgcaaacagggacaatttgacttcctcttttcctaattgaataccctttatttccttctcctgcctaattgccctggccagaacttccaacactatgttgaataggagtggtgagagagggcatccctgtcttgtgccagttttcaaagggaatgcttccagtttttgcccattcagtatgatattggctgtgggtttgtcatagatagctcttattattttgaaatacatcccatcaatacctaatttattgagagtttttagcatgaagggttgttgaattttatcaaaggcttttctgcatctattgagannnnnnnnnnnnnnnnnnnnnnnnnnnnnnnnnnnnnnnnnnnnnnnnnnnnnnnnnnnnnnnnnnnnnnnnnnnnnnnnnnnnnnnnnnnnnnnnnnnnnnnnnnnnnnnnnnnnnnnnnnnnnnnnnnnnnnnnnnnnnnnnnnnnnnnnnctggattacatttattgatttgcgtatattgaacccagccttgcatcccagggatgaagcccacttgatcatggtggataagctttttgatgtgctgctggattcgttttgccagtattttattgaggatttttgcatcaatgttcatcaaggatattggtctaaaattttttttttttttgttgtgtctctgcctggctttggtatcagaatgatgctggcctcataaaatgagttagggaggattccctctttttctattgattggaatagtttcagaaggaatggtaccagttcctccttgtacctctggtagaattcggctgtgaatccatctggtgctggactctttttgattggtaagctattgattattgccacaatttcagctgcctgttattggtctattcagagattcaacttcttcctggtttagtcttgggagagtgtatgtgtcgaggaatttatccatttcttctagattttctagtttatttgcgtagaggtgtttgtagtattcccctgatggtagtttgtatttctgtgggatcggtggtgatatcccctttatcattttttattgcgtctatttgattcttctctctttttttctttattagtcttgctagtggtctatcaattttgttgatcctttcaaaaaaccagctcctggattcattaattttttgaagggttttttgtgtctctatttccttcagttctgctctgattttagttatttcttgccttctgctagcttttgaatgtgtttgctcttgcttttctagttctttcaattgtgatgttagggtgtcaattttggatctttcctgctttctcttgtgggcacttagtgctataaatgtccctctacacactgctttgaatgtgtcccagagattctggtatgttctcgttggtttcaaagaacatctttatttctgccttcatttcgttatgtacccagtagtcattcaggagcaggttgttcagtttccatgtagttgagcggttttgagtgagattcttaatcctgagttctagtttgattgcactgtggtctgagagatagtttgttataatttctgttcttttacatttgctgaggagagctttacttcccagtatgtggtcaagtttggaatagatgtggtgtggtgctgaaaaaaatgtatattctgttgatttggggtggagagttctgtagatgtctattaggtccgcttggtgcagagctgagttcaattcgtgggtatccttgttgactttctgtctctttgatctgtctaatgttgacagtggggtgttaaagtctcccattattaatgtttgggagtctaagtctctttgtaggtcactcaggacttgctttatgaatcttggtgctcctgtattgggtgcatatatatttaggatagttagctcttcttgttgaattgatccctttaccattatgtaatggccttctttgtctcttttgatctttgttggtttaaagtctgttttatcagagactaggattgcaacccctgcctttttttgttttccattggcttggtagatcttcctccatccttttattttgagcctatgtgtgtctctgcacgtgagatgggtttcctgaatacagcacactgatgggtcttgactctttatccaatttgccagtctgtgtcttttaattggagcatttagtccatttacatttaaagttaatattgttatgtgtgaatttgatcctgtcattatgatgttagctggttattttgctcgttagttgatggagtttcttcctagtctcgatggtctttacattttggcatgattttgcagcggctggtaccggttgttcctttccatgtttagtgcttccttcaggaactcttttagggcaggcctggtggtgacaaaatctctcagcatttgcttgtctgtaaagtattttatttctccttcacttatgaagcttagtttggctggatatgaaattctgggttgaaaattcttttctttaagaatgttgaatattggcccccactctcttctggcttgtagggtttctgccgagagatccgctgttagtctgatgggcttccctttgagggtaacccgacctttctctctggctgcccttaacattttttccaaaaatatggaacgcttcacgaatttgcatgtcatccttgcgcaggggccatgctaatcttctctgtatcgttccaattttagtatatgtgctgccgaagcgagcaccagtaatcaatgtttaattagccgtcatgaggcagacatgtttctaaggggagggttcctgcagggggatgtgcgtgcgttctggaacctggggtacagtggataaggattggagattccagggcagcctgttctctgcccctgctccatcagcctcagtaccaggagaaagcagacacaagggcgccactgcccccctacgattgtggatgccgtatgtagatggttttccagcctctgagatcctgactgaaaggggctgacggtgcatgctggttcccatagttagccctgtggcccctgcttgcttcagaaagaagtggtctgaggattgacgggggtgggggctggtttaggatggacatgggtggggtcagcaggcctgggagtgaggtctcactctgccctttagtatcctggttggctgatgcagggaagagggagagcctcctccctccctgattctgccccataggagggtggaatagaatgtgattccaggaccctgttgactagtgagcatggtcccatgcacagagggggctttccttctttctggaattttcttcttagccctgaggcaggagaagtgaactgtaacggggctgacctctgcagaggaggggaagggacactgctttctgctgtcttctctacccctcaggcaaacggggctggaggagtctaaggtcttgctcagactttgagcctaagccacattctctaacctggtttaccagagagttctgcattccaccccagtgatgcaggtaacagtggcttttgaatctcccacctgcgatggctcctaatgttttgctttcagaaaccaaaatcacatctggtattgcctaaacccctcgtgactcctaacacagatcttgagtgaaaacctgccttctctgagcagcattctttgtctgtaaaatgggaatagtgaccatgtaggcctcaccggggtggtggggaggactggctgagatactgtgtgaaaagttccagggcctgataccgagagatgcttggtaagtgttagatagtattagtacttttccctttggagcaaaccaaaagctctgataggtactgcagtaaaaaacatttagctttgtgtaaccaacatcgcttacacacgattgaccacagaatgcctttttgaggaatacctattcacattctgagagcgggttttccacagtactcactttaagaaatgctgccctcgccgggcgtggtggctcacgcctgtaatcccagcactttgggaggctgaggcaggtggatcacctgaggttgggagtttgagactagcccgaccaacatggagaaaccccatctctactaaaaatacaaaattagctgggcatggtggcgcatgcctgtaatcccagctactcgggaggctgaggcaggagaatcacttgaacccaggaagtggaggttgcggtgagccaagattgtgccattgtgctccaccctgggcaacaagagcgaagctccgtctcaaaaaaaaaaaaaaaaaagaaagaaagaagtgctgccctcagattagcgtaataaataacacttgtgtagctctctgttgggatgcggatgtgggcaggaaagcctcaccttccagccaaagctacctcatatcagccagcctttcctgtcccctgccaatagagcatgtcgttgggtgtgccattttaattattcacttacttggttgtacttccagatttgaaatagctttgggtttgccttggacccagagggattgggaggactttccgtggatcatgaattgtggtgggggccccggggatggagttgttgaagaggaggtgtgggtctggcggcataccatgggtggagcgccctcgcggcactgaccaacaagtggcttcagaggatctcaacccagagggtgactgagggttctcaacatcaaccctcaagggaactgggcctaaacgccttagaacagcagtcctcagcctttgtggcaccagtgactggtttcacagaagacagtttttcagtggaccgaggggtggttgggggctggttttgggatgaaacggttccacctcagatcatcaggcattcgtcagagtctcataaggagcatgcagcctagatccctcgcatgcgcagttcacagtagggtttgtgtttctttgagaatctgatgctgctgatctgacaggaggtggagcccaggtggtgatgctcactggcccgcctcccaccgcctgctgtgcggccgggttcctaccaggccactgacctgtacctgttcgcatggggcttggggaccctgccccagaagactcactgtcttctgaagggctgtcctgggaaactggaacccagcctgttctgtgtgtccccaaaaggccacaccaggtgcagctgaccagaatttaactccgttaccacgtttctgtgagcctgtgggcaaggcccttttcttcccagtggcagatcctcgcatcccatcctgtcggatccgatcccatcggatccagcagccctggcttcagcctgcactgtgctgtcactcaccctaccgtggccacccccgcttcctgctccctccacctgggccactctcccggtggcattccatggcttgccccctctcctcctccagatcttcccggtggcattccgtggcttgccccctctcctcctccagatcttcccatggcattccgtggcttgccccctctcctcctccagatcttcccggtggcattctgtggcttgccccctctcctcctccagatcttcctggtggcattctgtggcttgccccctctcctcctccagatcttcctggtggcattccgtggcttgccccctttcctcctccagatcttcctggtggcattctgtggcttgccccctctcctcctccagatcttcctggtggcattccgtggcttgccccctctcctcctccagatcttcccggtggcattccgtggcttgccccctctcctcctccagatctttgtgcaatgaggccatccctggccgtcctgtgtgaaatcgtgctcatcttctgtgatgaagggccctggcccttccttgctttctttctcttcatagttcttatcgtctgctcatgtggaatggattttgcttttttttgtttgttttgatcatctatctgccccacccagatgtaagctccatgggggcaggaagttctgtgtgtttcattcactgctgtgttcccagttcccagagcgatacagacacatagtaggcagtcaataaatattcatcaaatgaattaaatgaataccgttttgttaggtgttatcttgaactactttattttaggggtcccctcagtctgccagagctggctcactgccttcgccctttttcttcttttgagatggagtcttgctctgtcacccagcctggagtgcagaggctcgatcttggctcactgcaatctccacctcctggttcaagcgattctcctgcctcagcctcccaagtagctgggattacaggcgtgagccaccacgcccggctaatttttgtatttttagtagagacggggtttcaccatgttggccaggctggtctcgaactcctcaccttaggtgagtcacctgcttcagcctcccagagtgctgggattacaggcgtgagctaccatgcccggcctgcctttgccctttttctgaaccccactggagaacctttgggggtggaatcccgcagcttctggtgaatccagtggactctgaacactccttagggttagtcacaaccaggagcttgaatttgtgggatagccatttcttgatggttccccaagcctggagaactctgattcctgctgtggcgggtgctgcccttgactgtcagcgttcagctggggggaggagcaggggttcttggtgtggaagaaagcaaaggaaaaaacagacattcaggaacttgcctgagtgaaaacatctgaacaaatactgaacaaagggtataaacatgtgtccagtgatttcagtgaaaactattttctggcagctcttatggagcaaatttgaggcatttcggttctcttattctgaagagggacagctgagcaaatttgtcataaaatgctaaaaatagtaacgtggtagagaccattttctactaatttaatgccagaagctctttctaagctaatgaaaatagttgccaaattggttgaacagtaatatttcccgttttggtccccttcattagattctgtcttttaatttgtcaagatcttcttttaaattcttggctatcggtcaaaggcatcagctggctcttattacttcttgccaggacgtcagccaacttttttctgggcctcgcctcacccatgaggagtccgtcctcctgcccactgtgttcagggcactggggcacgacagcagtcctgcccttggggagctcaccttccggttggtggagggaccccaagtgagtgggtgtcacacagggagcaagaggcgagaggtcagcagagcagcgtcctgtcctgtcctgacttcagcggggtgtgggggttgtttgcacggagaatgcaccaggtgctgtcagttctgtcagggcacagagaggaagctttgaggaggatgaggagaggttagccttgaaggcttggggtgaaggctgggggaggggccgagcaggcattctgggccagggtgtgcgggcggccggggcctcagcctggactgcagctgctgctgcccagatggtgtcagatccctgtgtgtccctctggtgtgtttgccaagccgcctctggggctgactctgctgagcgtcttctctttgtcccgaactttgtgcactgtccctggctggagaagactcatttctgtactcaagtcctgtgtgtagttgctgatggccaggtcctgctggtcagccgccttggacggagtctcgggcctgcttttccgttttctgtccccttactctggcttctggatagcctttggaatattccgggcgatagctgggcctccagagagagtgggctgcagggtgtgggcccggcctccccttgcctggcgggttttcctggtcagcgttcctgctgctccccggtcatccctcctgtgctgcagcctttttctctggttcagacccacactctgccgtcccactgcctgggcttgctgagctctccgttctggcttgaaggcctcgcccgagccctgtcaccggctctgcctgtcaggagggcccaagtgtgcggcttcggtggggctgcctgacactgacctctggggttgtaaaggtcccagagggtcctaagtcgggcctgatgtggctgagatggcaagagccggaacgtttctgtaaaatctgaaagcccttgatggggccgagggggtgaggaggattcccaccctgtgtggacaggagcacgcagcagcggagtgactccaccacgtgagtggggtccagcgggtgtggcactcgatgacaagacagtttgagagcggcttgtctccggggacctggcgtaggtctcctctgccttaacccttggcttttgcacttcctctgtctgtcctccatacaggcttcttgccctagtgaggactggcttcttaacagggtgagccggttcctgtcctaaccccactggcatcttacactctgggagatagcttccccctgagaggcgagtgagccacgtaaggggaggtgggcgatggcttcccttctgtcttgggttgggggagtcaggtacagtattttttcttttaaagcatcattgatcacataataaggtttgtcatagtccttaatcacagacctgtgaaatttggagaattcacggcacctaggatgggagtgagcttctgattgtgagctgatttgggagctaacctcaaggaaactcctcttgcaagccccctgctgggtgtcgtggccctcgcccagtgacctcccggggactctggacgctctttgtctgcccttccttttccctcacctcgctcccccgtgagaaagtgggactcatgcagctcagctcagtgacagagggtttattaggggtagctctgggacccatcttttggtgatttcttctctctctttctctaatggaataattgtttctgtctacacttctttattttctcctctctacagctgccttctaaaaatgtgcttttctgttcctgcagaactgaagcttgcatggcctttgttgtgactttcccgtcacgagcgttgtctcttggtattttcccataggccagcctgcaggtcatacgttgttcattttttttgttgtggttggtccagtcagccaggaccagagcaggtgggaccatgtggtgccacacgcagccagctgggcctcttcggcaggcgtgtgggcagtgggcaggtgggctgactgccactctcagatatagagctgacaccgagactggatgctgtgctgtgctaggcacaggaggggaggggaacagatgtgagtcagatgtgcggtttgccctcacaacttcactttctagttggggaattggacatttacataaatgtacaaacacctgtcatacaaaaaagaaaggaataggtgtcatccaaataccacctctgttggggtatgtggtgggcagcctctaacacggcccccggtcatccctgcctcctaggagtcgtgccctggtgggtccctgtcccttgatgtaggctggacttattgacatgcttctagtgaatagaatctggcaaaagtgatggcctgtcactctgggactgtgttataaaagcctgctgcttctgtcttgggcactttctgtctctctctctgagccttgcctggaggaattcagctgccatgatatgagctgccctgtggagaggcctgcatggtgaggaactgatgtctctggccagcagccagggaggatctgaggcccaccagcagccacacgagtgagaggggaattgagtctttacatagttgagccctagccaaccttgattgcagcccgtgggccagaggctaagcttgcctgaattgtctcagataaataacatatttatcttacagcttatttatttatctgtaagataaataaatatttgttgtttgcagctgctaagttttgggttaacttgttatgcagcagtaggtaactgatacaaggggatctcagcacagagagagctgtgaagtgccaaggaggcggcacctttggctaaggaatttggggaaggctttgaggaggatgtggtatttgagcaaggctatcttttttccatagagtgtacacctcttgtacaaggtagaacatcttgcacataacagaaggcctgtctgtcggtcccactttccaaggtgagtagaataaagtcactgttttcctgttgcctgagaacctccaaaccctctgttgaagaagggcagggctggctgtttcctggagccctcctgcccagccagacgtgtggcatctctgatgtagctgagtctcccgggcctggtggcctccatctgcagtgccaccaactgtgtgtggggctgctttgcacaccatatgctgattagggagcaacaacatgggacctgcaggcccgatgccccaggcgctcctcagacccgcgagccatcccacagtctgcccggggcagctcctcacctgccctcgtggctcttccaggctggctcagcctgtggtagaagggtctgaagacccaggttaaagccttgtttctctctcttactgatggcgaggcactgaacatcctccgtgggcctttttttttccccctccaccttttattatggaaaatttcaaatatccacagaaggagagaggagagcataatgaatgcctgtgtactcatcaccggcttcagtagttaccaactcatggcctgccccttttcatctcgactcccacccatcgccttctcccccagaagcaaataccagatcttattttatttttaaatattttgataagtctctctaacagaaaagtactttttttttttgagacggagtcttgctctgtcacccaggctggagtgcaatggccaaatctttcactgcaacctctgccttccaggttcaagtgactctcctgcctcagcctcctgagtagctgggattacaggcacgtgccaccacgcccggctaatttttgtatttttagtagagatggggtttcaccatgttgcttaggctggtcctgaactcctgacctcaagtgatcctcccaccgcgacctcccaaagtgctgggattgcaggtgtgagccaccgcaactggctggaaagtactatttgtattaaatgcgctatttttattacatttagcaaaactaacaataaataatcaccttattgccatctagtatccatgcaggattcacattcttgaattgactacatgtttcatttggttgactcttgagtctttcccattctctctttcaaaattaaactttaggccgtgcgtggtggctcacgcctgtaatcgtagcacttcgggaggccgaggcgggtggatcacgagatcaggagattgacaccatcctggctaacacagtgaagccccgtctctactaaaaatacaaaaaattagctgggcgtggtggtgggggcctgtagtcccagctactcggagaatggtgtgaacccgggaggcagagcttgcagtgagctgagatcgtgccactgcactccaggctgggtgacagagtgagactccctcctcaaaaaaaaaaaaaaaaaaattaaactttaaattttaagataattgtagattnnnnnnnnnnnnnnnnnnnnnnnnnnnnnnnnnnnnnnnnnnnnnnnnnnnnnnnnnnnnnnnnnnnnnnnnnnnnnnnnnnnnnnnnnnnnnnnnnnnnnnnnnntattgtttttgttgttgttgtctgttagttttgagacagagccttgctgtgttgcccaggctggagtgcagtggcacgatcctcggctgactgcaaccttcacctcctgggttcaagcgattctcctgcctcagcctcccgagtagctgatattacagtcgcctgccaccacatttggctaatttttgtatttttagtagagacagggttttatcatgttacccaggctggttttgaactcgtgaccttgggtaattcacccgcctcggcctcccacagtgctgggattccaggcatgagctaccgtgcccggccaggatagtgactttgataccatcaagctgagaacgtttatccccacaaagatccttcgtgctgccttttacagccacacccacctcctctgacccgtagcaaccactaatttcctccttcatttctgtatttcaagaatgtgtatcaatggaatcctaaagtatgtaaccttttgagataggccttttttctcaacataatcctcaagaggttcattccagttgttgcgtgtcagtaattcactttttaattgctgagtcgtatttcatcatgcgaatataccagtttgcttaaccatccatttaaggacagcttggttgtccccagtttgcggctagtatgcataaagctgcattttgttgtatggacataaatttttatttctctgatataaatgcctgaaagtacagtagctgggtcttttggtagttacttgtttcattttataaaaaattggcagacttttccagagtttggcgatttgccagagtttggcagacttttccagagtttggcaaaatcccaacagcaatgtttgagtgtttctcaagtcccttctaaaccagaggtcctctctccctccacctctattttctgacttcgcaactggggaggaaaatttgtgctctgatgatcttgcgtgattgggattatcttgcatgtgaaactgctttataaactgtccccagctgggtctattagtgcttcctttttgtgggtgtatctgaaaacagtgtcacagaatcttagcggagggctgtagacatttattcactgtctgcccctgcgtttcctagcctggctggattctgcagggctgctgggtcatgagggttgccacaggtcaagcgtgttaatgaagttcgtcttggcttctgcagcacattgcgggttgtgggtagtgagatacttgagttgcctgagcaacccatgaagaccacagtccctgcacagaccaggcttcggcacggccactgtggctgccaggactggtcttctgggccaccttgtcattcatccctgacctggctggctggctggccagcagttcagactggaacacgaagatgccactgagagagagagagagagagagagagagagtgagagagtgagtgtgtgtgtgtgcgtgtgtgtgtcagggagagagaaagcgaggaccttttagccacagacccatgccagctttgcttaagatgatggtagttttctctctctctctctcttttttttttttttgagacagagtcttgctctgtcgccaggctggagtgcagtggtgcaatctcagctcactgcaacctctgcctcctgggttcaagcgagttttctgcctcagcctcccaagtagctgggactacaggcgtctgccaccacgtccggctaatctttgtatgtttagtagagatggggtttcatcatcctggccaggctggtctcgcactcctgacctcatgatccacctgcctcagcctcccaaaatgctgggattccaggcgtgagccactgtgcccggccaatgatagttttctctaacactatgtgtggtgaattctaagctctattagaagcaaaaacctgaggctttttaaaagcacttgcctcgccgcctcctttagggctgtgtctgacatgaccgtcatttcctcagttggttatcagcctttcttctcccttgctgagctgtcaactgatgcccccaccttcgtctcagcctctgttccgggggctgacttgactaatgtgtccccaagttgcttgatgacctcagacaagaagcacagcagtgcctggcctcacagccccatcagcatggaggatgacagtcccagcacactgctccaaggggctgtgaggaataaataataggccaatggcaaaaacactgggcggaggaatcctgctggagagacactgacacagtggagagaatgtgtctgtcaggccatttgctccttactttaaaggcctgagtggtggctagagctctgttctttgtgttttacagagggagatgttaatgttcgattcacttcttttgtgggttttctctggtgcctgcatgttccttctctgcactgctgtcagtcccaagcctgggggtggcatggggtctgctgctgtcttgaaggatatgtgggcccccagggattttcagtgaggtgaaggggtgggtacaggccaatttgataggtgaaatatatatcattatagaatattaagttttctttcctttcttttgagtgaaattggatctcctttcatatggtaagaatcactgaatttcttttctatgaactctttatgcccttagcccatttttctattgggttgttgatgtttagtaatttcaaggagctctgtatttgttaaggaaataagcatttttgtccctgaaatacgttgaaaacattttttttttgcagtcttttaactttttttctatgaaggtttttaaaaaatttgtgttgtgggcaggtgtggtggctcacacctgtaatgccagcactttgggaggccgaggcagtaggattgcttgaggccaggagttcaagcccagtctggacaacatagtgagagcccatctatacaaaatttctttttttaatttgtgttgtcaggtctatcttgtgacttttagattttgtgtcacacctagaaaaggcttcattccaagattattaaaaaaaattatcttgtgatttctacattgtgaattgtagtgtgctaacagagaaatgaactactcttgtccttaagaatagttatggcctactatcttctctgaatttatctaaaataattcttcttccaagatgacctaagtggctatctctggatacagaggactggaaactatgcatcggatagtctcaagatatcctcttagcttgggcttgtggaccccaaatcaacaagtattcttaggggtcccagattttcaccttctggggctgctggtagacatggcagtctttatatgtggcagtgaaagctgaagaaagatggtgggtagaggaaccagaatgttctaaagcttatggccaagtcttctctctactggataatattggacagcatgtggttttgaggttctgttcatctttggattgacacgtttttagatttgttaattattctatcaggttactgtcagtttttttttttttttttttggccagggacctagttggtctctttaagataatattgcaatctctgccctattccattgtctgttttgggattagttctcaatgttggtatcttttgtttctgtgtgactgggggacagtgtctctatagttctttgttctgacaacactggagcaaagtggggttcagtgctccagagaccaagtctgaagttggcctccgtcagtccttgtctactctttttttttgagacggagtctcactctgttgcccaggcaggagtgcagtggcacgatctcggctcactgcaacctccacctcccaggttcaagcaattctcctgcctcagcctcctgagtggctgggattacaggtgcacaccaccacacctggctaatttttgtatttttagtagagacggggtttctccatgttggtcaggctggtcttgaacttctgacctcatgatccgcccaccttggcctcccaaagtgctgagattacaggtgtgagccaccgcgcccggccctgtctagtcttagttgtcggttagctcttggtttcctgtgcggatggaggggaggagcagaggagcagctaagtcccaaacttggaattaatcataataccatggctttgggaccttctaggcctcaggttgtaatgcctttatcccttgggcactcaggtcctgtgaaatttagatggtccctgaaatgtgtacatctgcccagctgggagttgggtctagaggggccagccagcatgggtgttttatctggcagagccaaaagcgtgaaaagccactggagtgagcccaagccttttcagagaaacctgaggctccagtacagtttctgagtccagagggacggaaatgggatcatcaacaaggaacagcctcaagataggacttgggataaagtgagtatagaatttgagaggagcgtctgagtcttgcttttgttggcacaggtttgagaatacattgggatgacttaaaggcagaggttgagatggacccccagagacacaggcagctgtaaggaatgtcccagaagcagaagggttaaaagtgtgtgctggggaccccaggatagatagagcacctctttgctgggagcaagggcccttcctcacatgcactctagggaaatcctggccttgtctagctactgatttaaaaggcagtgggttagacactctcttcacagaggaactcgaagtccagtgacttcttagaagattctgggagaggtgcttgtggttatccaggccagtggctctgaacaagatgatggatcagaattacccagagagctttatcaaatactttgcctggattccagcactcagagattttttttaaattgagttaaaatttatatacagtaaaaatagagatttttgactccgtaggtctggggttgggctgggacagggttatttcaagaaaatcaccctgggtaacttcaatgtacatctctagttgagaacctgattttcttcacttctaaactttactggtggggagactgagacctgaggggttgttcacggtagaggatggagccagcggacccgtgagctcctgttggaccacaggccagagcccagcattccttcttgtggcccacagctctttctactgagtgactgccatcattaaactaacgagtaactgatggggccacagtaaacctgtttggcacttcttcccgcctaatttagacagatgtttccaggtttggggcatgttgcagtatagtcctagattcctgccctgcacaggctgtgagggtgttcatgtgagtcaaccgattgtaggtcagtgaaccctggtcgccaaagcccttgcctgggaggagccaagttggtcatgaaaggcaagtgctatgtcctgttgcatgtcttttagtaagtactgggagaagcattttccaggcttgattccagagaagcaatggaattccagtaccattgtttccaccaccactattattaccagtgaacccactgtgtgcttggatgaattatctcatgtaatccacccttggcagtgggaatggtcatttatcccattttacagataaagaagcagctcaagtaacatggccagggtcacccagctggctggttagagctggagttcaagcccaggcagaatgactacagctcctgggtgcttcgccacgctgcttcacggctttccagagcgccagatctggaaccgcgctgcttcacggctttctagagcgcgagatttggaaggtcttgcagagcagcatcccctaaatggcaggttccaggaaagatctttatgggaaatgtgaaaagcagcgatggaaaaatatgtggatacacagagcttccaatccccttcttggagggtcacagtgtacaccatcatgctggagattttgagaagaatggcagttaggaagtctgtttagctttgactaaccagcaggtcccaacttaacttgacatggaatgctcctttctacattatcctaaatgacttacagaccattgtttcccaaacaccagttggggaaacgccatcatggctcataagtctaatgctctcattttcagtggacacatgggacccagggaagggaaaggacttatctaaggcccaacacaagtgcactgcgaggctggggaatctctgcagcctgatttttgtcaggacagccatctttgggagtacctggaatcctgatgggagcagatagatgataacccctatgagactccttagctctaggcctttgtgaaggtagcaacaagattctttttttttcttttgagaccgagtctcactttgtcacccaggctggagtgcagtggtgtgatctcagctcactgcaagctccgcctcccgggttcacgccattctgctgcctcagcctcatgagtagctgggactacaggcgcccaccaccatgcctggctaattttttgtatttttagtagagacagggtttcaccgtgttagccaggatggtctcgatctcctgaccttgtgatccacctgcctcactctcccaaagtgctgggattacaggtgtgagccaccgcgcccggcccaaaaagattctttttatatgtaggcatacgcaaccgcaaaggagatttggaggagctttggatagttcctctttcccagggtaatgatgggaacctcgagccggtggccagggaaacagactgagcttgttgggtctggactcctagccctgcccacacggcctctcctgcgggccatgctcattcctatcctatgttgactccctgggcccagccatcatacccacatatcctagcccttcattcagcctgcagattcctttcagtccctggtaatgcagttgatcaaaatttgtttctaagcagcaagtctccatcagctgattattatagaggtttgttctttccagtgttcttggcaaaatgcctcccaatatttacttattaacttgagaattggtttttgccttcccgtcggagaactctgccactcttgtctgcgtttctcgaagcaattgatattctcagtggtgaggggagggatattttgcttcctgagatgaaagagtgactttcattgaaatggctgtcaagaactgcgggtgccatgaccttgtgaacactgtagaacggttctctggtgatagaggtgttcatagttgaaggttttgttgtgtgttgcataatagttacgagcactgaaaaaacactgcctgggtttgaatgcagccctgccacttagtagtggaaaataatactatcagtttgtgaacattaattgaattaatatatggagttagatgataccttacacgggataagtaccatgtaagcgtttgctgttattgcttttgttagggtggcttcggttgggaagtttttacatcccagctcccctgactcccaggcccttgaatatttgtacccaagaggcttttcttactgtggatatagcatggcctagaactttcttcaggcccctggccttccgggatgaagtgcccggacaacttgttcctgactgactcttttttgaaactcagggggagtgggaagagaagttcgactttgcatgagtcttctctttgaatctacttcctccttcaagttactcatcctttttatgaatcacccatgccaatattgctccctgagtttgcatcccttccttcccaagcatacttctgagatgtttgtgtcagtacttgctccatggtcaggaaatgcaccttaatttttataacccaagccagacagaattgagtaaacctcatatatgctctatccccaagcctcagttgagtggttattggattatcttctgttgtgaataagtcacacttctgctagtccgatttcatggataggggagagccgagggtgaagcccgattagcgtgtgagccaggcgcagctgaactcagcttgtctctccagctcgtgcagaagttaactggtgggtgaggccagtagagctcttccctagccttgggaaggaagcctctggttcgcttttccataagctgctggcctagaggggaatgtgtgagactaagtggacagtgtttctggagagagtatttgaccagttgtgtcaaacgctgatggcaggtcagtaggatgaggactagatttagcaatgtgaaggtcattggtgacttgaacaagcagcttcgctggagcagagaattgtgatcctgagcggacgggatatatagttgtcttttttataggactttaatttgtttagatagtttcaattttttgccattttatgatgccatactatgatgcttgtgaacatctttaggtacatagtgtttcttaatattatttcccaaggatacttatcagaataacatttcactataatgccactaatatttggttctcagtctgtcctttgaagacactttgaaataacatagctttttttttttttttttttaaattgagactgagtctcactctgttgcccaggctggagtgcagtggcgcgatcttggctcactgcagcctctgcctcccaggttcaagtgactcttgtgcctcagcctcccgagtagctgggactacaggcgtgcaccaccacgcccggctaatttttgtatttttagtagagacgaggtttcgccttgttggccaggctggtctcaaactcctgatctcaggtgatccactggccttggcctcccaaagtgctgggattacaggcgtgagccactgtgcctggccacatttttgttgtaaataaatatcccagaggaaaatggagactagctgctattgttttaagttacaagctaattgagccatgaaaactcattgccaattcagtaccaagaggtgcagaagataattgcctcggtgcatattgattttttcctatccagggtggttatgctgtgaggtaattgacaacaccgggttttaaaaaggatatactagtcccagtgtaaaatatttttcctcctgctaactgctctgcctgtcctcaaatgtgctacttttttttttttaaaggaagtgacaattaatgacttgtcacttgttcagccaacattgatagccagtttagtcttgtctcatccaatattccttattactttggcattttaatttgtacaaagccgttttcagttatcttcttttcttatcctgttacatttgcttttacacggttgggtctcctgagtttgcatcccaagcaagttaaaattccaggcaggttattttttcagatttaaacagagaaggcagaggcctcctttctccctccctatgttttcatcgcctgcctgactcatctctggtctctttctccgcctatctgcctgtgttatgttttcttcccctgagatctgttgctgaaaggctgactgcaggagcagtgctcagctctgagggggcatacctattgccccaggggtactatttgtacatgtcggggttgttggcccagtagtgatgctggcggggatggggaggaggcaggaccctgtaggctgtggggaatagggcagggtgagtgccacagggctagggagcatcttgccctgcttcctgccgcaccctgcaggatggcaaggccactttcagttggcagaactctgttgtcctataggacagatgctagccacatgtggccatttttgtttaattaattaaaagtaaagaaaattaaaaattcagctcctcagtcacactagctgtattccaagcgctcagtagccacatgtgactagcagctactctattggacagtgcgggtgcggagcgtttccatcaggcacagggttctgctggacggcgctgtcctccagggcttggctgcttcctgggtgattgaagaagccaacattgaggggccttggagactggcagtggcaggtgacctgggcaagcaggctgcagcctcgggctagcctggagggaatggcagtgccaggcagggagactgaggcagtgaggagaaagagggactgtgacttggaggtcctgaccaggctcaggctcactggagctcattggatacttcaatgcaacaggactgtgtctagaccatggcaggtgtggctggcggtgctgaactcctgcaggccagaggggtgagcctgctggaaggggctccagctggggtgcaggaagagcattcccagcacggcactgcccgggccctccgagctgttcctgagagctgtatgaatggagttcccgggctgggcagtaggggaactgccagagtgaagggaccagggcacaaaagcttttcattcatgaatctctttcatttacaacaaaccacgggtagcctctccccagggatctagatggttccaggaacaaaggaacacacagaaaagagagtccttttatttttttaaagctgaaagaggctctgtccagtggaagaactgcggccacttctcagtgggacttctgactggaacagtcttaggcgcctgagcgactctgaggaaggaatccgtggtggtcacccctggggaagccaggccaccttctcagagcacttcaagccaggcatgtcttgctggtaatagcaatgacattgagtatgactgtaataataataactgctaatacagaaggcttactgagacccaggcattgttctaagtgctttatatgaattcacttaagagaacatttatgagaacggtagccagctttatcactggagggttctcagtggccctccatagcatttaacgtcaacaaccattgtagtaacagctgctgttttatggtttaaagagaatttttatgtacattgtccttttaaaaaaaaaacccagctttgttgaggtacagtttataccatcacattcatccattgcaaatgcacaattctgtggttttagtaaatttataggtttatgtaaccacgaccacaattcggtgttagaacctttccattcctccaaatgtttcctctgcttgtttgaagttaatctctgctcctaccctagccatgggcaatcactgatctgctttttggttctctaaatttgccctttctggtaatttcatgtaaattgaatcatataatatgtaatcttttccacctgggttctttacttagcataatgttgttcttgaggttcatccatgttgtagcatgtatcagtcatttattcctttcaatttgttacacagtgttccattgtgtggctgtcccacgttttgttcgtgtgtttgttagttgatggacgtttggaccggtttcactttggagctattatgaataatgctgtcgtgagcattatctttgtgtgaacatatattttcattcttattgggtaaattcctaggagtagaattgctgggtcatatgggaaatttatgtttaactttgtaggaaactgcctgttttctcaagtgcttgtactcatttatattcccttctgggaggcatgagggctccagtttttccacaacttctctaacatttgctattgtcagtcttcttactacagccattctgggagtgtataaaggtatctcatttaatttgcattttcttaaagactagtcaggtgaagcatcttttcatgttcttgttagccctttgcatatctttggtgaaatatctgaatagatatataattgagttgtttatatatatataatatatatattaattggggtgttcgtcttcttattactgagttgcaagcattccttatataacctggatgcaagttctttataagatatacgatttacaaatatttttctcccagtctgtggcttattttcattttaatattgatttattttttatgcacaaaatttttaatgttgaagttcagtttatcaatttttttattgtatggatagggctttttgtgtcattatctaagaattctttgcctaacccaaggtcaggaatattttctcctgcaacatttgttttctagaagttttatagttttagctattacatttagatctatgatccattttgagttaatttttatgtatgatgtgagataaaggtccaaattcttttcttttattaatttttttgcatttgtatatctaattgactgtcctttacccgttgaattacaatagtgataagtaataataattaccttcacatttttgttgaaaatatattgactataaatgtgaggatttatttctgaattcccaattttattgcattgatctataagcctttcctgtgccagtatcacaccgtctggatttctgtggctttgtagttatttttaagatcaagtagtgtgaattttccaactttgttattatacaaaattgttttggcttttttaagtttttgcatttccatatacattttaggatcaattcatcaatttctaccaaaaagtctgctgggattttgatagtaatttacatatcagtctgggaggaattcccatcttgacggtgttgaggcttccaatgcatgaacatgaaatgtctctccacctatttagatcttctttagttttctcagcagtgttttgcagtttttagtatgcgagtcttgtactccttttattaagtttattcctaagtattttattattttaggaatggctttttttttttttttagacggagtctcgctctgtggcacaggctggagtgcagtggtgtgacctccgcccactgcatcctccacctcccgggttcaagcgattctcttgcctcagcctcccaagtagctgggattacaggcgcacaccaccactcctggctaacttttttgtatttttagtagagacagggtttcaccacgttggccaggctgatcttgaacttctgactttaggtgatctgcccaccttggcctcctaaagtgctaggattacaggtgtgagccatcgtgcctggccaggaatggatttttttgaatttctttttttgattgttttgttgctagtatatagaagtgtgattgattttatatcctgaaaccttgttaaactcctttttctgtgtggattccttgagatttttaacatacaggattatgtcatctgtaaataaagacagtttccttcttcctttccaatctgatgcttttaattaatcaattgcttagttaattcattttattttttgccttattccactagctagaacttctaggacagtgtagaatagaaatggcaatagcagacgtccttgccttgttcccaaccttaggaggaaaggattcagtctctcacaatttacatatgacaattgtctgtgggtattacattaatttcagatgttataccagccatgcattcctgggataaatcttcacttagctattctatgtaattctttttgtattgatagatagagtttaggaattacagttttcttgtgctctcttttgtctcatagaatgagttgggaagtgttccttttctgaaagatttttttgaagaattgataaattgtttaatttttttttttttcttgagacagagtctcacttggttacccaggctggagtgcagtggcgtgatcttggttcactgcaacctctgcttcctgggttcaagcaattctacaacctcggcctcccaagtagctgggactactggtgcatgccaccacacctggcgaatttttgtatttgtttaatagaggccgggtttcaccatgttggccaggttggtctcaaactcctgatctgaagtgatccacctgcctcagcctcccaaagtgctagattacaggcatgagccactgtacccgacctcaaacattttaaatttattgagacttgttttgtggcctagtatgtagtctgtctcagggaatggatgttctgtgtgttcttcaatgtgcagaatgtgtattttgcaatcattaggtagagtattccatatatgtcagttaggtcaagttgcttgattgtattgagtcttctgcatccttgctaatattctgttccatcaattatcaagagtagggtattgaaatctccaactataattgttgaattctctatttctcttttcaattctgttgttgctttatggatttgggaggtctatttttaggtgcgtatgcatatgtaattcttaaatcttcttgatgtattggcccttttataattttaaaatgtctctctctaatgatcttgttgtaaagtctgttgtgtctcttgttaatacagccactcaagctattgtatagttattgtatgcatggtatagctttgtccatttttttaaactttaaacttgtctgtgtctttgaatctaaagtgtgtcctttgtagatagtttatgcagttggcccttgaacaacatggggattggggtgccaaccccccataactttggacttcccccaaagttaaatactaataacctacttttgacttggttccttaccaataacataaacagtcaattaacacatattctgtatgttacatatatactgtattcttataataaagtaaactggagaaaagaaaattttttaaagaaaaccataaggaagggaaaatatatttactattcattaagtagaagcagatcatcataaagatctttatctttgtcatcttcatgtggaatagaatgagaagaaagagaaaaggagggattggtcttctttctgaggggtggcagaggtggaggaggtggaaggggaggcaggagaggtaggcacacttggtataacttttattgaaaaaaattcatgtttaagtgaatccacacagttcaaagttgtattgttcaagggtcaactgtagtttaagtatactttttaaaaatccaatctgataatccctgcctttctttaagagtgttgagatcattcatatttaatataattaattgatttggctgggtttacatttgacattttgttattagttttctatatgccttcttttttgtacctctgttattttttgattgccttcttttatgttaaataagtatattttagtgtaccattttaattcttcttttgattttttaactgtatttttaaagtcattttttgtgattccctagggctcacaatatgcattttaatttatcaccatttacttcagattaataacttaattcctataaaacagaaagtttgctcccgtaaagcgccattctttcccccttccatactattattttcatatttattatgtttatatacgttataaacccaacaacccagtgttgtaatttatgctttatccaaacttacacatctttttaaaaagttaagaaatgagaaaaatatattcaatcttttatattagtacatatatttaaaatttttggtgctcttcgtttcttcctgtggacacaagttaccatctgccatcatttcctttcagcctgaaggatttcatttagtttttttttttttttttttttttttgagacagagtctcacttcgccacccaggctggagtgcagcagcataactcggctcactgcaacctgtgcctcctgggttcaagtgattattttgcctcagcctcctgtgtagctgagactacaggtgcacgccaccaagcctggttaacttttgtatttttggtagaggtggggttttaccatgttgaccaggctagtcttgaactcctgacctcaaatgatccacccacgttggcttctcaaagtgctgggattacaggcatgagccaccatgcccagcctcatttagtatttcttataaggtaaatctgcaaacagtttgttctctgtctttgtttatacagaaatgttctttttttttgcatttttgaagaattgttttgctagatacggaattcttggttgatgttttctttttgctttttgctttcaatactttatgtcatcacattgccttctggtctccattgtttctaatgagaaggcagccattaatcatattgaaatgcctttgtacataatgaattgtttttctcttgctgctttcaagacttttttctttctctttgtctttcacaggtttgattatactgtgtctaggtatagaactctttgtatttatcctacttggggtctgttgagttccttggatgtgcagattaatgttttacatcaagtttgggaaattttctgtcatttttttctacaaatttttttcacctattttgtctttctccactccttctaggtctcccattgcatgtatattggtatgtttgaagttgtcccacaggtgtcttggttcatttttctttgactttttttctattcttcagactggataatttctatttaatctatgtacaagttcattgattcttttgccatcttgaatcttccattgagtccctttagtgagcttttcatttcagttattgaactaactctagcatttgtctgctaaatccaacatctgaatgcattaaaaaatagttttgattaactgctttatttcctgagtgtgggtcacactttcctattttttaaatctcttataattccttttttgttgaaaattggatgttttgctattatatcaaactctgatttctggtattttccctgtaatggttgttgttgctgttttgtttgttttgtaacttgtctgggacaagttatgatgtctgtctcacttgcaatgtgtggtcattgatggctttgcttagtacttttttaaacttttgtttttattttaataatttggtttttattttaaaatcaaattaaaccctggattcctagaggttgccctggtgtctgtgtagcttagtgggcaagtcacatgtgttactctataaatggaaataatatagtatccacctcataaagctcttgggaaatttgaataagttaatcaatgtaaatcactcagtgtagggactggcacatagtaagtgctcaatggatatgcgtattcttattctttggtattatcattgtgtgaggaaaatgaggctcaaagaaatctagtgactcaagatcacacacctggtgaaagctagcgccgagcttaaacccatagccatcggatgttactgtatgaggctgcacctcctggttctgcatctctgtcatgttgtcacaaaatttttgtgtaagtgcttaatgtttacacaaagttggctgtggagggaaatggagcagtggtgtggaaattggaagaaatgttgccattcaaccttgagagtctctgattctgagataccacccagtggacagatatgggagctagcagttatgatgcaggacaagcaagccccaaaattgaggcttagcccaagagggttcttggctcctcataggagacaattcgagagtgcaccagtgtgttaagcagcgactttgattgaaatggccagtacacagcagcagcagaggtactgctccttgaggagtacctagagcactcagcatgcctagagtatcagctcagcagcaattctgcactcatatttataccattttaattatatgcaaattaagggtcagtttatgcagaaatttctaggatgagggtggtaacttctggttgtcaggttgttgccatggcaatgctaaactgacatggcacattagtgggtgtgtcttatggaaagctgttcccactccagacctgttttagccagtcctcaatttggtcccgtgtttgagccctacctctgggcagcacagaggattgtttcagcctcactccctggattttcttctccaaggagtaaagagcaaatcctatatttgtggttagctggttagagactgtttctattaactattcttttgggagctaaactaatttaattccatcccctagacttttttcctgttcaggagtggtgtctctgggatgagtccttctccagagtcagatgtttactctcacatctaaatatagagccaagcaagctcgttgagacgttagttgaactcatgtctttggatggatttcatatcacagtggctttcttttgtagagactttgtgagagaggagggatttacttttttaaaaaaaaggttgggggtaaaaggttgaaaataaacaaggacacctctttgaagtgtttaggaagaaagggaggttttaaatatttcctggaaatcatctaatttacaaatgcacaactttgttaatcatgtccaggcatgtcctcagccccgggtctttccataatattaagagcatgttcggtggaatgcagcctgaatcattcacttctagctgcaaatgaaaaaagtttcaatcaactgggactctacctcaatgtgcatgcaaagcaattaaaatcaaagaagcttaaaggaataatgtccaggggtggaatcccatttctttccccttctgtatgtttcagctcttcagtcgctccagtaaacactaggacaagttattaggaagagattgcctgtctgattgattgactgtattcttagggctcctcatagcactatacagataaattggaattttcagaaaaaaaattgaatgaatattaataataacagtggaggctggtatcaagagaagggacacagaagagacagttgggaggagtgagaagcaaagcttcagctggccgggcatggtggctcacgcctttaatcccagcactttgggaggccaaggcgggtggatcacgaggtcaggagttcgagacaaatatggtgaaaccccgtctctatcttttttttttttttttgagatggagtcttgctctgcggcccaggctggagtgcagtggtgggatctctgctcactgcaagctccgtctcccgggttcaagtcattctgtnnnnnnnnnnnnnnnnnnnnnnnnnnnnnnnnnnnnnnnnnnncccgtctctattaaaaatataaaattagctgggcacggtggtgggcacctgtaatcccagctattcaggaggctgaggcaggagaatcacttgaacccaggaggtggaggttgcggtgagccgagatcgcgccctgcactctagcctgggtgacagagcaagagtctgtttcaaaaaaaaaaaaaaaacttcagccagtgttgtgggttagagggcccaggtccgtggagaggttatcaccagcacttcactcactcagcaaagatttattcagtttcacctgtgagccagatcttgcctaggtgctaaggacatgggggttagaaaaacagatggggtcggtctctgtcctcatggaatgtacagtgaagatagacattaagcagataatgggaacagctgcaataagggcaacgaaggggaagtccaggtgctgcccgagtgggggattcagggtgtgtggggggggattgttactaaagacttcctccagacagtgacatttaaggtgagacaagtgggtgggacttagccaggccaagacacggaggaagaagagtgaggccgagagcatattgagtggaaaagctttgtgggtggaaggagcttgatgtgccccagaagctgaagccttagctgcctggagcacaccccggtcaggctattcagggccttgaaagctgtgcgagggattggggactttatcctggggacagtgggatttgcaaccactggtggcattttaaccaatggagtaatatggtttgcattttcatccagtgacttaagtacttttgcatgcgttcttctgtgggatggacctgaaagaatggtctggacttgaggatccctggagagcacagtgaagctcaacgaagagttccagttgttgggttgtggtgagggaaccagcaatggaaggttttgaagaggggaatgacatgtctgggagcagctctgtggtggctttcaaaagttctggggaaacttgatcatgtagcagaaggcagctgaggaggcggtccaggcacttaggagcacagtggcctggacttcttaggtgagaggggaggttgagagctcgtggtaggtgttgcagggaccctagagccagaaagctgtggactggtcttcagagcttgagggccaagggagcaggaagccttcacaggaaaagaaaggtctgagtgaaagtgactgaagagaggtgggaaagggaagggagaggcctctggtcttgttgtgcaaggagagggagtgtccaggtatgtagatggggtgtgagcctcttttagagaagtaagggttgggctcacttgcaagcactcaggaaggaccggaaggaagaaagtgaagatgccgtccccattgtgtccctcagcgcccagagggtgtgtcgacctgctcctcaggccaggccagcccaacacctgtgactaacatgacctcagagtctaaaataatgtgtgccacagctctgaagtcagaaggctgatttttataaatcagcacaaattgaccttattacccatggtccttcagtgacctcagaaatcaaagtgaaaaaaaaaaaaaaaaaaacccagccctaaacctctctggaccaaagttttgctcctgaagcaggaccccaaaatactagtggcctattttctgctgaagtctctctgtcctcatggttctggagaatgtcctttcagtatctttattcctcccccatttcactgcagatgtgctccaagtttcatgttccagcaatcagatgaccacgatggaatattccctgagctggtgtttccagtctttagtctaagttctaagacactgagcattccaaaacccctactgttctgtttcccagaacagacctttcttccctattctccagcaccctctgttccttcccctttcctttccttttctttttcttttttccttccttccttccttccttccttccttccttccttccttccttccttccttccttccttccttcttccttctttccttccttttttctttaatgggagtgaggtcatttgtggagctgtcactgctctgcaagagggcaggcatgaggggtgccaggccctcctgacttctaccttctgatttgtatggtttgtaaaatgagctgtataaatgcccaacatttgatcaaacgaaactgaaaggatgattgatgatgcggggatcaaacttaccatttgaatgtagaccattttattggtaaagatgaatgagaatgatttggcctgaaagggaacttcagatttttttcctaattgaagtagtcacttctttcagaatgctaagttccctggaatattttcccagcctactgtgtctatgatagactcaaatattggaagttttaccggctgtgtgtggggtggggaaggaattctgttggttctccggtgagtcctgaagagaccttgtttctgggtaagtagacctaatcagggagacttaaatgtttcttgggggggttcttccaaaccattttgaggattttcttaaacttccagaattaggaggccatttattaagatagtctgaggtatggtgtcagccaacaaggtgagttgggattttaatcatggtttcagtttaaaggcaaaggtttaatcatgttttcggtttaaagatcatgccgttcagttagccctttgttatgatctaaaggtgtttgacagcttgaaatccaaaaggaggtcaactgaggtatggagagctccacatattgggctaaaagccagtcacatttagcattttggaaagttatgtgaaaaattgatatcgtctgttgtaaaactgaagcaattgccaagcttgtccattgttcttttgcactgaattaactcactcttaataaaaggaccgacacagggccttacacgggtggtctttgtgcagggcccacctgtgtatcttgctctgatggttgtctttgctcatagctcaatgatgctgattaaatgagtttaagtgtgctggacagtgttgcacaaactaggccatttgtgtgtcttttctctttctcttcctttgtagattataaattcagcctgtattctaacaaaagattttcattccagaatttaaggcagtgttcttctctcaaaatgatatgcctcacagatggtctagggcagccaagtggatcacatagcccttcgatcctgggaagtgtcaggccttccagtttttttctgaccattcagccttcacactggttcccttctagtcttggactgttgaggggtagagtcctagttggtcccaaattgcccctttcctggggaccagggtgggtaacagttgggttctgggctccttggtagtttcactcccttcctgtttgcaaccatagcagagctttggatcattctggagggacttgagtcccctggattcctgaaaatgacctaacctttttggattcctagaaccagaccttctggcactggccacaacagatggaagccaatttttcagagacccaaaggacagaccaatcgtagcctgaatcccaagagttcagtgggagacacactgtattcgtctgttctcacaccgctacgaagaaatacccgagactgggtaatttataaatgaaagaggtttcgactcacagttccacattgtttaggaaacttacaatcatggcagaagacaaaggagaggcaggcaccttcttcccaggggtcaggagggactgagggccagtaggggaaatgccagatgcttatcaaaccatcagatctcatgagaactgactattactagaacagcgtgggggaaactgcccccatgatccaatcacttcttaccaggtccctctcacgatgcgtgggggttatgaggattacaattcaaggtgagatttgggtggggacacagccaaaccacatcacacacagtgagtggaacagggtaatgaatttagagccccaaacctgaaccccattcttgctttctcattatatgagctcatcaattatttgtcctgcccgagcttccgtttcttgacttataaaatgaggataagaacatgcacctcacaaggctttatagaaaagaaaggagatgaagtgtgtaaaaacgtgatataagctatcataacatagttaatcttctttatagatttaggaattcttctattgttggtacatacgttagtacaggcacattagaagtttctcagtaattttttggggttcagggagttgttttggcagccccatgctaaacgttttaatccttaccgtttatagggaggcagttgtttttattgttgagagaaaaaatagatttcacataaagggatgaaaaatgtaaggtcttttgttctttttattaatttccttcctttcgtcagtgactttttgtattaagatctacactcttgatggggaaagcagacctcggcttattgctaggtttcaggggagtgggggaggagggagaatgaaaaacaagcaggatgtttcctcctccacggagctgtttataagcttttggcagcatgagtaacacactgtgctcgtctagtgagtctggctctgcggctctgaggcttgcccatttgcatataggactaattgatttattgggagaatgagacttagaacctttaggatggagatgttaccttccagtctcttgtatagtaaaagctactatgattactttcagtagataaacaagttgctttatgtagttgtcctcgtcaggtaatagcagcagcagcagcagtgacagttgacattaactgagcaattattagaggttagtcactattctaagtgctttacatgtgctgattcccgatctgcactgccaccatataaggtaggaaggcggatatggtagtttcccatcttaaaggcgagagaatccagcacagaggggttaaatgacttgcccgggagcacatacctcgtttaggggctggcacagtatctggaaagatgatgactaggttttagggtgttggatcaatgagtgaatgagtaaatatgcccttcacagtgtctgtcacaaggcaaggactcaacaaatggcagtttttagtcatattgctctggaattggaccagagaactggagtgtttgttgagatagaaagtgtgtttgtagtagcatattttattggagaccttgggtgaccagctttctcaagaaaaatacggaagctcattaggagctaacctctgactttagcttgggcagtttacccattgtccatgagttaggccattcattcatcttcccctcttatttccatgtattatgcagtggttaagggtatcagctgtgggaggaacagccctggtgcaaaacccagcactgccagataccacctgtgggcacttaaccacttgggcccaagacttctcctctgaaatgagggtgagaggatccagcacatggctggatacattatccatggaaatacacctatctcgagggttgttgtgagcaccaagtgagcttatatacaggaacagcttccaacagtacctggcacacagtaagcactcaagcagtgttacctgctcacaccatgattgtggatatctattatcatccacttcctcagtcccctgtcacagccctcagagaatttgaggtgttcactaaaatgacacaaaggtgaaaaaacaaaaccaagtagacactcagggccagggggtaaatgtgtagaagatgaaagtgtagacctcatagaaaaagacataaaggcacgcctggtggcaaaacatgctccgcagccccgcagccccgcagccacgcagccacgcagccacgcagatacacagccagtgtgaaaagggagattgtcatcctttatggagccgtcattgtcagagagaaggaagcaagtcagtcctcaggggaagcaagtcagtcctcaggagaagcacagtgttctcaagcaccgacttctcaaataaattacctttatttctctttttagaacatgttctctaagtgctacacacctggccgcaggtgggccccatcaaaggctcagatgctccggccttgtctttccctctcacggcctggagtcaccaccctttagccctttgtctgaactgaattccttgaaatcagttgggcattttatattttggtttgtggtcaaacctcattagccaagaagggatgaaccataccacttacttttgtatagctaaaggtctgggcgacagtggccttgaggacccctcacgagcaaagtcctgaggcaggactagggacaggccttggagcttctcccgaggagggccggcgctgcccttgctcctggcgagcaggtgtgtgcttgcaggggtgggggcagtgggcaggcgcctttcccgtctgcttgtgtgtgtccagagctgtcagacccatgttcctggtcacgtttgcagtggcacggggtgctccagccaccgccgtctggtgctcttagccagacggggccacatcacgctctggagagggctgggaagggccttagggtctggcctcagatgctgacccttatctgtttgtttgcttcttttcaagggctacagagccaggaagaggagcatagaaagaaaaaggaacaggaaattgttcaaaagaagttcatgaaatgagaaaagcagcaggaaacagctcgggaatcggcgaggctgcagccgaaggaagtgtgtcttgagggccaggcgggccagggggataaaccatccagacctttgtggctccttccttctgggccctcatgagttgggtccccaggatggaagggacctttcctgtaactgggggaccgagtgtgccactcaccacccccggtgtcagtgcagagacggggatctggcgttagaaatgactgtgcataagccagaccaccccaggcctgctacacagctgcctccctccctgcccctcttgtttgctcccctccttccatgacgggtcagcggtgctctgccagaaccccactgcttggggccgctcagagattcttctgtccctcaccaggcgctccgtcactcagccgcaccctggcccgactctgcctgcagtgtggagtcccggcctggagcctgcctgtgttgggggagacagtgggagggagaggaggaagcaaaggcccgagggatcacggggaggcatcctcaggggcccacgcatcagtcacagcatgggcgacgcagggcaggtttcctggctcaacaccacacttaggaaatcctttgttaattgtgactcgtttttaaatttgtcccacatctctacggctgcaagtggaatctggaaaatcaccttttttgtgcttttctcatgggcaggatgaaattgagttcccagttagaaactgcttacctctcggtgtgggctgtttgcctccggtttgtttctgtttttggggtttttctgttggaattgactagtggacttacaagctgacggtgtccattctggggccaatgtctcctcagcattcctcctccacacacgcaggcctcttcagccgactgattctttggccagtgttcaagttgagtgtaaataggacgtgactgaaaaccagttcttgagcttccatatccttttctggtcagagtattgaacactgcagtttttagtggagttaagggagttgttgaattgggtcagagtgttttggggctggaaaaactctgaggtacgatcccatcatgagttctttttttttttttctttttttttttgagacggtgtctcactcttgtcgcccaggctggagtgcagtggcgcgatctcggctcactgcaacctctgactccctggttcaagcaattctcctgcctcagccttccgagtggctgggattacaggcacgtgccaccatgcccagctaatttttgtatttttagtagagacggggtttcaccatattgcccaagatggtcttgatctcctgacctcatgatccgcccgcctcggcctcccaaagtgctgggattacaggcgtgagccaccgcgcccggccccatcatgagttcttgaatctcctccatggcctccctggagtgtggagttgtccagtggaaactacgtgaaggcccagggacagggagctgccaccttcagagtagcctcttccatcttcagacatattttagaaaactctttcttatgttttccaaaacctgcttttatctcttgatgcttcagctctcgatctcaatgaagaagcctatttcctttcttttacaaattcagagagagccttccatcaggggaaacagtcccggcttccccatgtgctccctggtggaaatatctctaggttccctgctctccagatacctgcttctgaatgcacagcagttggtctctgctcccctcaagtacggggcccaggtgtgaagaccgtgcttcagagctgggcactgggagagggcagacacaaaccggagtgcagagtacagggctattctcagctccctgcgtgaaaccagggagctctgcctctgctgatggagctgcgccaagtccttatttgatggccgcgtcctgctggagacactgagtttgcagtggcaccaaatcctctgtgtgtgccctttgttgtggccgctccacatttccaggatggtctccacccagaatttgatttgaacgttgagaccacataatagggttttctggagagagcagggccggcttctcaagctggtctgaaaatgaaagacagggaagagaaaggagaaaggagactggtctggggattgtatggtgattagcggttaggtttgggcgagggttccgtgtgggcaggggcttacatggtttgaaccttctgctgcagccaagcgggagagcatccagactttcttatcagcttgcccagatgtggggcagaaggggaagagcgagggatggggcttaaaaaaaaaagctgtcagcagttaaagagcaaaaaatggagtcagactgtcatacctccttttcatttattttctatcaagatcaaatgtttaatacaatgaaatgcacaggtcttaagtgtgcagtccagttagttttgacaaacttatatacccttgtaactgatactccagtcaacaaaagcaacatttccatccctctttttttttttttttttttttaagagacagagccttgctctgtcactcaggctggagtgcggtggcatgaacacagctcactgtaacttccaactcctggactcaagcaattaccccacttcagcctcctgagtagctgggactacaggcgcatgcctagctaatttttttattttttatttttttattttttttgtagagatgggatcttgctgtgttgcccaggctggttttcaaacacctgcactcagcgatcgtcctccctcagcctcccaaggtgctggaattatcactgtgagccaccgtacctggccatctccccattttttgaggctactgctaaggcaggtctcatggccacgaacttgtgtggttggttggcatgatgccactgcagggctttcatgttcagcccaagtttgagttggtgcattgatcctaccccaccaggttgtgtcagagactgattcttctgccctttctgtttgccattctgtgtctctgtttcatgctcttggcaagcctggtaagtatctttctctatcttctagtaagtccttgatgaacacattcaagagtcaagagagaatcttgaattcattcatttgaggtcatcttgaaattgaggtcctccttcagatcctgttctggaggccagggataaaagggcaagatacagtccatacctctgtgggcctcactgtctaggaagcatcacagatgcacaaatgcctaaatataatactgtgtgcatatgcagtagaactacgcgagttaatactgtaagggagcaggtgattctgcacggacagcctgggaagcccacaggaggttcaggagttcggcagaagggctcctgtagaagcctgagggagggacccagcctttatgagtagcacccttccctttccctggagtaacccctggctggtagtgctgatgtgagagcccagcgaggagggcggcatgtggtccccgacctgctgtggcggggggacgtcagcagcggcagcaggccggggagttagtccctaggcgggggcttgagagtttcttgctggttccaaggagtcggccttgtcctacctctcagatcacctttccagcagaccctgtgggcctgtgctctgtgaggtaaggagggttaccatgggaactgtgacttttgcgtcttcttactgagcttttcatattgtcaattccaaccccaaacatctgccttttgcatgtttagagtccttaggtaagcgtaagggagtgccagctgtggtgtgggatacagattactgtcttgcttcctccagctctccagcctcatcaacatcaatgtatctccaaacatgaggaactggagaagctagggagcttaataaacacgataaattaatcaaattataccagtgtgtcagaggggtggaacgtactgatggcgcacaagcaagattgttgtgtttgaaaccgaagacagaatattcaagatctgcttctcatctcatttcataccagttcttttcagatcatgggggagaagtgtgatcacagaggatcagaattactgggaggggatttaagcattctacacacccctcctctacccaggattataatatgcatgccagggcaggggaacgtcacctcttctccctttcaggtcattactggaatgtggtcatgttgttaaaattacagcctgggcaacatggtgaaaccctgtctctacaaaaaatacagaaattagcggggcatggtggtacacacctgtagtcccagccacttgggaggctgaggtgggaggatcatctgagcccaggagatggaggttgcagtgagttggcatcatgccattgcactccagcttgggcgatagagtgagaccctgtctcaaaaaaaaaaaattctgtcatatcttttaggtgtgtgggcagaaaaaagattgtgtctacttgacttaagctgctacgtatacactgatgacctctgtgttagtaaggctagactaagctgggctgtaataacaaacatgactgaaatttctgtgacttcatacataatttttttttttctttcccacacaaatgtcacactggatgcattggctttctaggacatcttccttttaagcagtgactcgggaatcgaggccacttccatcctgtaacgacgccatctggagcatgtggcttccaggggagcagtggctgaggccctgcagtggcttctcactgctacagtccagagttgcacacagcacttctgctcatagtccatcagccaggagctagtcatgtggccacctcgctgcaaggatccaggaaggcagagtgcgggtgagcactagcgatgtctgttactaccgtgtccatctgagacctgcttctgaaacacccagacctgtgtcctaactacccctaggaatctccatctgaacagcccatgggtgcagcaaagtcaacatgcaacacagaactcattgtcgtcctctccccaaatgtgccctttccgaagcttggctaatgacaggttgcttgagccagaaacaaaggaatggtcttagacttcccttctgtccgcattcccccagttccatctcacacatgtctcctgagagcttctgccctctgcttctgtccgccgggctggtgctcagccagtgcacgctgcgtggccctcctgactgtagaagagcctctcttgttatggggagaggacttctctgtcttccgaggacttaggccgagcattactgcctgtgtgtacttccctgaccgctctgccctggcagaatttgatgctcaacaactgtggctctgagggcacagccccgattgctctggggtagagctttttcatcgttgctctaagtttcttaaatggggaagctctttaccaagtgaacctggttctgtgagtcttgtatttcctccttttaaaaaataatagttgttgttgaatgtgtactaagggacaatccaagccctcatggagcttacagtcttatgagagaggccaaccatagataagtaaacaaacagatgtacaactgtggctgggcacggtggcacactcatgtagacccagcttctcaggaggccaaggagggaggatcgcttgagtccagtccgagaccagctcaggcaacatagtgggacccaatctctatgaaaagaagaaggagaaggagaagaggaagggaaaggggacgaggaggaggcagccaaggggaggaggagaaggaggaagaggaagaagagaaagggaagggaagggagggaggggggagggaaggaaaggagggagggaaagagggaaggaaaggaaatagctaggcatggtggcatgctcctatagtctcagctactcaggaggctgaggcaggaggatcacttgagcccaggagttcaggaccagcctgggcaacataatgagactctgtcttttaaaaaaaattaaaattaaccgggtgtagtggtgtgcacctgtggtctcagctgttcaggaggctgaggtgggaggatcacttgagcccgggaaatcaaggctgcagtgagctgtgattgtgccactgcactctagcctgggtgaccaagggagaccctatctcagaaaaaaaaaggtataattgccaactgtgggaagtcctaagaagaaaaagagtaggctgctgtgaggaagagagcccgtgtgtttcctcttcccaggatccactcctctgcctcctctgcagaggaaaagtgaaagcctcattttcttttgaggctctagacaaagggtctctagacaaagatggggtggtgtgtggaaggtttcctgattgccagtagcaaggctggcaggaggctggcttatatgaagctgaccaatgaaatgatctacagccctcgttaaaaaagaaaaaatcaccagagaagtgtctgcctggcctggtgtcctccttctgccttgagcttcctctccatcctctgactgagggactctgagtatgtcactctgctcctgcaacccgagggagccagcggctgttctcaccagtgcctactgacacagcccttagtctcgtgacctggggaagaccccagcaatgacatctccacaattcctgtcagggaaatgaggtcattgccactcatggcccataggagggactccctggtgggagctgggtgctctcctggacagcgagccggtgcgggatggcctgagatgcaaagctccttctgctttctaaagtgaagttcactttatccacgatgcctttcagtaggattcccctgagcccgtactttaccccgagtcagtggactactgtggtggggagggtggaggaagggaatttggaaaagtgggaagctcactggccatttgaaaaccagaaaggaaaatgaaaggtctttaaaatgatgcttttagtcattaggagcatacgattcagtgaataaaaatagagtttcatgtccgtttttaggtgcatagcaaggctgtgctgggagctgttcttccgcccagtcttatatgaaccagaatgttacttagtgtcgagcacctcctaggtaacaacacaaaggagaatgaggccaggagcagaaccaggccataatggccaggcagatgctgggggaggagacgctgcgtctttccctgagccttcctggtattttctttccttgaggagtagcagctacactctctgtctttggccccagcctcacaaaagttagccaggggacctaaaatgcaggggagatgcggttccctagtgggagagctctatgacatctctcagggtgagcatctccactgttgggagcaccgtctagagagccagagctcctgatggacttgcaagatgtgtaccaggacgccaggatcagggtagaggcatggagaggtgccaagtcttgaaagtaggggtgtcgatcagccccggggggctgccaaaccactcctctctaatgcctaaagcccctcacccgatcaggtgtgtccacctagctctctagccacggctttaagctttagtacctttcttcctcactcacccatgctccaactccactggttctcctccccgctttttaacagaaatgtgctaaatgcattccttgatttttcactagtgactccctttgccctctttccccaaatctttgcatttctgtttccccacagttcaagtttcagctcaaatgttgccttttgaaaagcccttccctgactatccgatgccagtagctctcacaatgtcacattctcccccatcaccctattttattttctccgaaacacttactgccatctgaggccatcttgtctactctgtaagttacaggagtgggacccctgcctgtctttcccctgccttatctgcagtggctagagcagtgcctggttcacagtaggggtgtaataaatattcgttgaatgattgaaagaatgcaaagttgttagtcatgaacagggaaggcatccatgtcttagaactttgcagtgtgttgttgctggctgcgggtactgttgatgggacactcactcagaggttccggcttggtacttcccctggccccggagagaacctgggaccgtgctcacgttcagcagtgcccagctggtaacttcttggggcagtgtttttcctcctgagcgaaacacttcgagcagcatcttgtttctgtttttattccagcatggcaagcctctcgttaggtgcaggaggaaaccttggtgcagttccaggtttttcttttgaaaagcagaagggctctgtctgtcttggagcagaaaatcccagatcgcctgggctagaagtgcttttgaccaattttgttaatgttaaaggaattaaagttaccaaccatcatgatggtacttaaaatatgaatgaaggtacaagtgttttaaaaagaaaacaaaactcaaactggctcccctggaaaaggaacatcccttttccttttggtacgtgttcagcgtttctgtgaccacacaattaacgcctggctttataactgaaatcacttgggaattcttttaagattgttcaaatcttccatcactgacagttaccaaactctgtacctggatgtttatcacttaactattaatgactccagtaaagtcacaaataactgttgtatgaattgcacagaggcaacctcatctcttgatattggactagaatattcagaaagcaaatttgccctgacctggcattctgggaaccagaccatgaatacagacctgtggggaagcgacctgttttggaagaggagagaaagggcagggcatggcgtctctgcctcatcagagcagtacacgctttttgtttgtttgtttgtttgacatccatggagatcgggaaactgcaggtttaagagtacaatcaagacaccaataatccagataccacctgcctggataaggttaaaatgtcttagtttccataggaatgccaaagtttttcgttcatgcaggcgtgtaggaaattaaaccccaagaaaggccaagtcagatttcttaatccaccccaagtgatgacatttgaagtctgggtttatggttggaaagtgaccgggtaaaaatagcactgactgactcaacaaatacaccatctcgggctcccagagctgttgatgtgtgcggacgctggtaacagaccccagggcttggccgttcagaacctgccctcctgtgggaagggtagggctgccaggagaacttaggcttgcctgtggcatctcctgcccaggtgcccagctctttccatgcccagttcccgaagcgtgcggtccaggctcaccctgtgcctttgctggctgttaactcagagggaagcccgttggctgcttttgctgttgggtttggatggtctgtatcactttaggcagtagcaagttcatcaccttccacctcattgtctgcagtgaggtttacacagtcatttaaatctgacaggaagggaattgctttgcctcagtttacctccctggacacagaggtttgactgaactttcccattcatgagctcgtgtcctcacctatttctgaggctgctctttcatggctggattactttttttttttggttaagacggagtttcactacattgcccaggctggactcgaactcctgtgctcaagggatcctcctgccttggcctcgcgaagtgctaggtttacaggtgacagtcactgctctggcttagtgggttcctttaggcctggagctctgagaatgcaaattggcctctgggaaaggctcagtctctggaggcttgaggatttttctaagctgctcagatactcagagcatctgctctttccaagatgtacttggcaagaagagatggggaaatgtagcataaatacagctagatgaatgacaggaaacgaagccaggtgagatgaactctcagcttattgtttgatttttctttgacaaatgcatttggaagtccagtcaaccatcttgtggtgaagcaggaaggttgcagaagcttggagcggacttggcttcggaagaaggttgtataaataggtgcctctgttgactttgagaaggaatcctaaagaaagttgcggtcatggctaaatgccttaaatctcatgcacattgactaaaagatgggtgttttctgtgaggtagttaattaatttcttttaaaatgttttcaaaagcaatatatgtccattttggaaacatgaaaaatactttaaaaataattgcacacttattccagtggtattttgtatattttcttctggtttcatatgtgtgtgtatatacacacatatatataaatatatacattaacggccaggcgtggtggctcacgcctgtaattccagcactttgggaggccgaggctggcggatcactgagattgggagttcaagaccagcctgatcaacatggagaaaccctgtctctactaaaaatacaaaattagccgggcatgatggcgcatgcctgtaatcccagctacttggaaggctgaggcaggagaatcgcttgaacctgggaggcagaggttgcggtgagccgagatcgtgccattacactctgggctgggcaacaagagcaaaactccatctcaaaaaaaaaaaaatatatatatatatatatgtacacacacacacattaatatacatttgacacaccgatactcctacatagaacatatattacaatattatatagttataatttcaaatatttatccctgtgattacaaaagtgtgtgtgtgtgtttgtatatagtagaaaactaggaagactatagggaagaaatttaaaatacagtcgctcctttacttatggggggggctatagcccaataaacctatcgtaaataaaaaatatcctaagctgagaatacatttgatgccttgataaacccatcctaaagctgaaaaattgtgaagtggaaccgcattgtggcggggaccatctatatctgtgtcccactgtggcatgaggggacgtggcagctggtctccaaagccgacccctaagggagacacctccctgtacgcacacctttgtgttggtccctctccctgagtctgggctggcaccgtggcttgttttgacaaatgggatggagtggaagtgatgccgagtgccttccaaggctgggtcacaagaggccctgccgtttcagcctgggtctcctggaacactcaccgtggcagacttccccttggacccggctgccgtgccgggatggagcctgaacctcagggagagcccacgtgagctcatcaggatgacagctctgctaagcgcgttgccgcggccagcagggactgctgcgacctgtgtagccatcatggtcggccagccaggctgagcctttagaggcctccagcccagccaccgtcttactgcattcgcccaaaagacccccacaatcagaccctgctaagcctaggggacccacggaactgtcagggatagtaatacactgttgttttaagccactaggttttggagtgatttgtttcccagaagtaggtaactgcacagggagtgggtggaatcagaggtaagccctgtttaaagggaccacattgaggcaaaagagctcagactttgtgatggggatggggactaacttgcatttctgctggtcactcactggccgtgtgaccctaagcaggttattacaggccaccgtggacctgaattttcaacatttgcaaaatagaaagtgagggcctttcaaatattccaggggctggcacacagtaggtactaaggaaatgttagtttccatatggtgatatttaatgatcatgaggaatgttgcagaagagaggggagctgtcagtagtaaggcaggtcccagcacctcccagtctctggttctccttcataggcagggccctctctcagcagggcctgcccatgcttgctgggtgactggggagcagggctgctgccctcaggaccagggtaggatggaagcagctgcagcagtggcagcagaggatatttagtgaaaaaacctccagtatttgcattttgaggctaggaaagacactatttatttctgaaccctcacatttagcatagtgcttggcacatagtagggattttgtggcttgcttagctgggcatgggtgagaacaacgcagtagagtatatctcctgtgtctgatgatatatttgtgctgttctgagaacaaacaaggtatgagtgaggggcaaagaccattcctgttcagaatcacagggtggtagggctgggaggagtctcagaccacattcatttcaaacccctcatccttacagtctgcgacagctggggatggcttgcccatggttggacgcagtgccatagccaggccggtgagccacggctctatcccagggccctacctactcacgcttgcctaaaatccctcagttcatattttgtgaaataatggagagcccatgtcaacagttgtttaaaaaaacaaatagaggaaagaaaaggtgttctggtgctgcctgtggtatgcagtgatcatttcttcatcgagtatgagtggacagtgatcccgtatcctggagatttttctaagcgggtcattgctgcctcaagtacttggatgatgggcccaaagctccagcctcagcagctctgacacttctgccttgtccagttcccctgcctcaggcaccacggagccttctggtatttgcattttggggaatactagaagggaacaatatgcttggcacaacctaccgtaagtgggtgatcccaggaagctcttcttggctgggcatgggtgaggtcaacacagtggagtagaatgccagctaataaatgtagaaggagtgaaggcattggaaagtcaccttttggcaattgacatagctatatatatatatttgagatggagtttcactcttgtcgcccaggctggagtgcagtggtgtgatcttggctcactgcaacttccgcctcctgggttcaagttgttctcctgcctcagcctcccgagtagctgggattacaggtgcccaccaccactcccggctaatttttgtatttttagtagagatggggtttcaccatgctggccaggctggcctcgaacttctaacttcaggtgatccatccgcctcggcctcccaaagtgttgagattacaggcatgagtcaccgcgcccggctcaacatagtaataatttatttagacaagaatcatcaatggaggctaaaacaaacaggtaaacatttgttaggagatgggatattgtcagagtcttaagtattgccccacaaaatgttgttgttacaaagagaaaaatagtagcttgactgtgatcaaagttaacgtcacagtgataggacacactggcaccatgtgcctgccgacatggcgctgcgagaacgcagtatggcttccgtggctttcctgacaaagatgcacagcctgcgtctagtcaggaggaaacatcaggcaaacccagattgaaggacttttactagataattggcccatggccgggcgcggtggctcacgcctgtaatcccagcactttgggaggccgaggtgggtggatcacaaggtcaagagatgaagacgagcctggccaacatggtgaaaccctatctctactaaaaatgcaaaaattagctgggtgtgctgggcacctgtaatcccagctacttgggaggctgaggcaggagaatcacttgaacccaggaggtggaggttgcagtgagctgagatcgtgccattgtactccagcctggtgaaagagtgagactccatctcaaaatcaataaatcaataaaaaaaaaaatggcccatattccccaaattgtcctaagtcctggaaaacaaagaaagactgaagaatcatttcagatagaacacgtgggacaactacatgcaatccggggccaggaactgtgtttttgtttttggacaactgacacattttgaatgggactgtggatgaaatagtattggggtgttactgctagtgtcctgactttgatgttgtactgttgttctgaaagagagtgtccttgtttcttaggaagtgcacgctgaaatatttatgagtcaaaaccttgttttctctttgttttttgcactcagctgcagttctgtcagtttggtgcattgtattttatgtctttaattaaaattaaaataactcaaatgttatttaattagaagaaaaactaatgaattaaatgaaattaaaatttaattaaaattgggaaatagactaattagtgctgaagtgcagtttggtaaacagaatctttgcaatgatggagtctgctgtgggaagtgactaagggggtttcttggtggtgaaatgtgtggggacttctgctccatgggaaggggagagtctgtatttccaatgaaaattggagcctggattctcagcacaggggccagtcctggacttccccaccttcctgtgtcattcttatcagactcataacaggaggggctcctctcaaccttggtaaacagagatgaaagcaatgaaacttcacctgtcagggaggaggcagctagagaatggggacagtaagccctgtgtgtgaggattcaatgaggcaaaatatgtaaagtgtgtagtccagtacctgagatatagggacttaattatctcctagatgatgctagatcgtccatcttttttagaagatatagtatcaacagcactaatataacgatgatgatagatcgtccatcttttttagaagatgtagtatcaacagcaccaatataacgtgacattttgttaggattcctggctcaggagacaggaaagctgaagagccatttgaccattggctagtcagtttgcaaactgtcacagggtaaaagatatttgctactgaaaagattaaggccatattttttcctcctgctagaaaaggtcagagaggtatttctggactcataaagtggagaaacatttttctgtgctgtgatgtgggtttcttctagcacaagggatgatgtggggccattctttccacacccctccatggtcccagggagaagtcaggcgctgtggctgggggtggacatcttcctctcgctgagaagccggctgttctctgcctggtcctatttgccctttctgggagaggatctcaggagtttgcgcctctcttggttgttggtgcttccgccgtagttggctggaggaggctgaggaaaccctgtagcctgcgaccctgtagaggatggtaggaggctggagagcaccacctggagaagaatgagtctgctgggggagaggaactgagacagtgtaactccagggaagagtggcggattcattgttcacaatggggagaactgctgccagaatacagagaccttcatgttagagacacgaaagaggtagccaaggtgctagaacttgaaaacaaaatgttttcatgtgtacacaggaaggcggggaagtccaggactggcccctgtgctgagagtccaggctccaattttcactggaaatacagactctccccttccaatggagcagaagtccccacacatttcaccaccaagaaacccgcttagtcacttcccataacggactccatcattgcaaaggttctgtttaccaaactgcacttcagcactaactaatttgtgtttgcttaggcattgtagtcaaggacccacagataagcgtccacatccatcatgaaatgtgttttcagtgtcagaatggaacaaggtcatggtcacacaagaggttggccatcagaaacaatttcaggaggtgtcaaccatcttggtatggtatgggtaccccaaggtgaggcatcctgctcacagaactctctgggcattgcagaaatagttgtggggttgtgatcctactctgagggtctgtattgctggtatctggccacctctggcctggtcctccttgctaatgaccatgcctggattccaagggacccagtgggacacaaatgcagggaggcaaggcagggaacaaagaaggaacaaagtgtgaggcaggggacagaggacagtagtccttcaggatggcagcctggggctggcaggcacggatcttgttgatagaccaactggggacagctgagggctgaacaaaggtctggaggggaagcaagcaagagtccatgcggaaacacagcagcggctccactgcagcaaggaggctccatgaacagggaaaggggatctggatgtggggccagtgacatggacttagttcccatcttgccactagtgaccatgtgaccgtagcaacacctaatctctttgggcctctatttcttgatctgtaaagtgggtgtagttacttcttgccttctgtgggagtactgctagttcctgctctatatcagttctttcctttcttatttacaactgcatcccatttatttgggggtaaccttttgcccataaaagaatgcatttcacagctttcattgtagctaagtgtcgtcacatgactaaattttgtctagtgagctatgagaagaaatgttaaagacttccaggaaggatgcttaaacagtctgcctcattgcaggaagcaaagtcagggtgtcttttctctttggtcctttcagttgcctggaatgcagccaagttggctggagccccagcagcccctgtcttgcaccatgaggtaccttgaggatggaaatgagatctaggatagcaaaggagaaaagcagaagtcgtctgggtctttgataacttcatggagcagccatgccctccgtggatgtggcttagttatgctcttctctgtgttgaaactgttgctgctagaggtgttctgtgatatgcagttaaacccagtccacatggatgcacctgccccctagggttgctgtaaggatcaaacgagttaaagcatgggaaggagttttatgggctgggaatgtattttgaacgttgcaacatgccatagaaatataaggaattagtcctatcattgtcattgccatgtgaatcaatggaaggggcaaggctgcagtggacaggccctgacagagtgcagggccaagggcaggagcaggtgtcaggggacagtgtggggatgaggagctgcaggcagcaggatggaacctttgttagtttacctaattttagactgaatccataaggtggcatgggctcaaatgccactcaagagggagagagtggttggaaggtgagattagaaacaggagcccataattctgataaagaatctcaaaatggagaatttgaaaagttgcactgtgacagtttgggcaaccagtggtatctgtatcattattttcagaaaacacctgataattctatccaaaaaggattgctttctacagcttctcccccaggggtctctgaaaaaaagcctgttggtgaagaagaaagactaagcatcatcggtctaactgttgtgaacagagtccagatgtgttcctgcctcaaataggaaagaatttaagcttttagagacaaaaaaaaaccaaaaacttatagcagacacgagagagatgtgaactatggaaaggccagcagggaccatggacatccttaccatagaaatggaagattttcagatctcaaattccatttcccctgtgtattgaactacatcaatccgtgcgtaagccatcacttcatattggcaatagaagcgagagggaaatttacattgggtgttatatgtgctgtcttatgtaagtcccccaaatttttcagccaagttcaaaataaattctgtcctatcctaaaggatatgatttatacctcttagcagaaggtgctaaggatgaggaaggagactcatgttacactgttgctgaagcaaaaactgtgtcttctcatgataatttgtttggtccacaaaacaggagctgggcgctataaacaatgccatggctgagccatagccaacacagtttttcatgcttcattttgagagggggcgagtaaggcctgaagaaagtttgttgtacagcgaatatatgaaactggctgtggttattcatttcaacttcctggacccaaaaccttttaccagagctgctaacaggttgcataaatcactctatgaactctgtttcctttctccccccgaccatccgaggaggggcaggctgctaatgtggaaaacatagattagcacagtgagagtcaaggccttcctgtctgggcagagcctgcaaagctgagcgctggccgtatcctggctgcccaggagcccggaaggcagggcagcatgggcagtgaaaagcaggcaccaggctgtcgagcccaacagacggggtttcgagccctaccactgaccagctgcgtgatcttggattattatacttctcgatttcctcatttgtcaagtggaattttttttttttttttttgaaacagggcctcacttggtcacccggtcacccaggctggagtgcagtggtgcgaacacagctcactgcagcctcagattcccgagctcaagtgatcctcctgcctcagtcttcctaagtgctgggattacaggcatcagccactgcacccagccaaatagaaataatattaatctcagggctgggcgtggtggctcacacctgtaatcctagcactttgggaggccaaggtgggcggatcacctgaattcaggagtttgagaccagcctggccaacatggtgaaaccccgtctctactaaaaatataaaaattagccgggtatggtggcgtgcctcaggaggctgaggcaggagaattgcttgaacccgggaggcggaggttgcagtgagccaagatcgcgccattgccctccagccagggtgacagagcaagactccatctcaaaaaaaaaaaaaaaaaatctatatatctatatatctcatagagtgtttagatgattcggtgatacaagggcataaaaccctttcttccagaagtttctctattggtctttgtcaatgaaagagaatcccaatagtcttcatgcttcttggggatgagggtcttgtgggaggtggtcatggttgggggttctgtccatgaagccccagccactgcacagagatgatctggggtcgtctgctatcttcacccttgatgtggaagcatttctggctcataagaggactttaaaagggacttcagagatgtccgaaggcttttctcagaaatgtgtcgtggctcaagcaaactatcgagcgaggcgaatctgtaattgctctccaccctgagccttttttgctgagttgtcttaaacaaattaccgaaagtctctgagcatcaggttcctcatctgaaactggaagatactaaccaccacctcgaggagacatgatggaggttcatgggctgaatcagcatgcaaagccttcccagggcctggcacacagacatcccttccctgctcctagagggtgaacatttgtctggtcaggctggaggagcccctagaatctgtggccaaggcgcaggacccttggcaagctccccgtcttcctttgtagcccctattcctatagtgagccagctgccctgtggctgggccttgtcctgggagggaaatggagaagagcgctttgacagagaaacatccagcccagaagcgacccaagtttctgttggatgtgagatccaccaccgccaattccaaccgcacatccccttggggacacgccctgggtctgtgcgtcgcggggcggaccctctaccacatgctcagaccctccagtgcgagaagccagcctggtctggctggtggagcacagggggaccgtgcctgtcccgtgggcctcaaaacaactcctctggggtcaggatcctctcactgttaggggaagtctccacccctttcagttgccctttggctcccgcaggccagaggtgctcctgaacagcaatttaaaaacaccagagtatgataaggcaggtggcatattgctgcaatatttcaaagtggacaatgggaaaattagccccttttccaggcagctgcttccaggtcctcagcctcaggacgctggagtcacatagcttaatgctgtcatcatttccccttctccctaaaccctctcccagttagtggaatttgggctgatgctctgcagtgaaagccctctaatgtgttgtaaatatttatctctgcaaatctctgaagccatttcaaaacagaaagacagaggaggcgcttgcatggttcacctgcccctccctgaaggcctgttgtgtttcccaggacagtaggcactgtgcttacctgagcatgtcttttctttgcatcgtttcttgatctattttgttgcgtgttgctttttgtgtgttaagatgtgtctgctaagaattgtttctggggataggagaagggaaaggagaggacagaaggctcactatttttttcttctggatttttttttccttttcttgtttatttttgggtatcattaattactcactctgggttgtaattccacccatggtcagatgacatgcttgtggctggtttaattggatgctgatgatgagccgagttggcccaagcatgtcctgggagggaaatggagaagagcgctttgacagagaaacgtccagctcagaagcgacccaagtttctgctggatgtgagatccaccaccgccaattccaaccgcacatccccttgggaatgttgatttgaaaatctcccagctggtactggggccgtgcatgtggccctctgtggtgtaattgtacggaagcatcggccgccagccaggcctcaaacccaggcagaagacataggtgttctcagccctgaaaatagtcccctggacagccaggagctcctgaggagtgctgccagggccgtgacggcaatgatggtgacagggtcttggaggtgttgaaagctacacctttagcttgtactcacttgtcttcatgctgatatttccatgggatgatatgcagatactccacgagctagttgtgttgggtgcctggttagtcctgagcacaccctttggtccattacacaatgcattctgctctctaggagtttatggcctgtgttgggagtgggttggaggtgacggggctaataaacacaggagcattaactagggagtcagtagacctgggttctgagatcagctttgccacctagcttgcgtgtaatgcctgacaagtctctcttcttggccctcagcttcctcatctgtaaaatgggtagagtggcatcagttataaccagtgttttcagatctgccatgccattctttttgttgcgttttctcaagatttggacatggtggacattcaggcagccttgggtgctggccattcttgtgagtcttgtagctgtctagtcttcctttttctcattcttcctcatgattcttaggtttcatgtcttcctggctttgggggcagttatctcgttcatttattccttacatttcagtgatcctactgctatcatttcagctatcctccaaccagcatcttctctgcgatgttacttccatggatcagtctcattttgtcctcacaaagccttcagcgttctgtgtaaccctcttgcccccacatatttcccacagagagacagctacctcaaggaccagaggccagaggaacaggcccctttagaaacctcatcctaatgaattccagcattcctagtaagcatctttctcttcagcagtgacatttacaacttggcgtcttatttcataattacatgaaggggctaacctcctggacaggtgcccgcaggacagtgcaggctgcacaggggcctgttggcctccgggaatagaaaggagtggcctcccatctcagttgttttatatctgtgtgaatgggtcactttgtgctggagttgccgcctgtctccttcctagtcggtggacctcacctggtgaagtgttaccaactttaagcaaacccttcctggaaggtgctttaggaaggaggagttgtaaataacatcgaagcagctcagattctggtgtcttaggcctacataggacctttctgggtttactcccagttggtccctaaagcgcaggggaagtgctcaggtttactgaagggtatattaagacaagatgaagatgctcatccagaagcgtctgatggtcctgagccccgccctcccagcatattcccattctcaaggaatgccctctccagaagggtggtgagacaggtacgcgggtggccatgaccacaggcaggcagacagccatgtggggagcacagagcaggaagccatgactcctgcagggcctgtctggggtgtttaggctgctgcttgcagaataagtagagtttagatggccttgaaagagagagcacctgtagcaggtggtgggctttcgatgtgatgattgacaggctgactaaatgcacggcccttcctcccatcaggagtttctttagttagagcaaaattatcccaagttccttaaattgcctttgcacaaattctacatttggccagtgtggtgctgtgctccagaattctgttcctcaaggtctctaggatccctgtaacactgtccataagctatttcccacacaaggcacaggagaacctccccattttagccaatggaacagctgaggtgcagagaagtaaaataactttccctgggtcacagggtcaatcagcagcagaactggaagttgcactcgtgtgttctgattcccaggccgggtaccaggaacttgctctcgctgcttcatcattgaaccccatgcgccccctctttggacctcccacagctgctcttccatttcaggcttcagcactggcccctccctctgttttttgccacccgcatgtctctcttgagggcagggtcctggtcagcttggtgcctggcacaacacctaggatcctggtcaggctgggctgggtgaaggataggggaatgaccttcgccagtgcctccctcctgtgcttctagcccggagtcacctggaggtgatggaagcagctcttaggtgccaggtgattgtgacattgaagaatctgggctcatcctgtcttttaggcagtggattaaaaacactgtggtatctgagatcattcagccgtttcgctctggtcagcatcttcacttgacacacatctgggtttgcagaacgcactgataaaggcctgagaccataatgttttttacttctctcttgtgtgggttatttatcacctgtgctccaaagaggaaacacctggatgctttgagggttttttttttttttttttttttttgagatggcgccttgctctgttgcccaggctggagtgcagtggcgcgatctcagctcactgcaacctctgcctcctgggttcaagcaattctcctgcctcagcctactgactagctggaattacaggcacctgccaccacgcccagctaatttttgtatttttagtagagacagggtttcacaatgttggtcaggctggtctcaaactcctgacctcgtgatctacccgcctcggcctcccaaaatgctgggattacagatgtgagccactgtgcccggcccgctttgagttttatgtagggaagcagggtgtccacataaggtatcatccaaatgagatacttttgagagtgaaatggtgcacggttaacagttacatcaggacagcaggccgacactggagcgtgtggtcgcctagttttaagcaaaatggatgtctgcagttggaagaaaagacacgggtagtcgtttgtgaagactaatagtgtggaggggttgctggtagatgaaaggccttttgttccagcggtaactgtgcatcattcactgacaacagtaagagtccagtgcccttttctctgccctccacttcattttctgtccgtggccgagcctcccaggaggtgtacctgtgtctcattgtccttttctctttcccgcagagatcctgcagatcattcagctggacctagacctgaagtttaagaccaacatccgggagttgtttgaggaatttgacagtttcctgccaggcgccatcatcggcatagcccgggagatgcagccagtttacaggtgcgtcatgactgcaggggggccgcctccacgacccctccccacccttcaccctctctcttctgccagccgtgacagattgggatttagtggcgtccgatccttctgcacttagtatcttgggaacacattggtacttattgcttacagttgattgtatgggcaggtgggtctatcccaagccgtaggtgctacctcattattttgttggagtttgtggcctttttcttctgaaaagcccagttgttctggttgttggatctggttaagctcagaattttaaaatcttgggctttgccttacggaggaagatttaacttcccttctactgaccagctgggctttcttggcctgtgagtcaccagtgacccccattctctattagcagagtgggtggattggtggtcttgtagggagggaagacgtcagaacacagactggcatcagtagtcagcacgaagaagcgcattccgcatgatgctgcatttgattgtcaagcctgtgtcatggagaaactccaggactgagaaccattctggaatattcactgtagcgttatttgtagtagccaaaactgaaaacgactcaaatttgctacttagcagaatggataaataaaacgcattcattcagttgagtgctatacagcaacagcaaaaaagggaacggctccatgcgacgagagcgaaaccaaactggaacctttagggatgcacatgtgcaggtgcggagaatgggaaaggagaaggggggtgatgcttcccaaagccggcgtggcaggcggtggggggcgtgggggtgggttggctctggagagctgcaaggtctcagttccccacttagcttagcttcatgtttgcatgcacttttttgtgtgttcttgttctacatcttgtaattaaaaaaaaaaaaaaggaaaggaacagctgaagcgggttttgattacaataaaccaggcctgtggccctgggcctggagagtttcatgttgctggctgtttctccagcgggtagagcgatagcacacccagagcagagctgccgagtttgttcggaaagggctgggattttgctgtcccgcaggcatgccccgctctttgttctcagtgcacaccgtgatgctggctccctgccgaccttcctggagggaggcccagtcgttggagagctgcagagtacaggcaactagtgagtcaagagcctgtgtttcccctcagaaagagggggtgaagaggcagcttcagctcggttgtggctatttgcatgacccagatcacataacaggaaattcctgcaaggcccctaaatgagctgataactccttgggccgtgtggacttttctcccttatataatcctctcacgtgtggccccagagtcactgggtaggcctcttcctctgaggtcaggggttggcgacttgagagggtttgggcagacacctgccatcttaactgtagaagactccccaccttcttccctccccttcataccaggaagatctgctggggtccttggtccaacagagggaggtgatagtggtcgcagcagtgaatccatatgggtccgtagcaccctcacttcctgcctcttcagaagaaagaatttgaggggcctcaggcagagtgagagaccaaggcaagttttagagcaggagagaaagtttattaaaaagctttagaccggaatgaaaggaaataaagtacacttgggagagggccagtgggtgacttggagatcaaacgtgctgtgtgacttttgacttggggttttgtacattggcgtggttctggggtttgcgttactcctcccccggttcttccctgagggtggcctgcaagcccttgggagggagcgcagtgtgtttaccgaggttgtgcacgcgctccctggagaactcaaatgaagtaacagtggaagtttctgttgcgagagagaccctcattaaagagcatttcccctccctccctctctccctcccttaatcttcattcctctttgtgttttctttaccagatggtttgtttctgtgatttatttcctggtttcttcccttaccagtccagccttcctagaggagggttttgcctcctagtgcacatgcctcctagtgccaccgttttgcctcctagtgcacatgcttgagcccacgtgcccaactcctgaaatcttaccaggaagctgctggtcgtcagttccaggttctttctatctactgggaccctccctttccctggcgctggctgcatccaattatcattttagagagacggttgacaactgcctgaccatcagctgatggtcgcctgacattcctggtggtggtggagccctctcctgccctgctcatgtctgactagctacctactgtaacaatacagggagcctcagagtcccaagccctagatactagtcccagctctgccaccttggggcctttgttcccccacctgagaaggagaagagctgagctctaagtccccgctccccggctctggcattgggggttacagcccttcggaccctcattgtcctccctccgtctggaagttgcctgtctgctggtgagctcttcagggatcggggagaactgacgtcatggggtgtttaaactgggctaagtattaaatgcagttacagcgccaatgccttcaaggcctgctttggaatcttctcatgtgatataaatggaaacttggaaacccatcgtgcttagacaggattggccagaatttgtattttctgtagatctaggattttataaacagtgcaacttaaaatcagtttaattatctggacttcctgaaagaaagctctgaaagattttagattcgaaatgaaactgagtttttctaaccctgagcatctttaattttcattatgtactatgataaccatgagacctccgctgcagcagagtctgaagaatggcgtttgcagggcctgggcactcaaaaatcaacagagacttatactccttttcatgctccctccctccacccctcagctgaaatgtttccagagacctttaataatggagtctgcagatgacagccctgcactgcctgccgcgtgccccgctggctctggggaattgccttgtaacgtttgcagtctcatgctggggctgggaatggcttggtactggctggccgacaaggaattgagcatgttttttgccttctttcacaagaagactggggacctctggggacctgggagatccggcattaattatctgctgctttggagtgttcacctggctggcagtggggctagggtggggaggctgagagaaggaagaggatgggaatggaaggggagagaggaagcagggacagcgcagcccgcctttctcttgagcaggcggtctcggcccttgggcttggccattgctgcggccgtcagactgcttcccacagaggtcccctcttgcccctgcctgggacttccatggaactggcagtgggctctgaccaccaaggggtctccccagagaggggagtgaggtggacaagtgttttattttaagaagaacatgctagcatctatatgaaaggaaaatttaaacacaaaacagcacaaaaccaaatcttgactaggtaagcagacacattttaatctggaaacttgctgagcaggaatagatttggatctccccagctgtgtcatttttatagtcacttgtcccatagttactttacctcaaaagggcacattttaagtcatttttatggcagtctcctctgtattgtgtgccatgagtgttgttagaagcttggaggaggtgcgggaggagaagttattccccactgtccatttgacaaatagtttttttcacattgtttcacagttccccctccccagatttttatattttctgtataaatcttacaggattttataatcctaggtccatggaactgacagtgtgttctggaaagtgacacagggatcgtgggatattagtgtagggagagaggagcctctctctctcgggtccctgttgagattctgttgcgtccagcatccgtgaccttccccatctggaaatcatagcgctgtagtcatcttggatggagcgtcacccttcctttctctgaccttttctctgtctcttcatcaggagctaaacccctggacaggtcctcagtggtgatgtgtttagttgggataaggggccaagaggagaatctaaaagatagacaactgtattttgtaaagatgtgccattttgaatttgtttcctcatgaaagtattagaaaagtaaacggctgtgccctctttatgtgcagcctataacaattctaaaggtgtggcagcaggcgaagaagcttgatgtggaggaaatagcattcggtcgtactcagaagtgaattccccatgtgacactttgtgagtcactggattctctgaccctctgttgtttggtctgtaagtgggatacatatctctaacacagagaattactggagaactcaaatgaagtaatagtggaagtttctgttgtgagagagaccctcattaaagagcatttcccctccgtcactccctccctccctccctcccttaatcttcactcctcttttgtgttttctttaccagtcgctttgttcctctgggcttctcctaatcaatccctcccccaggcatatagggttgccatttaaaatacagggcacccaattaaatggaacttcacataaataacaaataagtgttttgtatgttaaatatgtcccaaatattgcacaggacatacttatactaaataattgttattgtttattgtttataaataatcgtttatttatactaaataattgtttattgtttatctaaacaattatttatactaaataattgtttattgtttattgtatattgaaatttaaatttttttaatttttttattttttaaagacagagtctctctctgttgcccaggctggagtgcagtggcacaaccttgactcactgcagccaccgcctcccaggttcaagaagttctcctgcctcagcctcccgagtagctgggactgcaggcagagccaccactcctgactaatttttgtgttattagtagccatgttggccaggctggtctcgaactgctgacctcaagtgatccgcccgcctcagcctcccaaagtactgggatgacaggtatgagccaccacacctgaccctgaaatttaaattttaacagatatcccgcttttttcctaaatctggctgcccacctctacccacgattgtaaaacttccctttttagcagcagcaggtgatctggctctcctacaagatcctggagtgaacaggaacaaaggggacggaaggggagcttgcagggaaaccagggtaagagagggagggggtgggaggcagccctcaaggtctctgtgaggctccaggcttgaggtcaccactctgtagagttaggaagcccaactgtggactgggtcatttggggaggccactgggaccaggaggcctggtcatggcttggcttcaggcttcagggctcctgctgaccctggagtgatggagagagagagagggagagggagagggagagagtgtgtgtgtgtgtgagagtgtgtgagagagtgtgcgtatgtgtgagtgtgtgtgtatgtgagtgtgtgagagtgtgcatatgtgtgtgagtgtgtgcgtatgtgggctgtggccctttgttatggtcactttgtggagctggccgcctgaggatcctctgaatgggagcttgttggtggcggcataggcttccggtttcattctccccaggctctgcgggcagccgtgtgctgtgtgagccccggcccaccctgaggaggaagcggcaggctattcctgtcagctgctgataacatgccaccaggcgggaattcgcttttgtgttaagtattttaatcatgtccgctcgttcacctttttaagtcacatggttttatttgctgatggtgctgtgccagcctcgggttcttccagacgctcggaaggaaagcttctctgcaggctgcgtcatcccactccaaggactggtgctgggctcccaggggagtgttggggagggagtgagcgccagcacagagggaagaagggagggtgtggactgactacctctaccactcagttgctgtgtgaccttgggcaagtctcttgacgtctctgagccttagtctctttagctcatgagaaatggagattataacactatatgtggcagagttgagggagattgaatcagataatgtatttatggtgcctagcacgagcagcactcctgggtggtggtggcagcgttatccacagtcccagcttggccactgataagttctgtgaacctagggaagtcacttaacctcagcctcagtttccttatatgtacggttggggctgctgacaacttagcaaaattattgctcatcttttggcttctcagcatcttaacccctttcctagaatttgggaattctctgccatagaagcctgcctcctattatggaagacaaaaacactggatatgttatctcccggcttcctcgcagctagctagggtgttggtactgtgtttccctccttcccgcttctgcggaaattaccatcatacatttattaatagtgtcttatctatacagaccagtttttatggctttaccctaaacattgtaaggtatttgcaaaacagaaacagacagtattacaaagagaaaataactagtccgcaatagtgaagaacattttaatatcccagagaatattggaaaccaggggatcaaagatggggggagggacgaatgtagattgcagtatagttgcagcagaggaggaagggacgaggacagggggagagaccgaggactgtgcccgaggcagcccccactccctgtttcactgagcctggcttccactttcccccgtgcgtggggtgtttggtccctgctacgctgcacagagggtgaacatctggccctttgcttgcttccaggttccagccatggctctagccctgatctccaatatggtttctgttctgttcctggcccatggagatgtttatctcattttcaagccgactatgccctttcctcctgttgcccccccatcggatgaaaacaattgttatctaaaactcatcattaaaaagtgatacatttttgttttgaatagcatatggaggttattatttttccagaaattttctatatttttatcagggggtgtgtgtgtgtatatgtaaataaactctctatacctttgtacatctttttttgttcacttaacagtgtatcttgaccatccttatacctaagtcagccttctttgataaatgttgctggtctcttggtatgatttttctttttactatgaaaacctttcaacatatacaaaagtagaaagcatcatgtaatatttctggatgccccaatattataatatccatgcagcctcaataactatcagcccttagccaatctttgttttatgtctcctcccacccacttttcctcttcccctgattattttgaaacgaatctcagtcgtcacagcatttcgtctgtaaatgtcattttcagtctattagtttcttaaaaacacatctgctgtggccgagtttagagctgaggagagttatatgagctcatagtgtcactctgtcttcaagttcctcagtctgaaatcagttggtacaagggaagaaaatagagagaggcagcactaacctctagccaagcacactttccatctctctgcagattgcctcatgtcaggatgttagcgtgaccgtcacgtctggaaggctttatggctgatataaattcaggtccgttgttcactaggcatgaagccctccgttgtaagggaaccagccatcaccctcattacgagatgcataaatgtaggacttgaagataaaagctattgggttcttttcgtctctctgacacctgaagatgaatttcttgaaccttgttctcgtgtttaaaaaaaaaaaattaaccaagattgagcctgtcagtttctatcagagttaaatctgagtaaaggagaaaaaagcttgccaccttttaaaatagtgattccttcactccctgggagttagaaaactgggctaagtgtttttgtgtagcccgtgtgacctggaggccgtgctataacccctgcaggaattactcataaaaagggagggatgtacctgccctgtggtagagatcagaagtctactctgaggttgttatttttaaataacatcagtggaaaaggtattttaaaaggaaaactctgtacagagaacccaagcgggattgtgttgctgtcattgtgaccgtctcttacctgatggctctgcctcccgggcaggctaggagctccgggatgacgtcccaagactcgggcgcatagcgggggctgctgaagatcggagtgtgaggctgagagatgaggtccaggtggagcacgtgaaaagcttcctgtgtctgaaaacacgactccttccagttcttttgtctgtctgcacattatgagtattttggtactactgaatccgtttttaaaagttcaccacgtcgtgcctgacacaggtgtctcctgaaagaacgagtgaggaagtgaatgcgtggaaggggtgggactgggaggcagcccttctgttctgtttatgccgtgcagaccaatgccaggcacttcgatgtttgttgagtgaatgcaggaacagatgtgtagtcagagggcgtttcctccgcggtgctggccagctgctaagtcaggctctgtagtcccattactggtcttagagaagttactttcacattcagtttttgtttgtaaagacagtccatgggaaagtttgttattctcagtttgtttgtttgagacatagtttctttcttgtcgcccaggctggagtgcagtggtgtgatcttggctcactgcaacctccgcctcccgggttcaagcgattctcctgcctcagcctcccaagtagctgagattacaggcgctgaccaccatgcctggctaatttttgtatttttagtagagacagggtttcatcatgttggccaggctggtctcgaactcctgacctcaggtgatccacctgcctgggcttcccaaagtgctgggattacaggtgtgagtcaccatgcccagcctattctcagttttttatttggctcattgtgtgtgtgagccataggattggtcccatgaggaattacgaagtagaagacatgcctcttgctttcaaggaagatataacgtgagggagatagggtagataaaacttaatgaaaacgcaaatgcctgcggtgtcaacactgagtcagtactgctgtttagagatatcccatggacaagatacatagactttttgctgtaggaactgtaaattttactgagtggctcacctctccctcagcttaatattctgccttcagctgggcatggtagcctgcacctgtagttccagctacttggaaggctgaggcaggggggtcacttaagcccaggaattctgtgggtgtctgcactaagtttggcatcaacttggtgacctcctgggaacgggggaccaccaagttgcctaggaagggatgaagcagcccaggctggaaatgaagcaggttaaaactcctgtgctgattagtaatgggattacgcctgtgactagccatgcactccagcctgggcaacatagcgagaccctgtctctaaaaaaagaaaccaaacaaacaaaaatggagttctgccttcaaaatgctaagaagtgggtatcacattcccttctttcctctgaaaagtctctcggagtggtgtttggctttgcaatgcaggcgtagcctctaagagtgctcttgggatagaccaaactctgtgcccgaatagaaagctcactgggcaggcatttgccgagggtttggctatgcagtagagagaaaccagaccctgtcctccaggagcttgcagtgggacgtgggtctggacagggctacagtggaggcacagcggcggatgatgggcccgcaggactgtgtgctttgttgcattgctgcaatctgtttcctatgccaaataaacatcatcgcattgaaagaaccttatttgtaatccaggcagcagaaaggcttatctgtaagcatcttcctggggaaaaaaagcaaaatagcacagttgaatcccagtggcatgtgtacaagagggaccttctgtaacaaaccacgtgtggaaaggactgagctgagcgtgaccagccccacatgaagggaatttctatatggctccatggccatctcaggtgcagacttcagccacaggactgcatttcttctgtgggttcctaagtgaaacggatctgaagttcccatccctctgcttccagggtagcagcagaattggctcttatagaaatatcaaacttttaatctgagcctggggttgaattgaacatctgtctcctcctcctgccttaggtgacttctttaaatgagctgcttactgttgatcatagagaacccctgtgatcttctatttcatggtagcagaattgactccagcatcaaggagctgcccaaaggagtgttttgatccaggaacccagccgtctgccttttggggactgctctatcactgtttgtaaaagaggaagctgagccagaattggcgtagtatgtcgtgatttgcctggatgtctgcggtgtccttgcgtctgtagacgagcgctcattatgaggctggtggattctatggactttcagaaatgtgaagtcacagagatgctcgcagggccccatcagtgccggtcaccgtggagtgaggtgcccgttcatgtgacttcacagagatgctcgcagggccccatcaatgccggtcaccgtggagtgaggtgcccgttcatgtggcttcacagagatgctcgcagggccccatcagtgccggtcaccgtggagtgaggtgcccattcatgtggcttcacagagatgctcgcagggccccatcagtgccagtcaccgtggagtgaggtgcccgttcatgtgacttcacagagatgctcgcagggccccatcagtgccagtcaccgtggagtgatgtgcccgttcatgtggcttcacagagatgctcgcagggccccatcaatgctggtaaccgtggagtgaggtgcccattcacgtggcttccacttgatcttccttggctctgttaaaaaaacaaacacaaacaagcccgctgcttctctcaataaaatcaagcccagtctctgcatggaaatcctttcctttgctgctaggaccatcctatgttgaccggcccaaggatcacgaacttggaactctaaagaaagcaggataattctagctcttcacttgggtagcagtgaacaggactttcatgttcctgatgatgtataattgcagctcattggtattcagctttcagagagcctggaagattgcgtctaagcaaggtagagacataagggtgaatcatattatttacaaagaataaccagagcagagaaaaggcacccctatttcttctgccggtaccttcctgccaagatgttggcagggtttaggaggggtacggagtgtgaccttggtcttgcgggccacttttctactcacatctcacacccttttagctgctgcccaaggttaaaggcatcacacagaggatcaaggaaacacacttctgcataaaaggagtagtagaatccttgaggcccttttggtgcaggggaaactgaaacagaaaggaggaactgtttggccgggcacagtggctcacacctgtaatcccagcactttgggaggctgaggcgggcggatcacggggtcaggagttcgagaccagcctgcccaatgtggtgaaaccccgtccctactaaagatacaaaaaatttgccaagtgtggtggcacgtgcctttaatcccagctactcgggaggctgaggcaggagaatcacttgaacccgggaggcggaggttgcagtgagccgagattgcaccattgcattccagcctgggcgatagggcaagactgtgtctcaaaaaaaaaggaggaaccgtttgaccccctttgccagccagaatctgggagagatttgtggatgaaaaaacccacaaatcaaccccaggaatacctggatggcatgtgattagccagccatttgcaccgatcagattagaagaggcccagtccccggtccacatgccatatcacactcgagatggagtggagtgggcggttggccaggcacggtggctcatgcctgtaatcctagcactttgggaggcccaggcaggtggatcacttaaggtcaggagtttgagaccagcctggccaacatagtgaaaccccgtctctaataaaaatacaaaaatcagctgggcgtggtggcgggtgcctgtaatcccagctacttgggagtctgagcaggagaattgcttgaacctggaagcagaggttgcagtgagccaagatctcgcccttgcactccagcctggatgacagcaagagtccatctcaaaaaaaaaataaaaataaaaaataaatatatatatatatatatctatatctatatatatatatatatctatatctatatctatatatatctatatctatatatatctatatatatatatatatataatgagagaacatttggttagctctcaaaagaaaaggtgatcatctagtaaatgtaacatactgcaacaggtacaagaagagcccatatgtgattcagaaactgagggtacagcctgcagcagtttaatttcaggtaaatgcctccaggaagtaagacacgtttttacaatttaaaaatggattgtagaagagaggaaaggaaagcagttgattgaaaacccttctgtgccctggctcctggctagtgtttctgatggttctgtgttttgttttgtgtgaatgtgggcccagtgttaccagatgttctgatttgttttcttttcaaaagaagccggaactctgtgttgttaacgtaaaagcttctgatttcaaaatatcgacaattaagcagacaatctgctggccaaaaaaccacatctgtgcaccagactgagcccaagaatggccaggttgagacctctggtttaaaggatcattgaggcaaaaaactggccaaatgctcccaccgtgggctgcaccccgcaaggctttggttggctgctcttgggaactgacccctagagttttgtttaggggcactccaactttgttttttcccaacattttctcctgttacttgaaatagctgatttttattggtaattgaaaattccatcaaatgtttctctacctaacctcagatttagctaataactaaatgtcaaggccaagcataattcgtgtccagaaatgcaattttgaaagaaaatgaaaagatccccagactcaccatttttagaggtgcaattactttaattgtctgagaggtcgaatgtgtataagagcatctttaaactcctctcggtgcccgaagatgcttttgggaggttgaaggcctggccagggaggaatggagggagagaaatccaaagggaagagagagaaggagggaagggagcagcctgggcgtgatgtggcaggtatatcctcactgcttcccacttcaccatcctccctgttcggcgctgcctcccaagcaagcctgggcgggctggccgcatgaagaccccagcgtgcatacgcaccccagccccagccccggctgcctgctcggcggtgccattgagggcattgctaatggcatcacaaagtggcctctttgatggcccatctgaaaatggtctacagtcaggaatagttgtatttctcctggataacttattttttccttctgtacaactaattaggtggccccttttttcagttgactaatagaaaacttatagctgaatttgtggtacacctacagcaggcttacggttctcataggatacattttggtgtctttgccagctaaggtaagttccttcagggacaaaaggagggataaaattggaagaaaaggaaggagagggggaaccaaagtgtgagcagtctgaatgagaccctgccaccgaagactccattttctagatctgcctgcccaccatagtaagtaaagataaacatcatgagaaatagttaccattcatatattgtttaaactagaacacgtttgataacaaaggttggggagggggcactaggacaacaagtgtgacccagggctgtcccaggcctcgggagacaccagcaaacctaagcttgatgtggtggagcagggagggtcggaagaggagagactggggagggaaccaaggcaggggagagaggctgtggagggcttacatatttggggtcagaaataaccgctggggtcagcatcgtgttctctatggttgaaataaggagataatcaaagttgtgattacatgaatcacgtggtttattgctacacaaagagattttgttttcctttggttcacaatgcctaaaaaggggcagaataatgagaacaattctctcagggaatgcattagccatggagtgagtggcttccaaaattactagagtctagtcgctcaattaggcgggaagcagccctctgtgggaagtaaagtctaactaaagtgtgaggggtacctttacacaggtggccattgggagagatgacccacacagtggagatgctggacaacacgttagattcccagagcattggctggctggcgctggctggcaagggttctgagatttgctcaaaggctaatggagtgtgaccccactgagctctcggtctttgaagaggcggttaagagtgtggcctcattttggcataaacttgccacctgagagaggtggctggcagtgtagccctgccatagcctgaggtcttagaatgtcaaagccttgagtttatacgtaatttgaagcccagtagttgaggtcatatacggggtcttataagatttgatgatgtaacattttctctcaaggggaaggagagttcactccaagttcttatcatagaaaaacatatgacactcacgtagcaaactatgcaagtatttggaattgtttcagagccacgtaacacagtgtatctggacctatcatctgttagagccggaaggggagtgttggactattcttgcactggaatttggcttttgactggactttcaaggtaaagagtaaaagtgccctgactgtatagatgaatcttaccaagtgtcttagttcaggctactgtaataaacaccatagattaggtagcttataaacaacagaatttattgctcacagttctttaggctgggaagtccaagatcaaggtgctggcagatcaggtatgtggtgagggcctacttcctggtttgcagatggccgtcttgtatcctcttatgatggagagagcagaggtagggagaggtgaggcaagctctctcatgtctctcataagggcactaatcccataatgagagccccaccctcatgacctaataactcccccaaatcccccgaataccatcccactggaggttaggacgttgatatggtttggctgtgtgtccccacccaaatctcatattgaattgtaatccccatgtgttagaggaggggctgggtgggaggtgattgaatcatgggggcagacttccctcttgctcttctcgtgatagtgaatgagtcctcatgagatccagttgtttaaaagtgtgtagtgcttcccccttcttgtgctctctctcttttgttctcactctctctctcactctctctctcactctctctcctgctgccatgtgcagatgtgcttgcttcccctacaccttccaccatgattgtgagttttctgaggcctcctggccatgcttcctgtacagtctgcagaactgtgggtctattaaacctcttttctacataaatcaacccaatctcaggtatgtctttatagcagtgtgagaacagactaatgtagacatcaacatgtaaatttgggtgggggccatacatgctgtccataacagtaagggtgcctcccacatcctctgctagtccgtgccacctccggagctggtatttgggcatgggttgaataggaaggattaggctttctctattgggtggtgctaacgttgcctatagactaatttgctaattttgagaactaaccactgggatttggccataattccatgcagaaggaatcaaggaatcgaagttgagatgaggtaactctgctcaaaagtgtaaatgctttattgtcaccattgatttctggctggtctcagaaattcccaagagctgcttttagtgcacattagctacaagtcagaatctcaccagggctgcaccctctcagcctgtgactgtaaaaggatgactcacctgtgttcatnnnnnnnnnnnnnnnnnnnnnnnnnnnnnnnnnnnnnnnnnnnnnnnnnnnnnnnnnnnnnnnnnnnnnnnnnnnnnnnnnnnnnnnnnnnnnnnnnnnnnnnnnnnnnnnnnnnnnnnnnnnnnnnnnnnnnnnnnnnnnnnnnnnnnnnnnnnnnnnnnnnnnnnnnnnnnnnnnnnnnnnnnnnnnnnnnnnnnnnnnnnnnnnnnnnnnnnnnnnnnnnnnnnnnnnnnnnnnnnnnnnnnnnnnnnnnnnnnnnnnnnnnnnnnnnnnnnnnnnnnnnnnnnnnnnnnnnnnnnnnnnnnnnnnnnnnnnnnnnnnnnnnnnnnnnnnnnnnnnnnnnnnnnnnnnnnnnnnnnnnnnnnnnnnnnnnnnnnnnnnnnnnnnnnnnnnnnnnnnnnnnnnnnnnnnnnnnnnnnnnnnnnnnnnnnnnnnnnnnnnnnnnnnnnnnnnnnnnnnnnnnnnnnnnnnnnnnnnnnnnnnnnnnnnnnnnnnnnnnnnnnnnnnnnnnnnnnnnnnnnnnnnnnnnnnnnnnnnnnnnnnnnnnnnnnnnnnnnnnnnnnnnnnnnnnnnnnnnnnnnnnnnnnnnnnnnnnnnnnnnnnnnnnnnnnnnnnnnnnnnnnnnnnnnnnnnnnnnnnnnnnnnnnnnnnnnnnnnnnnnnnnnnnnnnnnnnnnnnnnnnnnnnnnnnnnnnnnnnnnnnnnnnnnnnnnnnnnnnnnnnnnnnnnnnnnnnnnnnnnnnnnnnnnnnnnnnnnnnnnnnnnnnnnnnnnnnnnnnnnnnnnnnnnnnnnnnnnnnnnnnnnnnnnnnnnnnnnnnnnnnnnnnnnnnnnnnnnnnnnnnnnnnnnnnnnnnnnnnnnnnnnnnnnnnnnnnnnnnnnnnnnnnnnnnnnnnnnnnnnnnnnnnnnnnnnnnnnnnnnnnnnnnnnnnnnnnnnnnnnnnnnnnnnnnnnnnnnnnnnnnnnnnnnnnnnnnnnnnnnnnnnnnnnnnnnnnnnnnnnnnnnnnnnnnnnnnnnnnnnnnnnnnnnnnnnnnnnnnnnnnnnnnnnnnnnnnnnnnnnnnnnnnnnnnnnnnnnnnnnnnnnnnnnnnnnnnnnnnnnnnnnnnnnnnnnnnnnnnnnnnnnnnnnnnnnnnnnnnnnnnnnnnnnnnnnnnnnnnnnnnnnnnnnnnnnnnnnnnnnnnnnnnnnnnnnnnnnnnnnnnnnnnnnnnnnnnnnnnnnnnnnnnnnnnnnnnnnnnnnnnnnnnnnnnnnnnnnnnnnnnnnnnnnnnnnnnnnnnnnnnnnnnnnnnnnnnnnnnnnnnnnnnnnnnnnnnnnnnnnnnnnnnnnnnnnnnnnnnnnnnnnnnnnnnnnnnnnnnnnnnnnnnnnnnnnnnnnnnnnnnnnnnnnnnnnnnnnnnnnnnnnnnnnnnnnnnnnnnnnnnnnnnnnnnnnnnnnnnnnnnnnnnnnnnnnnnnnnnnnnnnnnnnnnnnnnnnnnnnnnnnnnnnnnnnnnnnnnnnnnnnnnnnnnnnnnnnnnnnnnnnnnnnnnnnnnnnnnnnnnnnnnnnnnnnnnnnnnnnnnnnnnnnnnnnnnnnnnnnnnnnnnnnnnnnnnnnnnnnnnnnnnnnnnnnnnnnnnnnnnnnnnnnnnnnnnnnnnnnnnnnnnnnnnnnnnnnnnnnnnnnnnnnnnnnnnnnnnnnnnnnnnnnnnnnnnnnnnnnnnnnnnnnnnnnnnnnnnnnnnnnnnnnnnnnnnnnnnnnnnnnnnnnnnnnnnnnnnnnnnnnnnnnnnnnnnnnnnnnnnnnnnnnnnnnnnnnnnnnnnnnnnnnnnnnnnnnnnnnnnnnnnnnnnnnnnnnnnnnnnnnnnnnnnnnnnnnnnnnnnnnnnnnnnnnnnnnnnnnnnnnnnnnnnnnnnnnnnnnnnnnnnnnnnnnnnnnnnnnnnnnnnnnnnnnnnnnnnnnnnnnnnnnnnnnnnnnnnnnnnnnnnnnnnnnnnnnnnnnnnnnnnnnnnnnnnnnnnnnnnnnnnnnnnnnnnnnnnnnnnnnnnnnnnnnnnnnnnnnnnnnnnnnnnnnnnnnnnnnnnnnnnnnnnnnnnnnnnnnnnnnnnnnnnnnnnnnnnnnnnnnnnnnnnnnnnnnnnnnnnnnnnnnnnnnnnnnnnnnnnnnnnnnnnnnnnnnnnnnnnnnnnnnnnnnnnnnnnnnnnnnnnnnnnnnnnnnnnnnnnnnnnnnnnnnnnnnnnnnnnnnnnnnnnnnnnnnnnnnnnnnnnnnnnnnnnnnnnnnnnnnnnnnnnnnnnnnnnnnnnnnnnnnnnnnnnnnnnnnnnnnnnnnnnnnnnnnnnnnnnnnnnnnnnnnnnnnnnnnnnnnnnnnnnnnnnnnnnnnnnnnnnnnnnnnnnnnnnnnnnnnnnnnnnnnnnnnnnnnnnnnnnnnnnnnnnnnnnnnnnnnnnnnnnnnnnnnnnnnnnnnnnnnnnnnnnnnnnnnnnnnnnnnnnnnnnnnnnnnnnnnnnnnnnnnnnnnnnnnnnnnnnnnnnnnnnnnnnnnnnnnnnnnnnnnnnnnnnnnnnnnnnnnnnnnnnnnnnnnnnnnnnnnnnnnnnnnnnnnnnnnnnnnnnnnnnnnnnnnnnnnnnnnnnnnnnnnnnnnnnnnnnnnnnnnnnnnnnnnnnnnnnnnnnnnnnnnnnnnnnnnnnnnnnnnnnnnnnnnnnnnnnnnnnnnnnnnnnnnnnnnnnnnnnnnnnnnnnnnnnnnnnnnnnnnnnnnnnnnnnnnnnnnnnnnnnnnnnnnnnnnnnnnnnnnnnnnnnnnnnnnnnnnnnnnnnnnnnnnnnnnnnnnnnnnnnnnnnnnnnnnnnnnnnnnnnnnnnnnnnnnnnnnnnnnnnnnnnnnnnnnnnnnnnnnnnnnnnnnnnnnnnnnnnnnnnnnnnnnnnnnnnnnnnnnnnnnnnnnnnnnnnnnnnnnnnnnnnnnnnnnnnnnnnnnnnnnnnnnnnnnnnnnnnnnnnnnnnnnnnnnnnnnnnnnnnnnnnnnnnnnnnnnnnnnnnnnnnnnnnnnnnnnnnnnnnnnnnnnnnnnnnnnnnnnnnnnnnnnnnnnnnnnnnnnnnnnnnnnnnnnnnnnnnnnnnnnnnnnnnnnnnnnnnnnnnnnnnnnnnnnnnnnnnnnnnnnnnnnnnnnnnnnnnnnnnnnnnnnnnnnnnnnnnnnnnnnnnnnnnnnnnnnnnnnnnnnnnnnnnnnnnnnnnnnnnnnnnnnnnnnnnnnnnnnnnnnnnnnnnnnnnnnnnnnnnnnnnnnnnnnnnnnnnnnnnnnnnnnnnnnnnnnnnnnnnnnnnnnnnnnnnnnnnnnnnnnnnnnnnnnnnnnnnnnnnnnnnnnnnnnnnnnnnnnnnnnnnnnnnnnnnnnnnnnnnnnnnnnnnnnnnnnnnnnnnnnnnnnnnnnnnnnnnnnnnnnnnnnnnnnnnnnnnnnnnnnnnnnnnnnnnnnnnnnnnnnnnnnnnnnnnnnnnnnnnnnnnnnnnnnnnnnnnnnnnnnnnnnnnnnnnnnnnnnnnnnnnnnnnnnnnnnnnnnnnnnnnnnnnnnnnnnnnnnnnnnnnnnnnnnnnnnnnnnnnnnnnnnnnnnnnnnnnnnnnnnnnnnnnnnnnnnnnnnnnnnnnnnnnnnnnnnnnnnnnnnnnnnnnnnnnnnnnnnnnnnnnnnnnnnnnnnnnnnnnnnnnnnnnnnnnnnnnnnnnnnnnnnnnnnnnnnnnnnnnnnnnnnnnnnnnnnnnnnnnnnnnnnnnnnnnnnnnnnnnnnnnnnnnnnnnnnnnnnnnnnnnnnnnnnnnnnnnnnnnnnnnnnnnnnnnnnnnnnnnnnnnnnnnnnnnnnnnnnnnnnnnnnnnnnnnnnnnnnnnnnnnnnnnnnnnnnnnnnnnnnnnnnnnnnnnnnnnnnnnnnnnnnnnnnnnnnnnnnnnnnnnnnnnnnnnnnnnnnnnnnnnnnnnnnnnnnnnnnnnnnnnnnnnnnnnnnnnnnnnnnnnnnnnnnnnnnnnnnnnnnnnnnnnnnnnnnnnnnnnnnnnnnnnnnnnnnnnnnnnnnnnnnnnnnnnnnnnnnnnnnnnnnnnnnnnnnnnnnnnnnnnnnnnnnnnnnnnnnnnnnnnnnnnnnnnnnnnnnnnnnnnnnnnnnnnnnnnnnnnnnnnnnnnnnnnnnnnnnnnnnnnnnnnnnnnnnnnnnnnnnnnnnnnnnnnnnnnnnnnnnnnnnnnnnnnnnnnnnnnnnnnnnnnnnnnnnnnnnnnnnnnnnnnnnnnnnnnnnnnnnnnnnnnnnnnnnnnnnnnnnnnnnnnnnnnnnnnnnnnnnnnnnnnnnnnnnnnnnnnnnnnnnnnnnnnnnnnnnnnnnnnnnnnnnnnnnnnnnnnnnnnnnnnnnnnnnnnnnnnnnnnnnnnnnnnnnnnnnnnnnnnnnnnnnnnnnnnnnnnnnnnnnnnnnnnnnnnnnnnnnnnnnnnnnnnnnnnnnnnnnnnnnnnnnnnnnnnnnnnnnnnnnnnnnnnnnnnnnnnnnnnnnnnnnnnnnnnnnnnnnnnnnnnnnnnnnnnnnnnnnnnnnnnnnnnnnnnnnnnnnnnnnnnnnnnnnnnnnnnnnnnnnnnnnnnnnnnnnnnnnnnnnnnnnnnnnnnnnnnnnnnnnnnnnnnnnnnnnnnnnnnnnnnnnnnnnnnnnnnnnnnnnnnnnnnnnnnnnnnnnnnnnnnnnnnnnnnnnnnnnnnnnnnnnnnnnnnnnnnnnnnnnnnnnnnnnnnnnnnnnnnnnnnnnnnnnnnnnnnnnnnnnnnnnnnnnnnnnnnnnnnnnnnnnnnnnnnnnnnnnnnnnnnnnnnnnnnnnnnnnnnnnnnnnnnnnnnnnnnnnnnnnnnnnnnnnnnnnnnnnnnnnnnnnnnnnnnnnnnnnnnnnnnnnnnnnnnnnnnnnnnnnnnnnnnnnnnnnnnnnnnnnnnnnnnnnnnnnnnnnnnnnnnnnnnnnnnnnnnnnnnnnnnnnnnnnnnnnnnnnnnnnnnnnnnnnnnnnnnnnnnnnnnnnnnnnnnnnnnnnnnnnnnnnnnnnnnnnnnnnnnnnnnnnnnnnnnnnnnnnnnnnnnnnnnnnnnnnnnnnnnnnnnnnnnnnnnnnnnnnnnnnnnnnnnnnnnnnnnnnnnnnnnnnnnnnnnnnnnnnnnnnnnnnnnnnnnnnnnnnnnnnnnnnnnnnnnnnnnnnnnnnnnnnnnnnnnnnnnnnnnnnnnnnnnnnnnnnnnnnnnnnnnnnnnnnnnnnnnnnnnnnnnnnnnnnnnnnnnnnnnnnnnnnnnnnnnnnnnnnnnnnnnnnnnnnnnnnnnnnnnnnnnnnnnnnnnnnnnnnnnnnnnnnnnnnnnnnnnnnnnnnnnnnnnnnnnnnnnnnnnnnnnnnnnnnnnnnnnnnnnnnnnnnnnnnnnnnnnnnnnnnnnnnnnnnnnnnnnnnnnnnnnnnnnnnnnnnnnnnnnnnnnnnnnnnnnnnnnnnnnnnnnnnnnnnnnnnnnnnnnnnnnnnnnnnnnnnnnnnnnnnnnnnnnnnnnnnnnnnnnnnnnnnnnnnnnnnnnnnnnnnnnnnnnnnnnnnnnnnnnnnnnnnnnnnnnnnnnnnnnnnnnnnnnnnnnnnnnnnnnnnnnnnnnnnnnnnnnnnnnnnnnnnnnnnnnnnnnnnnnnnnnnnnnnnnnnnnnnnnnnnnnnnnnnnnnnnnnnnnnnnnnnnnnnnnnnnnnnnnnnnnnnnnnnnnnnnnnnnnnnnnnnnnnnnnnnnnnnnnnnnnnnnnnnnnnnnnnnnnnnnnnnnnnnnnnnnnnnnnnnnnnnnnnnnnnnnnnnnnnnnnnnnnnnnnnnnnnnnnnnnnnnnnnnnnnnnnnnnnnnnnnnnnnnnnnnnnnnnnnnnnnnnnnnnnnnnnnnnnnnnnnnnnnnnnnnnnnnnnnnnnnnnnnnnnnnnnnnnnnnnnnnnnnnnnnnnnnnnnnnnnnnnnnnnnnnnnnnnnnnnnnnnnnnnnnnnnnnnnnnnnnnnnnnnnnnnnnnnnnnnnnnnnnnnnnnnnnnnnnnnnnnnnnnnnnnnnnnnnnnnnnnnnnnnnnnnnnnnnnnnnnnnnnnnnnnnnnnnnnnnnnnnnnnnnnnnnnnnnnnnnnnnnnnnnnnnnnnnnnnnnnnnnnnnnnnnnnnnnnnnnnnnnnnnnnnnnnnnnnnnnnnnnnnnnnnnnnnnnnnnnnnnnnnnnnnnnnnnnnnnnnnnnnnnnnnnnnnnnnnnnnnnnnnnnnnnnnnnnnnnnnnnnnnnnnnnnnnnnnnnnnnnnnnnnnnnnnnnnnnnnnnnnnnnnnnnnnnnnnnnnnnnnnnnnnnnnnnnnnnnnnnnnnnnnnnnnnnnnnnnnnnnnnnnnnnnnnnnnnnnnnnnnnnnnnnnnnnnnnnnnnnnnnnnnnnnnnnnnnnnnnnnnnnnnnnnnnnnnnnnnnnnnnnnnnnnnnnnnnnnnnnnnnnnnnnnnnnnnnnnnnnnnnnnnnnnnnnnnnnnnnnnnnnnnnnnnnnnnnnnnnnnnnnnnnnnnnnnnnnnnnnnnnnnnnnnnnnnnnnnnnnnnnnnnnnnnnnnnnnnnnnnnnnnnnnnnnnnnnnnnnnnnnnnnnnnnnnnnnnnnnnnnnnnnnnnnnnnnnnnnnnnnnnnnnnnnnnnnnnnnnnnnnnnnnnnnnnnnnnnnnnnnnnnnnnnnnnnnnnnnnnnnnnnnnnnnnnnnnnnnnnnnnnnnnnnnnnnnnnnnnnnnnnnnnnnnnnnnnnnnnnnnnnnnnnnnnnnnnnnnnnnnnnnnnnnnnnnnnnnnnnnnnnnnnnnnnnnnnnnnnnnnnnnnnnnnnnnnnnnnnnnnnnnnnnnnnnnnnnnnnnnnnnnnnnnnnnnnnnnnnnnnnnnnnnnnnnnnnnnnnnnnnnnnnnnnnnnnnnnnnnnnnnnnnnnnnnnnnnnnnnnnnnnnnnnnnnnnnnnnnnnnnnnnnnnnnnnnnnnnnnnnnnnnnnnnnnnnnnnnnnnnnnnnnnnnnnnnnnnnnnnnnnnnnnnnnnnnnnnnnnnnnnnnnnnnnnnnnnnnnnnnnnnnnnnnnnnnnnnnnnnnnnnnnnnnnnnnnnnnnnnnnnnnnnnnnnnnnnnnnnnnnnnnnnnnnnnnnnnnnnnnnnnnnnnnnnnnnnnnnnnnnnnnnnnnnnnnnnnnnnnnnnnnnnnnnnnnnnnnnnnnnnnnnnnnnnnnnnnnnnnnnnnnnnnnnnnnnnnnnnnnnnnnnnnnnnnnnnnnnnnnnnnnnnnnnnnnnnnnnnnnnnnnnnnnnnnnnnnnnnnnnnnnnnnnnnnnnnnnnnnnnnnnnnnnnnnnnnnnnnnnnnnnnnnnnnnnnnnnnnnnnnnnnnnnnnnnnnnnnnnnnnnnnnnnnnnnnnnnnnnnnnnnnnnnnnnnnnnnnnnnnnnnnnnnnnnnnnnnnnnnnnnnnnnnnnnnnnnnnnnnnnnnnnnnnnnnnnnnnnnnnnnnnnnnnnnnnnnnnnnnnnnnnnnnnnnnnnnnnnnnnnnnnnnnnnnnnnnnnnnnnnnnnnnnnnnnnnnnnnnnnnnnnnnnnnnnnnnnnnnnnnnnnnnnnnnnnnnnnnnnnnnnnnnnnnnnnnnnnnnnnnnnnnnnnnnnnnnnnnnnnnnnnnnnnnnnnnnnnnnnnnnnnnnnnnnnnnnnnnnnnnnnnnnnnnnnnnnnnnnnnnnnnnnnnnnnnnnnnnnnnnnnnnnnnnnnnnnnnnnnnnnnnnnnnnnnnnnnnnnnnnnnnnnnnnnnnnnnnnnnnnnnnnnnnnnnnnnnnnnnnnnnnnnnnnnnnnnnnnnnnnnnnnnnnnnnnnnnnnnnnnnnnnnnnnnnnnnnnnnnnnnnnnnnnnnnnnnnnnnnnnnnnnnnnnnnnnnnnnnnnnnnnnnnnnnnnnnnnnnnnnnnnnnnnnnnnnnnnnnnnnnnnnnnnnnnnnnnnnnnnnnnnnnnnnnnnnnnnnnnnnnnnnnnnnnnnnnnnnnnnnnnnnnnnnnnnnnnnnnnnnnnnnnnnnnnnnnnnnnnnnnnnnnnnnnnnnnnnnnnnnnnnnnnnnnnnnnnnnnnnnnnnnnnnnnnnnnnnnnnnnnnnnnnnnnnnnnnnnnnnnnnnnnnnnnnnnnnnnnnnnnnnnnnnnnnnnnnnnnnnnnnnnnnnnnnnnnnnnnnnnnnnnnnnnnnnnnnnnnnnnnnnnnnnnnnnnnnnnnnnnnnnnnnnnnnnnnnnnnnnnnnnnnnnnnnnnnnnnnnnnnnnnnnnnnnnnnnnnnnnnnnnnnnnnnnnnnnnnnnnnnnnnnnnnnnnnnnnnnnnnnnnnnnnnnnnnnnnnnnnnnnnnnnnnnnnnnnnnnnnnnnnnnnnnnnnnnnnnnnnnnnnnnnnnnnnnnnnnnnnnnnnnnnnnnnnnnnnnnnnnnnnnnnnnnnnnnnnnnnnnnnnnnnnnnnnnnnnnnnnnnnnnnnnnnnnnnnnnnnnnnnnnnnnnnnnnnnnnnnnnnnnnnnnnnnnnnnnnnnnnnnnnnnnnnnnnnnnnnnnnnnnnnnnnnnnnnnnnnnnnnnnnnnnnnnnnnnnnnnnnnnnnnnnnnnnnnnnnnnnnnnnnnnnnnnnnnnnnnnnnnnnnnnnnnnnnnnnnnnnnnnnnnnnnnnnnnnnnnnnnnnnnnnnnnnnnnnnnnnnnnnnnnnnnnnnnnnnnnnnnnnnnnnnnnnnnnnnnnnnnnnnnnnnnnnnnnnnnnnnnnnnnnnnnnnnnnnnnnnnnnnnnnnnnnnnnnnnnnnnnnnnnnnnnnnnnnnnnnnnnnnnnnnnnnnnnnnnnnnnnnnnnnnnnnnnnnnnnnnnnnnnnnnnnnnnnnnnnnnnnnnnnnnnnnnnnnnnnnnnnnnnnnnnnnnnnnnnnnnnnnnnnnnnnnnnnnnnnnnnnnnnnnnnnnnnnnnnnnnnnnnnnnnnnnnnnnnnnnnnnnnnnnnnnnnnnnnnnnnnnnnnnnnnnnnnnnnnnnnnnnnnnnnnnnnnnnnnnnnnnnnnnnnnnnnnnnnnnnnnnnnnnnnnnnnnnnnnnnnnnnnnnnnnnnnnnnnnnnnnnnnnnnnnnnnnnnnnnnnnnnnnnnnnnnnnnnnnnnnnnnnnnnnnnnnnnnnnnnnnnnnnnnnnnnnnnnnnnnnnnnnnnnnnnnnnnnnnnnnnnnnnnnnnnnnnnnnnnnnnnnnnnnnnnnnnnnnnnnnnnnnnnnnnnnnnnnnnnnnnnnnnnnnnnnnnnnnnnnnnnnnnnnnnnnnnnnnnnnnnnnnnnnnnnnnnnnnnnnnnnnnnnnnnnnnnnnnnnnnnnnnnnnnnnnnnnnnnnnnnnnnnnnnnnnnnnnnnnnnnnnnnnnnnnnnnnnnnnnnnnnnnnnnnnnnnnnnnnnnnnnnnnnnnnnnnnnnnnnnnnnnnnnnnnnnnnnnnnnnnnnnnnnnnnnnnnnnnnnnnnnnnnnnnnnnnnnnnnnnnnnnnnnnnnnnnnnnnnnnnnnnnnnnnnnnnnnnnnnnnnnnnnnnnnnnnnnnnnnnnnnnnnnnnnnnnnnnnnnnnnnnnnnnnnnnnnnnnnnnnnnnnnnnnnnnnnnnnnnnnnnnnnnnnnnnnnnnnnnnnnnnnnnnnnnnnnnnnnnnnnnnnnnnnnnnnnnnnnnnnnnnnnnnnnnnnnnnnnnnnnnnnnnnnnnnnnnnnnnnnnnnnnnnnnnnnnnnnnnnnnnnnnnnnnnnnnnnnnnnnnnnnnnnnnnnnnnnnnnnnnnnnnnnnnnnnnnnnnnnnnnnnnnnnnnnnnnnnnnnnnnnnnnnnnnnnnnnnnnnnnnnnnnnnnnnnnnnnnnnnnnnnnnnnnnnnnnnnnnnnnnnnnnnnnnnnnnnnnnnnnnnnnnnnnnnnnnnnnnnnnnnnnnnnnnnnnnnnnnnnnnnnnnnnnnnnnnnnnnnnnnnnnnnnnnnnnnnnnnnnnnnnnnnnnnnnnnnnnnnnnnnnnnnnnnnnnnnnnnnnnnnnnnnnnnnnnnnnnnnnnnnnnnnnnnnnnnnnnnnnnnnnnnnnnnnnnnnnnnnnnnnnnnnnnnnnnnnnnnnnnnnnnnnnnnnnnnnnnnnnnnnnnnnnnnnnnnnnnnnnnnnnnnnnnnnnnnnnnnnnnnnnnnnnnnnnnnnnnnnnnnnnnnnnnnnnnnnnnnnnnnnnnnnnnnnnnnnnnnnnnnnnnnnnnnnnnnnnnnnnnnnnnnnnnnnnnnnnnnnnnnnnnnnnnnnnnnnnnnnnnnnnnnnnnnnnnnnnnnnnnnnnnnnnnnnnnnnnnnnnnnnnnnnnnnnnnnnnnnnnnnnnnnnnnnnnnnnnnnnnnnnnnnnnnnnnnnnnnnnnnnnnnnnnnnnnnnnnnnnnnnnnnnnnnnnnnnnnnnnnnnnnnnnnnnnnnnnnnnnnnnnnnnnnnnnnnnnnnnnnnnnnnnnnnnnnnnnnnnnnnnnnnnnnnnnnnnnnnnnnnnnnnnnnnnnnnnnnnnnnnnnnnnnnnnnnnnnnnnnnnnnnnnnnnnnnnnnnnnnnnnnnnnnnnnnnnnnnnnnnnnnnnnnnnnnnnnnnnnnnnnnnnnnnnnnnnnnnnnnnnnnnnnnnnnnnnnnnnnnnnnnnnnnnnnnnnnnnnnnnnnnnnnnnnnnnnnnnnnnnnnnnnnnnnnnnnnnnnnnnnnnnnnnnnnnnnnnnnnnnnnnnnnnnnnnnnnnnnnnnnnnnnnnnnnnnnnnnnnnnnnnnnnnnnnnnnnnnnnnnnnnnnnnnnnnnnnnnnnnnnnnnnnnnnnnnnnnnnnnnnnnnnnnnnnnnnnnnnnnnnnnnnnnnnnnnnnnnnnnnnnnnnnnnnnnnnnnnnnnnnnnnnnnnnnnnnnnnnnnnnnnnnnnnnnnnnnnnnnnnnnnnnnnnnnnnnnnnnnnnnnnnnnnnnnnnnnnnnnnnnnnnnnnnnnnnnnnnnnnnnnnnnnnnnnnnnnnnnnnnnnnnnnnnnnnnnnnnnnnnnnnnnnnnnnnnnnnnnnnnnnnnnnnnnnnnnnnnnnnnnnnnnnnnnnnnnnnnnnnnnnnnnnnnnnnnnnnnnnnnnnnnnnnnnnnnnnnnnnnnnnnnnnnnnnnnnnnnnnnnnnnnnnnnnnnnnnnnnnnnnnnnnnnnnnnnnnnnnnnnnnnnnnnnnnnnnnnnnnnnnnnnnnnnnnnnnnnnnnnnnnnnnnnnnnnnnnnnnnnnnnnnnnnnnnnnnnnnnnnnnnnnnnnnnnnnnnnnnnnnnnnnnnnnnnnnnnnnnnnnnnnnnnnnnnnnnnnnnnnnnnnnnnnnnnnnnnnnnnnnnnnnnnnnnnnnnnnnnnnnnnnnnnnnnnnnnnnnnnnnnnnnnnnnnnnnnnnnnnnnnnnnnnnnnnnnnnnnnnnnnnnnnnnnnnnnnnnnnnnnnnnnnnnnnnnnnnnnnnnnnnnnnnnnnnnnnnnnnnnnnnnnnnnnnnnnnnnnnnnnnnnnnnnnnnnnnnnnnnnnnnnnnnnnnnnnnnnnnnnnnnnnnnnnnnnnnnnnnnnnnnnnnnnnnnnnnnnnnnnnnnnnnnnnnnnnnnnnnnnnnnnnnnnnnnnnnnnnnnnnnnnnnnnnnnnnnnnnnnnnnnnnnnnnnnnnnnnnnnnnnnnnnnnnnnnnnnnnnnnnnnnnnnnnnnnnnnnnnnnnnnnnnnnnnnnnnnnnnnnnnnnnnnnnnnnnnnnnnnnnnnnnnnnnnnnnnnnnnnnnnnnnnnnnnnnnnnnnnnnnnnnnnnnnnnnnnnnnnnnnnnnnnnnnnnnnnnnnnnnnnnnnnnnnnnnnnnnnnnnnnnnnnnnnnnnnnnnnnnnnnnnnnnnnnnnnnnnnnnnnnnnnnnnnnnnnnnnnnnnnnnnnnnnnnnnnnnnnnnnnnnnnnnnnnnnnnnnnnnnnnnnnnnnnnnnnnnnnnnnnnnnnnnnnnnnnnnnnnnnnnnnnnnnnnnnnnnnnnnnnnnnnnnnnnnnnnnnnnnnnnnnnnnnnnnnnnnnnnnnnnnnnnnnnnnnnnnnnnnnnnnnnnnnnnnnnnnnnnnnnnnnnnnnnnnnnnnnnnnnnnnnnnnnnnnnnnnnnnnnnnnnnnnnnnnnnnnnnnnnnnnnnnnnnnnnnnnnnnnnnnnnnnnnnnnnnnnnnnnnnnnnnnnnnnnnnnnnnnnnnnnnnnnnnnnnnnnnnnnnnnnnnnnnnnnnnnnnnnnnnnnnnnnnnnnnnnnnnnnnnnnnnnnnnnnnnnnnnnnnnnnnnnnnnnnnnnnnnnnnnnnnnnnnnnnnnnnnnnnnnnnnnnnnnnnnnnnnnnnnnnnnnnnnnnnnnnnnnnnnnnnnnnnnnnnnnnnnnnnnnnnnnnnnnnnnnnnnnnnnnnnnnnnnnnnnnnnnnnnnnnnnnnnnnnnnnnnnnnnnnnnnnnnnnnnnnnnnnnnnnnnnnnnnnnnnnnnnnnnnnnnnnnnnnnnnnnnnnnnnnnnnnnnnnnnnnnnnnnnnnnnnnnnnnnnnnnnnnnnnnnnnnnnnnnnnnnnnnnnnnnnnnnnnnnnnnnnnnnnnnnnnnnnnnnnnnnnnnnnnnnnnnnnnnnnnnnnnnnnnnnnnnnnnnnnnnnnnnnnnnnnnnnnnnnnnnnnnnnnnnnnnnnnnnnnnnnnnnnnnnnnnnnnnnnnnnnnnnnnnnnnnnnnnnnnnnnnnnnnnnnnnnnnnnnnnnnnnnnnnnnnnnnnnnnnnnnnnnnnnnnnnnnnnnnnnnnnnnnnnnnnnnnnnnnnnnnnnnnnnnnnnnnnnnnnnnnnnnnnnnnnnnnnnnnnnnnnnnnnnnnnnnnnnnnnnnnnnnnnnnnnnnnnnnnnnnnnnnnnnnnnnnnnnnnnnnnnnnnnnnnnnnnnnnnnnnnnnnnnnnnnnnnnnnnnnnnnnnnnnnnnnnnnnnnnnnnnnnnnnnnnnnnnnnnnnnnnnnnnnnnnnnnnnnnnnnnnnnnnnnnnnnnnnnnnnnnnnnnnnnnnnnnnnnnnnnnnnnnnnnnnnnnnnnnnnnnnnnnnnnnnnnnnnnnnnnnnnnnnnnnnnnnnnnnnnnnnnnnnnnnnnnnnnnnnnnnnnnnnnnnnnnnnnnnnnnnnnnnnnnnnnnnnnnnnnnnnnnnnnnnnnnnnnnnnnnnnnnnnnnnnnnnnnnnnnnnnnnnnnnnnnnnnnnnnnnnnnnnnnnnnnnnnnnnnnnnnnnnnnnnnnnnnnnnnnnnnnnnnnnnnnnnnnnnnnnnnnnnnnnnnnnnnnnnnnnnnnnnnnnnnnnnnnnnnnnnnnnnnnnnnnnnnnnnnnnnnnnnnnnnnnnnnnnnnnnnnnnnnnnnnnnnnnnnnnnnnnnnnnnnnnnnnnnnnnnnnnnnnnnnnnnnnnnnnnnnnnnnnnnnnnnnnnnnnnnnnnnnnnnnnnnnnnnnnnnnnnnnnnnnnnnnnnnnnnnnnnnnnnnnnnnnnnnnnnnnnnnnnnnnnnnnnnnnnnnnnnnnnnnnnnnnnnnnnnnnnnnnnnnnnnnnnnnnnnnnnnnnnnnnnnnnnnnnnnnnnnnnnnnnnnnnnnnnnnnnnnnnnnnnnnnnnnnnnnnnnnnnnnnnnnnnnnnnnnnnnnnnnnnnnnnnnnnnnnnnnnnnnnnnnnnnnnnnnnnnnnnnnnnnnnnnnnnnnnnnnnnnnnnnnnnnnnnnnnnnnnnnnnnnnnnnnnnnnnnnnnnnnnnnnnnnnnnnnnnnnnnnnnnnnnnnnnnnnnnnnnnnnnnnnnnnnnnnnnnnnnnnnnnnnnnnnnnnnnnnnnnnnnnnnnnnnnnnnnnnnnnnnnnnnnnnnnnnnnnnnnnnnnnnnnnnnnnnnnnnnnnnnnnnnnnnnnnnnnnnnnnnnnnnnnnnnnnnnnnnnnnnnnnnnnnnnnnnnnnnnnnnnnnnnnnnnnnnnnnnnnnnnnnnnnnnnnnnnnnnnnnnnnnnnnnnnnnnnnnnnnnnnnnnnnnnnnnnnnnnnnnnnnnnnnnnnnnnnnnnnnnnnnnnnnnnnnnnnnnnnnnnnnnnnnnnnnnnnnnnnnnnnnnnnnnnnnnnnnnnnnnnnnnnnnnnnnnnnnnnnnnnnnnnnnnnnnnnnnnnnnnnnnnnnnnnnnnnnnnnnnnnnnnnnnnnnnnnnnnnnnnnnnnnnnnnnnnnnnnnnnnnnnnnnnnnnnnnnnnnnnnnnnnnnnnnnnnnnnnnnnnnnnnnnnnnnnnnnnnnnnnnnnnnnnnnnnnnnnnnnnnnnnnnnnnnnnnnnnnnnnnnnnnnnnnnnnnnnnnnnnnnnnnnnnnnnnnnnnnnnnnnnnnnnnnnnnnnnnnnnnnnnnnnnnnnnnnnnnnnnnnnnnnnnnnnnnnnnnnnnnnnnnnnnnnnnnnnnnnnnnnnnnnnnnnnnnnnnnnnnnnnnnnnnnnnnnnnnnnnnnnnnnnnnnnnnnnnnnnnnnnnnnnnnnnnnnnnnnnnnnnnnnnnnnnnnnnnnnnnnnnnnnnnnnnnnnnnnnnnnnnnnnnnnnnnnnnnnnnnnnnnnnnnnnnnnnnnnnnnnnnnnnnnnnnnnnnnnnnnnnnnnnnnnnnnnnnnnnnnnnnnnnnnnnnnnnnnnnnnnnnnnnnnnnnnnnnnnnnnnnnnnnnnnnnnnnnnnnnnnnnnnnnnnnnnnnnnnnnnnnnnnnnnnnnnnnnnnnnnnnnnnnnnnnnnnnnnnnnnnnnnnnnnnnnnnnnnnnnnnnnnnnnnnnnnnnnnnnnnnnnnnnnnnnnnnnnnnnnnnnnnnnnnnnnnnnnnnnnnnnnnnnnnnnnnnnnnnnnnnnnnnnnnnnnnnnnnnnnnnnnnnnnnnnnnnnnnnnnnnnnnnnnnnnnnnnnnnnnnnnnnnnnnnnnnnnnnnnnnnnnnnnnnnnnnnnnnnnnnnnnnnnnnnnnnnnnnnnnnnnnnnnnnnnnnnnnnnnnnnnnnnnnnnnnnnnnnnnnnnnnnnnnnnnnnnnnnnnnnnnnnnnnnnnnnnnnnnnnnnnnnnnnnnnnnnnnnnnnnnnnnnnnnnnnnnnnnnnnnnnnnnnnnnnnnnnnnnnnnnnnnnnnnnnnnnnnnnnnnnnnnnnnnnnnnnnnnnnnnnnnnnnnnnnnnnnnnnnnnnnnnnnnnnnnnnnnnnnnnnnnnnnnnnnnnnnnnnnnnnnnnnnnnnnnnnnnnnnnnnnnnnnnnnnnnnnnnnnnnnnnnnnnnnnnnnnnnnnnnnnnnnnnnnnnnnnnnnnnnnnnnnnnnnnnnnnnnnnnnnnnnnnnnnnnnnnnnnnnnnnnnnnnnnnnnnnnnnnnnnnnnnnnnnnnnnnnnnnnnnnnnnnnnnnnnnnnnnnnnnnnnnnnnnnnnnnnnnnnnnnnnnnnnnnnnnnnnnnnnnnnnnnnnnnnnnnnnnnnnnnnnnnnnnnnnnnnnnnnnnnnnnnnnnnnnnnnnnnnnnnnnnnnnnnnnnnnnnnnnnnnnnnnnnnnnnnnnnnnnnnnnnnnnnnnnnnnnnnnnnnnnnnnnnnnnnnnnnnnnnnnnnnnnnnnnnnnnnnnnnnnnnnnnnnnnnnnnnnnnnnnnnnnnnnnnnnnnnnnnnnnnnnnnnnnnnnnnnnnnnnnnnnnnnnnnnnnnnnnnnnnnnnnnnnnnnnnnnnnnnnnnnnnnnnnnnnnnnnnnnnnnnnnnnnnnnnnnnnnnnnnnnnnnnnnnnnnnnnnnnnnnnnnnnnnnnnnnnnnnnnnnnnnnnnnnnnnnnnnnnnnnnnnnnnnnnnnnnnnnnnnnnnnnnnnnnnnnnnnnnnnnnnnnnnnnnnnnnnnnnnnnnnnnnnnnnnnnnnnnnnnnnnnnnnnnnnnnnnnnnnnnnnnnnnnnnnnnnnnnnnnnnnnnnnnnnnnnnnnnnnnnnnnnnnnnnnnnnnnnnnnnnnnnnnnnnnnnnnnnnnnnnnnnnnnnnnnnnnnnnnnnnnnnnnnnnnnnnnnnnnnnnnnnnnnnnnnnnnnnnnnnnnnnnnnnnnnnnnnnnnnnnnnnnnnnnnnnnnnnnnnnnnnnnnnnnnnnnnnnnnnnnnnnnnnnnnnnnnnnnnnnnnnnnnnnnnnnnnnnnnnnnnnnnnnnnnnnnnnnnnnnnnnnnnnnnnnnnnnnnnnnnnnnnnnnnnnnnnnnnnnnnnnnnnnnnnnnnnnnnnnnnnnnnnnnnnnnnnnnnnnnnnnnnnnnnnnnnnnnnnnnnnnnnnnnnnnnnnnnnnnnnnnnnnnnnnnnnnnnnnnnnnnnnnnnnnnnnnnnnnnnnnnnnnnnnnnnnnnnnnnnnnnnnnnnnnnnnnnnnnnnnnnnnnnnnnnnnnnnnnnnnnnnnnnnnnnnnnnnnnnnnnnnnnnnnnnnnnnnnnnnnnnnnnnnnnnnnnnnnnnnnnnnnnnnnnnnnnnnnnnnnnnnnnnnnnnnnnnnnnnnnnnnnnnnnnnnnnnnnnnnnnnnnnnnnnnnnnnnnnnnnnnnnnnnnnnnnnnnnnnnnnnnnnnnnnnnnnnnnnnnnnnnnnnnnnnnnnnnnnnnnnnnnnnnnnnnnnnnnnnnnnnnnnnnnnnnnnnnnnnnnnnnnnnnnnnnnnnnnnnnnnnnnnnnnnnnnnnnnnnnnnnnnnnnnnnnnnnnnnnnnnnnnnnnnnnnnnnnnnnnnnnnnnnnnnnnnnnnnnnnnnnnnnnnnnnnnnnnnnnnnnnnnnnnnnnnnnnnnnnnnnnnnnnnnnnnnnnnnnnnnnnnnnnnnnnnnnnnnnnnnnnnnnnnnnnnnnnnnnnnnnnnnnnnnnnnnnnnnnnnnnnnnnnnnnnnnnnnnnnnnnnnnnnnnnnnnnnnnnnnnnnnnnnnnnnnnnnnnnnnnnnnnnnnnnnnnnnnnnnnnnnnnnnnnnnnnnnnnnnnnnnnnnnnnnnnnnnnnnnnnnnnnnnnnnnnnnnnnnnnnnnnnnnnnnnnnnnnnnnnnnnnnnnnnnnnnnnnnnnnnnnnnnnnnnnnnnnnnnnnnnnnnnnnnnnnnnnnnnnnnnnnnnnnnnnnnnnnnnnnnnnnnnnnnnnnnnnnnnnnnnnnnnnnnnnnnnnnnnnnnnnnnnnnnnnnnnnnnnnnnnnnnnnnnnnnnnnnnnnnnnnnnnnnnnnnnnnnnnnnnnnnnnnnnnnnnnnnnnnnnnnnnnnnnnnnnnnnnnnnnnnnnnnnnnnnnnnnnnnnnnnnnnnnnnnnnnnnnnnnnnnnnnnnnnnnnnnnnnnnnnnnnnnnnnnnnnnnnnnnnnnnnnnnnnnnnnnnnnnnnnnnnnnnnnnnnnnnnnnnnnnnnnnnnnnnnnnnnnnnnnnnnnnnnnnnnnnnnnnnnnnnnnnnnnnnnnnnnnnnnnnnnnnnnnnnnnnnnnnnnnnnnnnnnnnnnnnnnnnnnnnnnnnnnnnnnnnnnnnnnnnnnnnnnnnnnnnnnnnnnnnnnnnnnnnnnnnnnnnnnnnnnnnnnnnnnnnnnnnnnnnnnnnnnnnnnnnnnnnnnnnnnnnnnnnnnnnnnnnnnnnnnnnnnnnnnnnnnnnnnnnnnnnnnnnnnnnnnnnnnnnnnnnnnnnnnnnnnnnnnnnnnnnnnnnnnnnnnnnnnnnnnnnnnnnnnnnnnnnnnnnnnnnnnnnnnnnnnnnnnnnnnnnnnnnnnnnnnnnnnnnnnnnnnnnnnnnnnnnnnnnnnnnnnnnnnnnnnnnnnnnnnnnnnnnnnnnnnnnnnnnnnnnnnnnnnnnnnnnnnnnnnnnnnnnnnnnnnnnnnnnnnnnnnnnnnnnnnnnnnnnnnnnnnnnnnnnnnnnnnnnnnnnnnnnnnnnnnnnnnnnnnnnnnnnnnnnnnnnnnnnnnnnnnnnnnnnnnnnnnnnnnnnnnnnnnnnnnnnnnnnnnnnnnnnnnnnnnnnnnnnnnnnnnnnnnnnnnnnnnnnnnnnnnnnnnnnnnnnnnnnnnnnnnnnnnnnnnnnnnnnnnnnnnnnnnnnnnnnnnnnnnnnnnnnnnnnnnnnnnnnnnnnnnnnnnnnnnnnnnnnnnnnnnnnnnnnnnnnnnnnnnnnnnnnnnnnnnnnnnnnnnnnnnnnnnnnnnnnnnnnnnnnnnnnnnnnnnnnnnnnnnnnnnnnnnnnnnnnnnnnnnnnnnnnnnnnnnnnnnnnnnnnnnnnnnnnnnnnnnnnnnnnnnnnnnnnnnnnnnnnnnnnnnnnnnnnnnnnnnnnnnnnnnnnnnnnnnnnnnnnnnnnnnnnnnnnnnnnnnnnnnnnnnnnnnnnnnnnnnnnnnnnnnnnnnnnnnnnnnnnnnnnnnnnnnnnnnnnnnnnnnnnnnnnnnnnnnnnnnnnnnnnnnnnnnnnnnnnnnnnnnnnnnnnnnnnnnnnnnnnnnnnnnnnnnnnnnnnnnnnnnnnnnnnnnnnnnnnnnnnnnnnnnnnnnnnnnnnnnnnnnnnnnnnnnnnnnnnnnnnnnnnnnnnnnnnnnnnnnnnnnnnnnnnnnnnnnnnnnnnnnnnnnnnnnnnnnnnnnnnnnnnnnnnnnnnnnnnnnnnnnnnnnnnnnnnnnnnnnnnnnnnnnnnnnnnnnnnnnnnnnnnnnnnnnnnnnnnnnnnnnnnnnnnnnnnnnnnnnnnnnnnnnnnnnnnnnnnnnnnnnnnnnnnnnnnnnnnnnnnnnnnnnnnnnnnnnnnnnnnnnnnnnnnnnnnnnnnnnnnnnnnnnnnnnnnnnnnnnnnnnnnnnnnnnnnnnnnnnnnnnnnnnnnnnnnnnnnnnnnnnnnnnnnnnnnnnnnnnnnnnnnnnnnnnnnnnnnnnnnnnnnnnnnnnnnnnnnnnnnnnnnnnnnnnnnnnnnnnnnnnnnnnnnnnnnnnnnnnnnnnnnnnnnnnnnnnnnnnnnnnnnnnnnnnnnnnnnnnnnnnnnnnnnnnnnnnnnnnnnnnnnnnnnnnnnnnnnnnnnnnnnnnnnnnnnnnnnnnnnnnnnnnnnnnnnnnnnnnnnnnnnnnnnnnnnnnnnnnnnnnnnnnnnnnnnnnnnnnnnnnnnnnnnnnnnnnnnnnnnnnnnnnnnnnnnnnnnnnnnnnnnnnnnnnnnnnnnnnnnnnnnnnnnnnnnnnnnnnnnnnnnnnnnnnnnnnnnnnnnnnnnnnnnnnnnnnnnnnnnnnnnnnnnnnnnnnnnnnnnnnnnnnnnnnnnnnnnnnnnnnnnnnnnnnnnnnnnnnnnnnnnnnnnnnnnnnnnnnnnnnnnnnnnnnnnnnnnnnnnnnnnnnnnnnnnnnnnnnnnnnnnnnnnnnnnnnnnnnnnnnnnnnnnnnnnnnnnnnnnnnnnnnnnnnnnnnnnnnnnnnnnnnnnnnnnnnnnnnnnnnnnnnnnnnnnnnnnnnnnnnnnnnnnnnnnnnnnnnnnnnnnnnnnnnnnnnnnnnnnnnnnnnnnnnnnnnnnnnnnnnnnnnnnnnnnnnnnnnnnnnnnnnnnnnnnnnnnnnnnnnnnnnnnnnnnnnnnnnnnnnnnnnnnnnnnnnnnnnnnnnnnnnnnnnnnnnnnnnnnnnnnnnnnnnnnnnnnnnnnnnnnnnnnnnnnnnnnnnnnnnnnnnnnnnnnnnnnnnnnnnnnnnnnnnnnnnnnnnnnnnnnnnnnnnnnnnnnnnnnnnnnnnnnnnnnnnnnnnnnnnnnnnnnnnnnnnnnnnnnnnnnnnnnnnnnnnnnnnnnnnnnnnnnnnnnnnnnnnnnnnnnnnnnnnnnnnnnnnnnnnnnnnnnnnnnnnnnnnnnnnnnnnnnnnnnnnnnnnnnnnnnnnnnnnnnnnnnnnnnnnnnnnnnnnnnnnnnnnnnnnnnnnnnnnnnnnnnnnnnnnnnnnnnnnnnnnnnnnnnnnnnnnnnnnnnnnnnnnnnnnnnnnnnnnnnnnnnnnnnnnnnnnnnnnnnnnnnnnnnnnnnnnnnnnnnnnnnnnnnnnnnnnnnnnnnnnnnnnnnnnnnnnnnnnnnnnnnnnnnnnnnnnnnnnnnnnnnnnnnnnnnnnnnnnnnnnnnnnnnnnnnnnnnnnnnnnnnnnnnnnnnnnnnnnnnnnnnnnnnnnnnnnnnnnnnnnnnnnnnnnnnnnnnnnnnnnnnnnnnnnnnnnnnnnnnnnnnnnnnnnnnnnnnnnnnnnnnnnnnnnnnnnnnnnnnnnnnnnnnnnnnnnnnnnnnnnnnnnnnnnnnnnnnnnnnnnnnnnnnnnnnnnnnnnnnnnnnnnnnnnnnnnnnnnnnnnnnnnnnnnnnnnnnnnnnnnnnnnnnnnnnnnnnnnnnnnnnnnnnnnnnnnnnnnnnnnnnnnnnnnnnnnnnnnnnnnnnnnnnnnnnnnnnnnnnnnnnnnnnnnnnnnnnnnnnnnnnnnnnnnnnnnnnnnnnnnnnnnnnnnnnnnnnnnnnnnnnnnnnnnnnnnnnnnnnnnnnnnnnnnnnnnnnnnnnnnnnnnnnnnnnnnnnnnnnnnnnnnnnnnnnnnnnnnnnnnnnnnnnnnnnnnnnnnnnnnnnnnnnnnnnnnnnnnnnnnnnnnnnnnnnnnnnnnnnnnnnnnnnnnnnnnnnnnnnnnnnnnnnnnnnnnnnnnnnnnnnnnnnnnnnnnnnnnnnnnnnnnnnnnnnnnnnnnnnnnnnnnnnnnnnnnnnnnnnnnnnnnnnnnnnnnnnnnnnnnnnnnnnnnnnnnnnnnnnnnnnnnnnnnnnnnnnnnnnnnnnnnnnnnnnnnnnnnnnnnnnnnnnnnnnnnnnnnnnnnnnnnnnnnnnnnnnnnnnnnnnnnnnnnnnnnnnnnnnnnnnnnnnnnnnnnnnnnnnnnnnnnnnnnnnnnnnnnnnnnnnnnnnnnnnnnnnnnnnnnnnnnnnnnnnnnnnnnnnnnnnnnnnnnnnnnnnnnnnnnnnnnnnnnnnnnnnnnnnnnnnnnnnnnnnnnnnnnnnnnnnnnnnnnnnnnnnnnnnnnnnnnnnnnnnnnnnnnnnnnnnnnnnnnnnnnnnnnnnnnnnnnnnnnnnnnnnnnnnnnnnnnnnnnnnnnnnnnnnnnnnnnnnnnnnnnnnnnnnnnnnnnnnnnnnnnnnnnnnnnnnnnnnnnnnnnnnnnnnnnnnnnnnnnnnnnnnnnnnnnnnnnnnnnnnnnnnnnnnnnnnnnnnnnnnnnnnnnnnnnnnnnnnnnnnnnnnnnnnnnnnnnnnnnnnnnnnnnnnnnnnnnnnnnnnnnnnnnnnnnnnnnnnnnnnnnnnnnnnnnnnnnnnnnnnnnnnnnnnnnnnnnnnnnnnnnnnnnnnnnnnnnnnnnnnnnnnnnnnnnnnnnnnnnnnnnnnnnnnnnnnnnnnnnnnnnnnnnnnnnnnnnnnnnnnnnnnnnnnnnnnnnnnnnnnnnnnnnnnnnnnnnnnnnnnnnnnnnnnnnnnnnnnnnnnnnnnnnnnnnnnnnnnnnnnnnnnnnnnnnnnnnnnnnnnnnnnnnnnnnnnnnnnnnnnnnnnnnnnnnnnnnnnnnnnnnnnnnnnnnnnnnnnnnnnnnnnnnnnnnnnnnnnnnnnnnnnnnnnnnnnnnnnnnnnnnnnnnnnnnnnnnnnnnnnnnnnnnnnnnnnnnnnnnnnnnnnnnnnnnnnnnnnnnnnnnnnnnnnnnnnnnnnnnnnnnnnnnnnnnnnnnnnnnnnnnnnnnnnnnnnnnnnnnnnnnnnnnnnnnnnnnnnnnnnnnnnnnnnnnnnnnnnnnnnnnnnnnnnnnnnnnnnnnnnnnnnnnnnnnnnnnnnnnnnnnnnnnnnnnnnnnnnnnnnnnnnnnnnnnnnnnnnnnnnnnnnnnnnnnnnnnnnnnnnnnnnnnnnnnnnnnnnnnnnnnnnnnnnnnnnnnnnnnnnnnnnnnnnnnnnnnnnnnnnnnnnnnnnnnnnnnnnnnnnnnnnnnnnnnnnnnnnnnnnnnnnnnnnnnnnnnnnnnnnnnnnnnnnnnnnnnnnnnnnnnnnnnnnnnnnnnnnnnnnnnnnnnnnnnnnnnnnnnnnnnnnnnnnnnnnnnnnnnnnnnnnnnnnnnnnnnnnnnnnnnnnnnnnnnnnnnnnnnnnnnnnnnnnnnnnnnnnnnnnnnnnnnnnnnnnnnnnnnnnnnnnnnnnnnnnnnnnnnnnnnnnnnnnnnnnnnnnnnnnnnnnnnnnnnnnnnnnnnnnnnnnnnnnnnnnnnnnnnnnnnnnnnnnnnnnnnnnnnnnnnnnnnnnnnnnnnnnnnnnnnnnnnnnnnnnnnnnnnnnnnnnnnnnnnnnnnnnnnnnnnnnnnnnnnnnnnnnnnnnnnnnnnnnnnnnnnnnnnnnnnnnnnnnnnnnnnnnnnnnnnnnnnnnnnnnnnnnnnnnnnnnnnnnnnnnnnnnnnnnnnnnnnnnnnnnnnnnnnnnnnnnnnnnnnnnnnnnnnnnnnnnnnnnnnnnnnnnnnnnnnnnnnnnnnnnnnnnnnnnnnnnnnnnnnnnnnnnnnnnnnnnnnnnnnnnnnnnnnnnnnnnnnnnnnnnnnnnnnnnnnnnnnnnnnnnnnnnnnnnnnnnnnnnnnnnnnnnnnnnnnnnnnnnnnnnnnnnnnnnnnnnnnnnnnnnnnnnnnnnnnnnnnnnnnnnnnnnnnnnnnnnnnnnnnnnnnnnnnnnnnnnnnnnnnnnnnnnnnnnnnnnnnnnnnnnnnnnnnnnnnnnnnnnnnnnnnnnnnnnnnnnnnnnnnnnnnnnnnnnnnnnnnnnnnnnnnnnnnnnnnnnnnnnnnnnnnnnnnnnnnnnnnnnnnnnnnnnnnnnnnnnnnnnnnnnnnnnnnnnnnnnnnnnnnnnnnnnnnnnnnnnnnnnnnnnnnnnnnnnnnnnnnnnnnnnnnnnnnnnnnnnnnnnnnnnnnnnnnnnnnnnnnnnnnnnnnnnnnnnnnnnnnnnnnnnnnnnnnnnnnnnnnnnnnnnnnnnnnnnnnnnnnnnnnnnnnnnnnnnnnnnnnnnnnnnnnnnnnnnnnnnnnnnnnnnnnnnnnnnnnnnnnnnnnnnnnnnnnnnnnnnnnnnnnnnnnnnnnnnnnnnnnnnnnnnnnnnnnnnnnnnnnnnnnnnnnnnnnnnnnnnnnnnnnnnnnnnnnnnnnnnnnnnnnnnnnnnnnnnnnnnnnnnnnnnnnnnnnnnnnnnnnnnnnnnnnnnnnnnnnnnnnnnnnnnnnnnnnnnnnnnnnnnnnnnnnnnnnnnnnnnnnnnnnnnnnnnnnnnnnnnnnnnnnnnnnnnnnnnnnnnnnnnnnnnnnnnnnnnnnnnnnnnnnnnnnnnnnnnnnnnnnnnnnnnnnnnnnnnnnnnnnnnnnnnnnnnnnnnnnnnnnnnnnnnnnnnnnnnnnnnnnnnnnnnnnnnnnnnnnnnnnnnnnnnnnnnnnnnnnnnnnnnnnnnnnnnnnnnnnnnnnnnnnnnnnnnnnnnnnnnnnnnnnnnnnnnnnnnnnnnnnnnnnnnnnnnnnnnnnnnnnnnnnnnnnnnnnnnnnnnnnnnnnnnnnnnnnnnnnnnnnnnnnnnnnnnnnnnnnnnnnnnnnnnnnnnnnnnnnnnnnnnnnnnnnnnnnnnnnnnnnnnnnnnnnnnnnnnnnnnnnnnnnnnnnnnnnnnnnnnnnnnnnnnnnnnnnnnnnnnnnnnnnnnnnnnnnnnnnnnnnnnnnnnnnnnnnnnnnnnnnnnnnnnnnnnnnnnnnnnnnnnnnnnnnnnnnnnnnnnnnnnnnnnnnacacaccatacacatgcacacatacacacacgcacacttatacactacacacatgccacacacaggacacaccatacacgcacacacacgctgctggcttgggagagccaggcctggtttttccgccttctcgagagtgtgcctcaaggtgttcagctatagtgaaagcgctgctgggctgtcggcctctgctgtggaagtaccttgcctgtgccctccttcataaaatgatgctcctgttcaagagtggagatctgcaagcaacgaagagagagtatctggaggaatgctgagcatgaattttgggggtagtgggactgggtgattaacagtcctggctctgcccctttcgagttcactttcctgagaattcactgctttatcaatatattggaaataataatacctttggggttttcgtgagaactaaagaaaatacaggtaaagctctgaagtagtgcttacctcacaagataatagctgccttaattattatttctagccactgtgtgggacgtgacgttaccagtagggtgttgtaaggacatccttggatttactttctagcttcatggagggggagagtgaaattgagttatagtcacatgctgcgtaacattttggtcaatatatgatggtggtcccgtccgattataataccatattattactgtaccttttctatgtttggatatgtttagatagacagataccattgtgttacaggcatctacagtattcagtatagtaacatgccatgcaggtttgtagcctaggagcagcagactgtaccatacagcccaggtgtgtggtgggcaataccatctaggtttgtggaagtcactctgtgtgttcacacaaagacgaaatcacctaacaatgcatttctcagagcaaactctgttgttaagcgatgcgtgactgtatatgtgtgttgttttttctttacgatttgtaaagttttccagattttttactccaaatgtgtattttacagacaggaaatcaattttctaaaaaactaggaagatgctactaagtctcaaataaaacaagagttagcagtttgataagagtcaaaggctcttgagaaagttcccagttacgccgctggttcataggatttctgcatgtttttatcagtatggtggtttgcgtttctaattaatgtttatgcctagctggttgtaacatgcagttatgtttagtaaagaaaaacaagaatggatggaagaatatatgaacattgcaggccaggcccagaactgggacttgcagctcaggtgacccagggttgcctctgcaggtcacctaggtctctctgtaagatgaaaggccagacccccctatggggagtggtgggagatgcatacagctagagggaggtttccagccacttctcatctgacacggttcaactgcatgagagccgaatggcatcagagttgtgttggccagataaaatgggttgtgttgtgtgtagggaccctcctcagcactggccagcagctgactggaagaagggccccactgtgcggaggcctgggcgggtgatgcctccacgtgggagtctccattttcctnnnnnnnnnnnnnnnnnnnnnnnnnnnnnnnnnnnnnnnnnnnnnnnnnnnnnnnnnnnnnnnnnnnnnnnnnnnnnnnnnnnnnnnnnnnnnnnnnnnnnnnnnnnnnnnnnnnnnnnnnnnnnnnnnnnnnnnnnnnnnnnnnnnnnnnnnnnnnnnnnnnnnnnnnnnnnnnnnnnnnnnnnnnnnnnnnnnnnnnnnnnnnnnnnnnnnnnnnnnnnnnnnnnnnnnnnnnnnnnnnnnnnnnnnnnnnnnnnnnnnnnnnnnnnnnnnnnnnnnnnnnnnnnnnnnnnnnnnnnnnnnnnnnnnnnnnnnnnnnnnnnnnnnnnnnnnnnnnnnnnnnnnnnnnnnnnnnnnnnnnnnnnnnnnnnnnnnnnnnnnnnnnnnnnnnnnnnnnnnnnnnnnnnntgagtagctgggattacaggtgcccgccaccatgcccggctaatttttgtatttttagtagaggcgaggtttcgccatcttggtcaggctggtctcgaactcccgacctcaggtgatccgcccgccccggcctccaaaagtgctgggattccaggcgtgagccaccgcacccggccacctctcttctttttgaagggcgtctggactcagcttttcgtcttgctgaagtgaagctgtaaatgaaagtcgttctgggcaaaacaaaacgagagctctccattccaccaggcaaagggcaggtgcctgtgtgtgtttgggatttatttttattttctaatcccattgccaacagaaaaagattctgtggagcctctgattgtattaccatccgggagccgtttatctgtcgtctgtgggatgcttggcccgatgtccagggctccaagtgtctactctcctcccccgtcacccccacctctagggggtgttttggagaatttggccttggcctaggagggtaagtgcccagggttccattctgtctcagggtcttaggacggaagccagacagcttgatggtcctgaggcagacagaggtggcagctgaagacagtggtgaaagaagtgtggaagaggacttggctcctgatgacctgatgggtggccagccccccaccccagcttctttgctgggggcgccccaggcccctcccgctctgcggccctccctgccgcggcgtgcctgcagttccgcgcctcgccggcaggggtctcgcctgtgtcgcggccggatctgcacgcgggtctaagaactcagggccctcccaccgcagccccgaatcaccgagccctggaaggttccagcgagcccggcgtagacaccgccgtgaggcccgggagaagggaaggggcaagtccagtgagagagggtgtgtgcggggccgtgctggggccagaacctttcagggggttgggggtgagggttaggtgggagtgcggagcaagagcatctctccatcaaaaacacaacaagagcatctctccatcaaaaacacaacaagagcatctctccgtcaaaaacacagcaagagcatctctccatcaaaaacgacacagcacagcaagagcgcctctccgtcgagaacactagtgaatgacagaatggcagtgtattgagcttccacaaagaggttttattgtttttttcagagtgatcatataaagtaactttattgattggtaactttattaatcataacaaattgggcacttttggataaagagaccacgtttaatttaaagtattctttttccataagaagcaatacctatggtgttcaagtcaatagttaaatgctacgcgccggtgaaatgctgccgacattaatcagaagtaaataatacaggaaaggggaaggctttagtcttactaagaagtgatgatatgagagtaagggaaggtggggaataagaagtatgccatggaatgctggtgacagctggaaacgtcaccaggaaaggagagagggaagcgcagggaggccaggaataataccatggtttcctcacagcttcaccgacggtgggaaaatgacctggggggctctgccatggtgtacgtctggctcatggatcccttgtcccccgctgatagttgaaacaagtctccaaatcactgctaggtggccccgtaagtggacgcggaggcacaaacttggctgcaacattcaaggatggactctgctgttaaacgacaatttactgttatgtcattttctccaccatctgacacactttcaacactcacatacctttgaacagaagtttaaataaaagtctgttgactttgcacttgagtcctgctgtggacttcacgtggccctttgcctttgggcgtaagtcagacgagatgatgatacggtgtgtagatatgtctgtttctcttaaactttggtgaatatcctggggacagctgtactctccagtcacaggatcaaagcttactgcatcttcctgaagagtcagttttactcaaagatttagtagagggaaaattcgtctgttaaaacatatgcttatatattatagagttttaatttttcataaaccatttagataagacacactttgacacacttggttgtgtcccaggtccccttgacattcacctctttcctatccatggggtcagcatattttgtggttttatcattcttgtgatagtatttgaccattatgaactggaggtgtgaaacactagtgagcagttggttatatggatgaaatacaaaccagccagtggtttccaaatgcggcgcagccacaccactatccccagggcacctcaaaagacaggctctcaggccttgtcccaggcatcccaatactgttggtctccaaagctgcgttttgaccatgtacccaaagtgattctggcttgtagctagacttgcgaatcaaagaaccaaatggtttattctaactgtagacactgggaaagggactgcaaactgatattccacagaccagacagaagagggtttttggtgtggggttttttttgtttgtttttgtttttgcctgtagcattttgttgttgttgttactttgtattagttgccaacatttaaaatcaaggtattccgtagctttcctttaaaactcagaagtcaggatgatactaggcctgccttttctccagaacccctggcctcagctgaacagcagcagcctctctcaggtggtcgtgccacgctgtctggatctcccgggtccccgcctcgtccccactgccttgctctctgggagcttgaggttgtgatcccctgctcagtgaacacatggtcgtgtgagcagctgaatctcacataccctttcccagcaggcagcatgagtccactgctgccccaccccctccccgcaagggaactgctcacctgggcactgctgcctgggaagtgaagtattgtagaaagaagaacttaagctgaggaatgattggggctcagaaccatctcctctgcttgctacttcttgtctttgaaccacttcttcatacttctgtttctgttcctagagcctcgttttcctctcatggcatctgccctctcataaaataaaacacacacacacacacacacacacacacacggagccctcatcaccgtcatcaccgtcacagtgggtgtgtgctcccaaagggcttctactcatcagtagatttcatgggcccgacctcccattttcctttccccattgctcccattctaaactgtgggtccatctgtatgtaatgtctaaaaaggcgcccaaacaccagttggaaatagttgttataggaaaatgtattcagaattccaaacaacagacttaaagtgatgaacttctagtgcgtcaaacctttctcccctcgttggagaggccacagggttaggcaggagcatagggactctcagcctgtgctggcctttctcagtaatcagaagcatatgaccccagctagtattttcagctagttatgccagggactgtcttttattccatgaggtcaaaggacacacttggaattggtcacctgacaagattgcattgtttctctaatttttttttccctagtttctcagggcctgaatttcattcctcttgcccagtgacttccccttgatggattctaaaggtctcacagaacagcacctcttctgtcatttatctgagtctaggtaaaggcacagcgacagtgaatgtaagggcctttaaaaggcttcaaaagacaaagaacatgttcctatttaaaattaatttctctcttgttttacctacactgattctttctaggttctgagtgtgtgtgatttaggcccatgcagcctctaacaaatgcagaagagatggacgcaggccgctggtgtggggtgatggacgcaggccgctggcgtggggtgatggacgcaggccgctggcgtggggtgatggacgcaggccgctggcgtggggtgatggacgcaggccgctggcgtggggtgatggacgcaggtcgctggtgtgggggtgcattcctgcactcctgtttttctgtcacagaaccaccagtggcccagcattaactaaactaggcccagcctcatggcctggaattccagtctgttatctggagcaaatcagcatttccgtccagcgttcctaggctcccttttatctgccccccacagcactgactgttactagcgtgagccgccacttctccccgttcagtgcaggctggcagtacggggttaattccttagacatataaaaatctggcaaaatcagaaaacagtcattctcacttcacacctgatagaatagccattgtcaaaaacacaagagatagccactgttggcgagggtgtggagaagagggagccccagcacgctgcaccgttggtaggaatgtaggttggtacagccatgatggaaaacaatatggaaattcctaaagaaataaaactagaactactatatgactcagcagtccttcttctgggcattgacccaaaggaaatgaaatcactacctcgtaaagataactgctctcccgtgctcacggcaacgttattcacagtagccaagatacggaaagaacctaaatgtctgttgatagatgaatagagaaagaaattgtaacatacaagacacacacacacacacacaaaacggaatattactcggcctttaaaaagaaggagtcataccatttgccacagcgtggatgaaacttggaggacattattgctaagtgaaataagccagacacagagaaaaaatatgtcgcatgatctcacttatatgtagaatctttttaaaaagaggaaaagctgaatacacagcggtagagaagaaaatgatggttaccgtggccacggcgagggtgagggaggaaatggggagataccagtcaggggatacagcgtagcagacgtgtgggatgaacgggtctagagggttcatgtgtgacatgagggctatcatccataatatcgtattcatgaattttgcgaaaagagtttgttttaggtgctcttgccacacacacaaagatgagtaacaatgtgaattgatggatatgttaatttgcttgactattgtaaccatttcactacctgtgtatttcaaaatatcatgttgtatatcttacatagaattcagaagacattcattctattctgttggaaaacatagactcagatataccagacaattctctttttccccctcccctcccctccctttcccttcccttcctccttacattcctcctctcctcccttcctccgttcctctttgtttcttcctttttttctgtttccttactttctttttctttcttccctcccctctcctcccctcccctcccttcccctctcccctttttttttcaatagagatagggtctcgctacatttcccaggctggacataaagccctgggctccagcagtccttttgcctcagcctcccaggtagctaggataacaggaacacaccacagcacccggctcagatgtattttttgctatatcccaatttcatatatttcatctttaaaaggggccagatgttatcattttcattcaggaaatatgttaattagagctacatgtataactgccatattttatccaaatctcactgaaatatgtagtatacaaaaggaatgtccctgggacttactaatgttttaaaatatttatgaaagtgatagcagttgtgtgcatttctagaaaaagtaataaatgggaaggaaatggttttgcaaaagaggatgtgtttacccatttcatcatcatgatgccctgagagtaaagatactaaccagccagagagattctgttttttcctaatgtgatttaagagattttgatgaaggtggcagtgggggtacagtgtttaattaactagtacatgttctccttaattgctcccaatcaattaagtcgaacattcaagctgggggtacctgcccaagcgccgtaaggacggcatagcactggcaagaggcctggcggctctgaaggtgacatattatgtacttgtcatagcctcactgtcacgtgctgggaggtgctttgtggattacagcagtgaggctggggagctgctgggattgcgccagaagcccttcacagagactggcagaggccttggctgtgggccgctctgtggaacctatagctgtcttggaaaaggctagttatatccttgcagttggacagtgaaagtatacctgtctagactagttcgcttcagtaaatttggactgagtccctgctttgtgccaggcacagggttaggcagcagggatatccgatataaaaagacacagtctctgtccccaaagaactcacagtttaataggacagaaagggatgtaggatcagtataaaccccacaaccatagacatagtccaaggcttgggggcgaggagggagctgaacaaaggacatggcctgtgagctgggttttcgtgacaagaagttttctggtggacgaggagggagaagggcaccacagcctcagtgagggtagcgtgtgtaggcccaggaacttgggtctgggtggagtacaggggagagtgccggggagagtgccagggagagaggaggaggaggctggcaggggtagaggccacatcaccgggagccttatgtgttgggctaaggtgacgttaattctataggcactgaggagcatgacattagcctgatgccagggcagaagactctgcagatgcctgccttctgggggaggcgctgtgatgtgtgtgctaaatgtgtccctccttgtcctggccaaagcacactgtccggtgctctggtgggtaaaactcctgctgtacctggcttccatgccatataggccacactttcccagataggaccccatgctaggtgtggaggcaggagattcggagaccagtaggaaaccagccctgtccatctggccgtcagacatccacagaggatgaataaaggagggacagacatggctgggccactccttgcctgtcgcatgaagcagggggaacggtggtggcggggagattggtttcaggtgcaggatctcagacagctttatgcagggactggaagttccagatttgcaaatttggaagttccaaatttccactactttattctatagatatttattgtactttatttagtctgtcttcttttttaagtaagacagggagaatttttctcttctccctccattttgtgcccagtgagaaacagatcccaattattgactgaagctacactttagaaacaactttttcttaagaacttttacactgaacaagattcaaatatagttactgcatttttttttttttttttttttgagacagagtctcgctgtgtcgcccaggctggagtgcagtggcgcgatctcagctcactgcaagctccgcctcccaggttcacgccattctgcagcctcagcctccccagtagctgggactgcaggtgcccaccaccacgcccggctaatttttttgtatttttagtagagacggggtttcaacgtgttaaccaggatggtcttgatcttctgacctcgtaatccacccgcctcggcctcccaaagtgctggaattataggcatgagccaccgcgcccagccnnnnnnnnnnnnnnnnnnnnnnnnnnnnnnnnnnnnnnnnnnnnnnnnnnnnnnnnnnnnnnnnnnnnnnnnnnnnnnnnnnnnnnnnnnnnnnnnnnnnnnnnnnnnnnnnnnnnnnnnnnnnnnnnnnnnnnnnnnnnnnnnnnnnnnnnnatgtgtgaagctgagcacgtttatttatttcttagagtttattattttaatctcttgggaagggagagggagaggagaaaatagaccctcttcaacagcaagcggttgtttgagaacgcggtgtctgtctgccatgtcctcggttcccctggtacattccacgttaattacaccgtactctgctaccacagtttttcctttggtatccacagctttggaaagtaaatacattgtgattgtggaatggtctgtgcttgaagcaatgagatggaaagggagaagcagcagccctgccaagccaaggggcacatgtcccaagtcaacagggccgctcagggctcgggcagaacatgggacggaaagccctgaggcagcttggagaccccaggctgcaggccaggaggcccagggagggtcccacccgtaggtagtgttggaatgaggcagagagtgagttttccagtccctctgattgccatcaagaggcaccagggccttaactgtcagaacccataggaaaaaaatcactttcttctgatgacgggctctgcagcaggggccagcgcagcgaggagggctcccgagaccttgacagcatcaaggcccgtggcttcacctcctctgccactgtgaagagagattatggtcaaatatatacataacacagaattcgccattttaaccttttgttgttgttgttgagacagtctctctctctgtctcccaggctggagtgcagtggcacgatctccgctcactgcaagctccgcctcccgggttcacgccattctcctgcctcagcctcccaagtagctgggactacaggcgcgcaccaccacgcccggctaattttttgtatttttagtagagacagggtttcaacatgttagccaggatggtctcgatcttctgacctcgtgatccacccgcctcagcctcccaaagtgctgggattacaggcgtgagccactgcacctggctccattttaaccgttttgaagtgtacagtcactggcattaattctattcacaatgttgtacaaccatcaccaccgtttctcgtatatgtgcatcaccccaaacagaaaccctgtacccattcaataataacttcccatttcctgcctctccccagctctaacctgcctgtgagcgtgcctgttcttggtatttcctgtgtgtggaatcatgcacatttgtctcctccgccactctctgctgcccctaggcccagaagcacactgttcccctcccgacccgccccactgctgggactgtgggactctgtgggtccttccttattcaccaccacagtaccttccatgagcctttctcggttcccctccaccagtctcatcttttctttgtccagacatttggtttgaagcgtctttcctgcccagcctgacttctttgtgtgtgcgtggtgggggggtgggggcatttgtgtgagggtcttttctccactcacactcccccggagaatcagaagcagttgtgtggtcccagcggaggtgctcagggctgggttttatcttggcgactgttcacagggtgctcgccatgcactgagaggcagccgaggacagtcttatcagtgggggctccaggccaggctgcctgggtttaaatccagacctcaccacttactagctggggggctttgactcaattccttaacccttgtaagcctcagtttccttgtctataaagtggggatcatgataataacaacctcataagtttatgaaagctgaatgaggtcacagatataaacacaacagtgcttgcatgtggtggcacgtggtgctagctacgtgttgatacgcatttgctgctgttgtaacccacacgtggtgctagatacgtgttgatacgcatttgccattgctgtaacccgcgtcacaaagtttagtgaggatgaaatcattgatataaattgtttaaaaggtgactggcatttagtaaatgtcagctacagtatatctctctgtctgtctgtctgtgtatgtattcttatgtcaaaaccaactcagcactgagcctgcttccaagaactgtctccaacttaaagttgccagcagtctggttgaggggactgggccacaccagcagcagattaaaaatgaaccggcctatatgtcttgttcctttcttcaagacaacagggacatgggaagtcccagcagagggacgccaggggagcccgtctgaggggtctgctgggcgggaatcagaacagcctgcctttgcccagcgctcagcgcagcctgaccattttcacccctgttgtttttcttattaaattgggaaacaaattatacaaatttgaactatttctaacctccagcaaaaggtagtcacattctatctcaatttggaagactgagtgggcattactgttgacgtgagtacctacagtttcagtcaagattctcatttttttaaacccatggaagaaaattatcctctatggaaaccaagctttacaaagcttgtctctatgttctgattttaattgccagttgaaaggaaagctcagccttgcttgttaaataactgtgtaaatattaccagggcactgagaaggcctgaggaggagaaggaatggtttccttgcacatctgtgcctgagaaatgaagactcagactcacttctgaagaaacgagttcaacttcagatgggaggttgaactccattttcccgaaggccgaggaaatgtatgcgtgtgtgtgtgtgtatcgtgtgtgtttgtcagcatgtgcgtctgttacgtacacgtgtgcgtatgtgcatgtgtattatgtaagtgcacatgggcatggtcgtgtatatatacgtgtgtgtgttggggacgcactgggaacagagcatggtgtctgcgtcacatgttgtttctccgcacctggaggcctctgagtgctgtgtctgcgccactgtcaccagcctccccgtctggccacacagatcctcctgctgtgcatgggctgcagccatgctagagggaccctccaatctcccctaggtggccccaggcttagcaggtactctataaaagtatgttgagacagtgtacttttctgcttaaggtcaaagggctttgcttttgtctgtgtgtggagagccgtggcggctgggagaaggctgggtgggtgtccataaacgcgtgctaaggatggagccatccatcaaccttatttctcctcttgcctttgcttagaccatagcgtggacactgctatatattacatattgaattgggttcccggagcctctggcctctccccggaaacaagtaagaccttctctgaagctgcttgagttcctgtgggctggaaacagggcagggaaagagaggtttgctaactggttccttcccagccagatgtggttaacgtggcctctgaaagcaccttactcatccctgttgagctgctgacctgcagctccacatgtacccactctgattcactgagactcactccccctccagtgaaggctgccccacccgcagatcaggggaccgcacgtgttagggccttacctagggttccctggccactgccgcctgcaggccctcgctttgttgtggctcttcccaagagtcatcaggcgctgttgctcacgcataagcacacaggtgacaaagtcccctgaagaattgcccaccagtgtgacctgaacgacccctttccccaacaccacacatgagcactcaaactggatgtggaggcccggctgtaagagtgcccatctgcaaggctcagctctaggagctgtccccctgccttccctgaccatatggggcacaggttctgtgctggccccagtcccagatggtggaaggcaaggaaggagaacccacatcacccacctgccgtgcaccggggggttcgcgtatgactttgtttaatgccctggcagagtcttctgaggcattacactcaccaccgccacagggagaagactggagcaagaggaagagaatttgcatttgcgagtgcacgctgcgttcccgcgacagccagacactgcattacctcatgcagccctcacggcagtctcatgagatgtaatgcttagttctggtggagctggggccagaacacactttccctgactcagagtcctcactcttacctccaccttctcactactcaaaagtgtggcctgcagaccagtagcgttggtatcacctgggggcttgtcagcgatgcggaatcccagtctgcattttaaccagatcccggacacacatttcccccgcacagtaaggtctgggaagcactgccctgcatctagtaactcttatgtgagagaaccctgggaggggaggtggaggccagtggggttagctgagaaaaccttctggagggccagtggcagagctgagccacagaacaggtgcgtggtggagcagaggcagcatttgctaatcagaatggcatctgcgatgccttcgcaggctgtgtggagaggggaaggtgcggccttgtggccccttgtctgtgtggaagggcaggcgactctgtgggggaagggtggcgtggagacgggaagcgtgattacccacacaggcctcgagcacccgcatccagggaccacggccgccaggaggggctggactctctcaggagaagcgtgcgtctgggaatccccgctgagggggcttgtgaatgtgggatcgaagcgcttagatcttggcttccggaggtctccgcgggtgtccagctttgtacagggtgtggggatgagtctgccgaccggactcccatgtcagctttgtgtctggacagaacaaggggcgaggaagcctggtcgggccactctgggcctgcatgcgtgtgggcaggtgtctgttggtcttgggcaaagggcgaggtgacactgagggcgtgagggaggaggccccaagagagcagggaagcgtggaagatgccagctggcctgggggcgtggatgtgggtttcagcagagtgcagacaggcagtggggcgtggggcctccttggggcctcgctgggctgtgtcgggtgcttgctttcttttctcctttgcctccttccaaggtgcgtccacagccagcgtttctttatgcttttccctcagtctgagacctaggaacaggagaggccagtgctgtgaatttcatgtttcatggcctccccagcaagccagcccacgaaattccacacagggaggaggaagaggaggaggaggaggaggagctgccactgtccccgaggggagcagctgacactctccccttgactgcaccaggccttgggggtatggcgcctccacggacgtgggctgggggaggataggctcctaattagtttggatgcgcttggagtcagggcaccttttccccagtgggcagttctgcaccctgaacagctgtggggagaagggcagcgggaggacggccagataattccagaagaaaggctccaggagtggcagcagaactgctgttattttcggaggagtctaattactttccccaggtaatggcttgaagtagcatctaattttatttatttatttatttatttatttttatttttttattatactttaagttctagggtacatgtgcacattgtgcaggttagttacatatgtatacatgtgccatgctggtgcgctgcacccactaactcgtcatctagcattaggtatatcccccaatgctatccctcnnnnnnnnnnnnnnnnnnnnnnnnnnnnnnnnnnnnnnnnnnnnnnnnnnnnnnnnnnnnnnnnnnnnnnnnnnnnnnnnnnnnnnnnnnnnnnnnnnnnnnnnnnnnnnnnnnnnnnnnnnnnnnnnnnnnnnnnnnnnnnnnnnnnnnnnnnnnnnnnnnnnnnnnnnnnnnnnnnnnnnnnnnnnnnnnnnnnnnnnnnnnnnnnnnnnnnnnnnnnnnnnnnnnnnnnnnnnnnnnnnnnnnnnnnnnnnnnnnnnnnnnnnnnnnnnnnnnnnnnnnnnnnnnnnnnnnnnnnnnnnnnnnnnnnnnnnnnnnnnnnnnnnnnnnnnnnnnnnnnnnnnnnnnnnnnnnnnnnnnnnnnnnnnnnnnnnnnnnnnnnnnnnnnnnnnnnnnnnnnnnnnnnnnnnnnnnnnnnnnnnnnnnnnnnnnnnnnnnnnnnnnnnnnnnnnnnnnnnnnnnnnnnnnnnnnnnnnnnnnnnnnnnnnnnnnnnnnnnnnnnnnnnnnnnnnnnnnnnnnnnnnnnnnnnnnnnnnnnnnnnnnnnnnnnnnnnnnnnnnnnnnnnnnnnnnnnnnnnnnnnnnnnnnnnnnnnnnnnnnnnnnnnnnnnnnnnnnnnnnnnnnnnnnnnnnnnnnnnnnnnnnnnnnnnnnnnnnnnnnnnnnnnnnnnnnnnnnnnnnnnnnnnnnnnnnnnnnnnnnnnnnnnnnnnnnnnnnnnnnnnnnnnnnnnnnnnnnnnnnnnnnnnnnnnnnnnnnnnnnnnnnnnnnnnnnnnnnnnnnnnnnnnnnnnnnnnnnnnnnnnnnnnnnnnnnnnnnnnnnnnnnnnnnnnnnnnnnnnnnnnnnnnnnnnnnnnnnnnnnnnnnnnnnnnnnnnnnnnnnnnnnnnnnnnnnnnnnnnnnnnnnnnnnnnnnnnnnnnnnnnnnnnnnnnnnnnnnnnnnnnnnnnnnnnnnnnnnnnnnnnnnnnnnnnnnnnnnnnnnnnnnnnnnnnnnnnnnnnnnnnnnnnnnnnnnnnnnnnnnnnnnnnnnnnnnnnnnnnnnnnnnnnnnnnnnnnnnnnnnnnnnnnnnnnnnnnnnnnnnnnnnnnnnnnnnnnnnnnnnnnnnnnnnnnnnnnnnnnnnnnnnnnnnnnnnnnnnnnnnnnnnnnnnnnnnnnnnnnnnnnnnnnnnnnnnnnnnnnnnnnnnnnnnnnnnnnnnnnnnnnnnnnnnnnnnnnnnnnnnnnnnnnnnnnnnnnnnnnnnnnnnnnnnnnnnnnnnnnnnnnnnnnnnnnnnnnnnnnnnnnnnnnnnnnnnnnnnnnnnnnnnnnnnnnnnnnnnnnnnnnnnnnnnnnnnnnnnnnnnnnnnnnnnnnnnnnnnnnnnnnnnnnnnnnnnnnnnnnnnnnnnnnnnnnnnnnnnnnnnnnnnnnnnnnnnnnnnnnnnnnnnnnnnnnnnnnnnnnnnnnnnnnnnnnnnnnnnnnnnnnnnnnnnnnnnnnnnnnnnnnnnnnnnnnnnnnnnnnnnnnnnnnnnnnnnnnnnnnnnnnnnnnnnnnnnnnnnnnnnnnnnnnnnnnnnnnnnnnnnnnnnnnnnnnnnnnnnnnnnnnnnnnnnnnnnnnnnnnnnnnnnnnnnnnnnnnnnnnnnnnnnnnnnnnnnnnnnnnnnnnnnnnnnnnnnnnnnnnnnnnnnnnnnnnnnnnnnnnnnnnnnnnnnnnnnnnnnnnnnnnnnnnnnnnnnnnnnnnnnnnnnnnnnnnnnnnnnnnnnnnnnnnnnnnnnnnnnnnnnnnnnnnnnnnnnnnnnnnnnnnnnnnnnnnnnnnnnnnnnnnnnnnnnnnnnnnnnnnnnnnnnnnnnnnnnnnnnnnnnnnnnnnnnnnnnnnnnnnnnnnnnnnnnnnnnnnnnnnnnnnnnnnnnnnnnnnnnnnnnnnnnnnnnnnnnnnnnnnnnnnnnnnnnnnnnnnnnnnnnnnnnnnnnnnnnnnnnnnnnnnnnnnnnnnnnnnnnnnnnnnnnnnnnnnnnnnnnnnnnnnnnnnnnnnnnnnnnnnnnnnnnnnnnnnnnnnnnnnnnnnnnnnnnnnnnnnnnnnnnnnnnnnnnnnnnnnnnnnnnnnnnnnnnnnnnnnnnnnnnnnnnnnnnnnnnnnnnnnnnnnnnnnnnnnnnnnnnnnnnnnnnnnnnnnnnnnnnnnnnnnnnnnnnnnnnnnnnnnnnnnnnnnnnnnnnnnnnnnnnnnnnnnnnnnnnnnnnnnnnnnnnnnnnnnnnnnnnnnnnnnnnnnnnnnnnnnnnnnnnnnnnnnnnnnnnnnnnnnnnnnnnnnnnnnnnnnnnnnnnnnnnnnnnnnnnnnnnnnnnnnnnnnnnnnnnnnnnnnnnnnnnnnnnnnnnnnnnnnnnnnnnnnnnnnnnnnnnnnnnnnnnnnnnnnnnnnnnnnnnnnnnnnnnnnnnnnnnnnnnnnnnnnnnnnnnnnnnnnnnnnnnnnnnnnnnnnnnnnnnnnnnnnnnnnnnnnnnnnnnnnnnnnnnnnnnnnnnnnnnnnnnnnnnnnnnnnnnnnnnnnnnnnnnnnnnnnnnnnnnnnnnnnnnnnnnnnnnnnnnnnnnnnnnnnnnnnnnnnnnnnnnnnnnnnnnnnnnnnnnnnnnnnnnnnnnnnnnnnnnnnnnnnnnnnnnnnnnnnnnnnnnnnnnnnnnnnnnnnnnnnnnnnnnnnnnnnnnnnnnnnnnnnnnnnnnnnnnnnnnnnnnnnnnnnnnnnnnnnnnnnnnnnnnnnnnnnnnnnnnnnnnnnnnnnnnnnnnnnnnnnnnnnnnnnnnnnnnnnnnnnnnnnnnnnnnnnnnnnnnnnnnnnnnnnnnnnnnnnnnnnnnnnnnnnnnnnnnnnnnnnnnnnnnnnnnnnnnnnnnnnnnnnnnnnnnnnnnnnnnnnnnnnnnnnnnnnnnnnnnnnnnnnnnnnnnnnnnnnnnnnnnnnnnnnnnnnnnnnnnnnnnnnnnnnnnnnnnnnnnnnnnnnnnnnnnnnnnnnnnnnnnnnnnnnnnnnnnnnnnnnnnnnnnnnnnnnnnnnnnnnnnnnnnnnnnnnnnnnnnnnnnnnnnnnnnnnnnnnnnnnnnnnnnnnnnnnnnnnnnnnnnnnnnnnnnnnnnnnnnnnnnnnnnnnnnnnnnnnnnnnnnnnnnnnnnnnnnnnnnnnnnnnnnnnnnnnnnnnnnnnnnnnnnnnnnnnnnnnnnnnnnnnnnnnnnnnnnnnnnnnnnnnnnnnnnnnnnnnnnnnnnnnnnnnnnnnnnnnnnnnnnnnnnnnnnnnnnnnnnnnnnnnnnnnnnnnnnnnnnnnnnnnnnnnnnnnnnnnnnnnnnnnnnnnnnnnnnnnnnnnnnnnnnnnnnnnnnnnnnnnnnnnnnnnnnnnnnnnnnnnnnnnnnnnnnnnnnnnnnnnnnnnnnnnnnnnnnnnnnnnnnnnnnnnnnnnnnnnnnnnnnnnnnnnnnnnnnnnnnnnnnnnnnnnnnnnnnnnnnnnnnnnnnnnnnnnnnnnnnnnnnnnnnnnnnnnnnnnnnnnnnnnnnnnnnnnnnnnnnnnnnnnnnnnnnnnnnnnnnnnnnnnnnnnnnnnnnnnnnnnnnnnnnnnnttacatttgctgaggaagagctttacttccaagtatgtggtcaattttggagtaggtgtggtgtggtgctgaaaaaaatgtatattctgttgatttggggtggagagttctgtagatgtctattaggtccgcttggtgcagagctgagttcaattcctgggtatccttgttgactttctgtctccttgatctgtctaatgttgacagtggggtgttaaagtctcccattattaatgtgtgggagtctaagtctctttgtaggtcactcaggacttgctttatgaatcttggtgctcctgtattgggtgcatatatatttaggatagttagctcttcttgttgaattgatccctttaccattatgtaatggccttctttgtctctttttatctttgttgctttaaagtctgtttcatcagagactaggattgcaacccctgcctttttttgttttccattggcttggtagatcttcctccatccttttattttgagcctatgtgtgtctctgcatgtgagatgggtttcctgaatacagcacactgatgggtcttgactctttatccaatttgccagtctgtgtcttttaattggagcatttagtccatttacatttaaagttaatattgttatgtgtgaatttgatcctgtcattatgatgctagctggttattgtgctcgttagttgatgcagtttcttcctagtctcgatggtctttacattttggcatgattttgcagcggctggtaccggttgttcccttccatgtttagcgcttccttcaggagctcttttagggcaggcctggtggtgacaaaatctctcagcatttgtttgtctgtaaagtattttatttctccttcacttatgaagcttagtttggctggatatgaaattctgcgttgaaaatccttttctttaagaatgttgaatattggcccccactctcttctggcttgtagggtttctgccgagagatccactgttagtctgatgggcttccctttgtgggtaacccgacctttctctctggctgcccttaacattttttccttcatttcaactttggtaaatctgacaattatgtgtcttggagttgctcttctcgaggagtatctttgtggcgttctctgtatttcctgaatctgaacgttggcctgccttgctagattggggaagttctcctggataatatcctgcagagtgttttccaacttggttccattctccccatcactttcaggtacaccaatcagacgtagatttggtcttttcacatagtcccatatttcctggaggctttgctcatttctttttattgttttttctctaaacttcccttcttgcttcatttcattcatttcatcttccattgctgataccctttcttccagttgattgcatcggctcctgaggcttctgcattcttcacgtagttctcgagccttggttttcagctccatcagctcctttaagcacttctctgtattggttattctagttatatattcttctaaatttttttcaaagttttcaacttctttgcctttggtttgaatgtcctcccgtagctcagagtaatttgatcgtctgaagccttcttctctcagctcgtcaaagtcattctccatccagctttgttctgttgctggtgaggaactgcgttcctttggaggaggagaggcgctctgctttttagagtttccagtttttctgttctgttttttccccatctttgtggttttatctacttttggtctttgatgatggtgatgtacagatgggtttttggtgtggatgtcctttctgtttgttagttttccttctaacagacaggaccctcagctgcaggtctgttggagtacccggccctgtgaggtgccccgctggggggtgcctcccagttaggctgctcgggggtcaggggtcagggacccacttgaggaggcagtctgcccgttctcagatctccagctgcgtgctgggagaaccactgctctcttcaaagctgtcagacagggacctttaagtctgcagaggttactgctgtctttttgtttgtctgtgccctgcccccagaggtggagcctacagaggcaggcaggcctccttgagctgtggtgggctccacccagttcgagcttcccggctgctttgtttacctaatcaagcctgggcaatggcgggcgcccctcccccagcctcgctgccaccttgcagtttgatctcagaccgctgtgctggcaatcagcgagactccgtggggtaggaccctccgagccaggtgcgggatgtaatctcgtggtgcgccgttttttaagcccgttggaaaagcgcagtattcaggtgggagtgacccgattttccaggtgcgtctgtcacccctttctttgactccctttgaaagggaactccctgaccccttgcgcttcccaagtgaggctttgcctcgccctgcttcggctcgcgcacggtgcgcgcacccactgacctgcgcccactgtctggcactccctagtgagatgaacccggtacctcagatggaaatgcagaaatcaccgtcttctgcgtcgctcacgctgggagctgtacaccagagctgttcctattcggccatcttggctcctccagtagcatctaattttaatgcccgctttgatctggctgttaaaaattccactctttatgttcattcaaattccagttggctgttctgggtaagcccaggccccagtgccctatccggagagagctgagaagttgcaggccctgcgtgcagggagcctgactgccttgtctctgtgctctaccagctccaggcatacctgtgttgatacctgaatagagcgcgcagtggggagagacagggagggtagctcagatgcttttctgctttcacagggagcaccccaagcacagcagattttcaagagatttatctggaaggcctggagaagcaactcaagcacaagggatctgaggaggagccagggagcacatttccagtttaaaggggaaaaatgtctccctggagagtgggtacaaacgggaagagggcggaagaggagctccagggccacacgcagcctggcaagggcaaggccggctgtgtccagaggagcaggaaaggcgggtttgctgcaggccacctggagagacggtggcgtgtcaacgggccacacgggcagtgcctcccagcccccttactgctccccgcagcctgccctgagtttagagaagctgcaccgaggcaggaggaggtgaccacagtgctgccaccaaggcgacctggagctgggaaggcctaggaggccactctccctccttgtggtacaggtgggaggtatcggggaggggcctggccagtgtcatcatgcaagtcactgatcatgattagaacagccactgccactgaccccatagccagaatgctcaagacagaagccaggacccggagctctttgtcccccttcatcacctacatgcatccgttcttagagctagtcatacacctgctaagtatctcctaaaccctttgcttgtctccatccttggcactgccaccctcccccccatcaccaaagcatcctcctgcctggtcttgctgcttccagcccttcctcctccatgccagtgcccacccagccagagtgaccttcctcatacctcgcttcaaaccttttgttccctttagcagcaaggtcagcttccctgaccttcctcacagggcccatcctaaactggccctggctcatagtcaggcctctgaccccacagcccctgcccctaaccactgtgtttgttgaatacaactggatagacttctcccctacaggtctgtggtctctgctgaaatgcattcacatgcatggagacagggaaacagcctctgttccagggaagcaggggtaggggagcggccgagacgccagacctggctacctttgataagttgtttattttctgaagcagacagttctgataaagccgtcgtaatgatgctccttgatccaacctagcacgataggaatctgagctggcctgtcagaaggacagattgttttgtggattttcttcccttaaaaaaaaagaaaaatttaaaagcaaggacagtgctgtagagtgctgagctgtaaggcttcgaggcacacagcgcggccagctgtggggcaggctgggggcaagctgggtgtttgggggtgctggaaaccaggtctgttttgcccaggtgtgctctgtgtgtacaaatggcctttaatgcagctgcccctgtccacaggccccaggcagtccttgaaagagaagcttgaaaagtcaagtttgggtcttctgcagctcgggcaccaccgagtcatagtgagtgttggcctccgcaaggcctgacagcacagaggacagaggtgagtgggggcagctgcctcaggggctagcctcggggtgggggaggaggctagcccagcaagcttttgaggcacctctttcctgtgttgggtatgaggtgagtgctcagagcagtggctctgtcaccacagtcgaaggacagtgaggctagtggcgacctgacggttttgaaccaaactctgggccagcccctggtggaatggagtggtctcgccgcatcagtctggaactctactaggattgtcaccagacacggttgtggctcgcggctgcccaccgcggcccgcaggatgactgggctcttggagctgtgagggagcacaggagctaagctcctgctcctttctctctgaccgcactgctgtgcttctcgagtagaactgggtggactcccccctcccaccgcggtctctggtgaaatgcgctggcatgcttagacatggggatggaggctccattctagggaaccagggatgggagagtggcagagatgccagacctggacaccttgggtgagttgcgtattttctgaaccagcttggagccggagcggcagggccaggggtggggaccaggactgtgacactggtactgagtcaccattcccaagaggtttggagaggtcggaaggggtgttgagccaaagggcaaatccagatattctctctccaaagcccgtgctcctctgaactgttctccagggacctcactcagccccttttgtccccaacttgaactttcatatggcaatcatttcttttcctacttgacctcgtgcaaggagaggatttagagcactgtaactcccatgggggtcatccttgcttgggagaaggttacgtccacgtgaagactctgcggctgctcagatgaaccacacactctggaggtttttggcatttcgagggtctggaagtggctgccttgctaggcctccctttcctaccctcagcttctgcaactggcaggagctgctgtcttgggcaccattagagaagctcccctgccaagagccaaggtgtactgtccccagcatggagaatggtcctgccatcagagtgggctctccaggatgagggtgtctgtgtgattcactgtgctcttcacatcctggaccctgaagcctaattgaatgaatgaatccctggggttgggtttctggggccgatggagtcctgtgatcgtgtgtagtggtgggagttttgcctagaacatccttgggtggtttaactcactaaaatacagcaagtgaagaacagcaggctgcaagggctgacctaagtattttagggaaagaattggacctctgaaaagagtacggtttactttgctcaaaatctgggttgcatgaaatacattacactgaggctgccatctcgctggtgggaaaggctgcaggcagtcttgtggtgccctagcgagggtggactttatgtcctagctgggcagccttgcccaggtggcttccatgctccattttcctgggtgatctctataggtttttttcagcgagaagattttgggtctagggccagggccctgacttgaatcgggcctcctgcctctaagtatccctggggcagggagcagcctagctgatccctgccatcttcccatcctcacccacagcctgctctgtggttggaactggcctgatgcaattcagacctcatagcctgttttctgcttttctgcttttctgccttaccagccggaccttcccagagaaccaaagcccgctaggaatcctttctgtgatgttatttctcactccagctctgaacttggtgaaagcacaggagatgagctctttctgagttaatgcagcaaaaggcagaatgtgtgaccatcagcacatcacttttttttttttgagaccgattttcactcactgtcacccaggctggagtgccgtggtgcaatctcggctcgctgcaacctctgcctcctgggttcaaaccatgctcctgcctcagcaccttgaggagctgggactacgggtgcctgccaccgcgcctggatgatttttgtatttttagtagagatggagttttgctgtgttggccgggctggtctcaaactcctgactgcaagtgatctgctttcctcggcctcccaaagtgctgggattagcggcatgagccactgtgcaccgccaggcgcagtaactctctgggcctccatttcctcgtccgtaaaatggaaataatactgaccgtaggtagttgtgaggaattgagataatgtacatatagctgggtaatgattcctgtgaatggggagaggtgttcttctcctcctcctcgtcatttttctgggcatggtgcttgtccataataggcttgaacaaatatttattgccagcctggatgtagggatgaccctgacttctgaggaggagatgaggagaaggacctctggtgtcaggaaagcctgaggagaggccccagggatcatctcagcagggagggtgttgaccaaaggaaaaagtcaagcttttaaagaattaagttcgttttattcagaagtttcctgaggactccagcctgggaggagtctttcgagaggttctgtcaggctgccccaagactgtttcagctcacagtttacacacaggtagacaggctcggtatacgcagggggttatcaaggcttacgtgcaagggtgcatctggttagagactccagaagcgacatcactgaccccttcagatgcgatcttatgcgtaggaaaaggcaagcactagggtcatggatcttttaaggaatatagtgactcaggaagagacgctgggggccgggcgctctatcctgttttgtcttcacttcatcctccggagggttgagcgttgtcacagagtcaggggctttgtggaattcggctggccagcagaaatgtgcagacatggcttcttaagtttgcaactttatctcacggggtgagcagggcttcctggctggggccatgtctgtgccacatgtgacctggcacctcactgttggctcttggcagggggggtgccttatggctgagggcaagtttgggagaggtccttctttttttttttgagatggagtttcactctgttacccagtgatctcggctcactgcaacctccttcccccggggttcaagtgattgtcatgcctcagcctcccgagtagctgggattataggcacgcgccaccacacccggctaatttttgtggagttgagttggagtttcgccatgctagccaggatggcttcaaactcctgacctcaagggatccacccgcctcagcctcccaaagtgctgggattacaggcgtgagccaccgtgcccagccgagagatccttcttcagggttcctcactttttcttcctgctgtactcccacgaggttccgtgtgtttatgccgaaatgcctgagggaaggaagtcccagggacacagggaacttttctggccctgcctattcctccttcctgctcctgcacagctgctcagacagtagcaccagagggagagagaagatgggcaggtgtcagcagccctccaggaagaccaccagggaggggggctgacggggaggcaaacgcctgagactcatcacccctatttcctgaaaactgaatctgcatacacccaaataggacaaacctaaggactctgcaaaagcaaataagcatagtggttgccttacgcgcccgccacccttgacacacacagcacactgctgaggtcccataattggaaaccacccagatgccccacactggatccatcgtgaggctttgtcaatacatagaagtgagtttttgaaacaaaagcaagtaacaacaacagcaaatccatgttgtaatcacgcacttggaatgcagttaaagagacatcatcaatcgttggagttcagtgatcgccccccggaagcttctagtcctggcctagaactgcaggctttcaggactgacaagaatcctctggccgattcgtccatttaataggtttaggaaccgagcgcccagcaggggaagtgatttgcccaggcccaccctggtggtgggtgcagagccaggtagaccagttgcagggcccactggctgctgcagaccacaggggaggctggtgtgtttggcattgagaatctgcactgctgctcgctgaacttgacattgtggctttccttatctcatctgaatgtattgagtattttacttgcattacctcataacattttctcggcagccctgtttatatttggaagcctgcagcacagagagtttgagtgccttctccagtgtagatgcagagaaccaggatttaagctccggactgggactgtctgcccccagaacctatattcttaacctgtatgtgcactgtacattttttttcaaggcagtggaaatctgatatattgctgcctcctggccttccctccaccctagaccgatggaaggtggcggagctgggcctccctcctggcacctgtaagcattattgtgctgcttccaggaagcctgtccccgggccctgctcagcgctgtgacagagggagaagacgggacaagtattagcatagaacctgtgtatactttgcaaattgctatgccacctgttgtatggccattttcaggataaaataactcagtggctttcatctctttataaaaatcataaaaacgcttttttttttttagtgtgattcttggaccagcagcgttagcgatccctgggggcttgtcagaaatgcagtggctgacgagctcccaggtgagcccaggcacagtgacatctgagaagggctgcccacctcagcatgacaggctcctgcaggcggggcctgggcctggcccatcacactgtcaccgtgccaattactatttttgccttggccaagatccatgccacattgtgtaggacagcgatcagggacagccaaaggtgggggcccttacatggaatgggagggcgctccactttttctgatcttgagaagtaacacagtttgcagccgggggtcatactgcccagcaccttcgtgcctgggtgagccacgtccacggagtctctgccacctctggctcctgggttggaacaccccctcccatgagggtgaagggcgctggtgcggattgatggagtctaactggggacacaaggttaaattccacacataccctccctgccgcctttcccacacctggctgcactctgctcgctgtcccggaaaacaccccaccatgtgtcctggcactctctcctgtgacctccagcgccatgaggctgtcggggacagtgagccgattctgaaggtgaccctctgtggttttgtcttcactctgacaaaccctcccccatcccccccacccccgctcccttaaattcagggaaagaggagggttgtggagctgagctggggcctggctgcccagctgggccaggtgcatgtgggtcctcaccagctttggctgccggctctgtggtttcctggttgggtcctggggctcccactagaattgaactgctccctgtgacaagtactggggcttgaacagctgctccctctacaagccccagtactggaggctgggtgccttccagggccagcgctaggaagggtgttgtccagagggctgtgggcatccccaggtcaggtcaccatctgggccccttccttcctagtctttgtcacactgagcacttcgtcacagatgtggattcctgggcttggggagccaacttttctgcctcaccttctctgtcttcacttccctctagtgactgggcccgaggcacgttctcctcccgcccctgcctttctgaacggttgtgccactgccttcatccaacattctcctaaattcctgccatctagctttagaatctcttatgccttccttcattaatccatccatttgaaactaacagttctgggggcccttctgtgaatcagatgcccacgccaggccctccagacatgaagatgagcgggacacttccccttatcagtcccagagtcacctgactctgcccacaccctcaccctttatttgcctgttattcattcccgattgtattacacagagccccttgtaaacagattctctctttctcaaacccttctcacacccagcccctcctcctccttagatgacttcatgtcttcctttcctgacctctcagaactgctgctgtcctcgcttctgtccctctctgctcccagccacatcccagggttccctcttcccggacagctcttctgcctggcaattctccccttgctgacctcgggcaagcgttttagagctctctgcctcagcttcctcatctagaacatggaaatcatagtacctaccttgtttgcttattacaaacattatactgaatacatttaagaacttacaacagggcctggcacatagtaagtcctcactaaatattagccattatcgttattctcattcctcaaagaagccaccctgccgttttccctgtatttcttcagtctgtctttctctcatgtatgcatccctttcccttggcgtacagaatactcagctctccctctttggaaaatatcctcccctctgtcctctgtttgcctctaggtgccatctggctccctggcgtctgttctctgctgttcatacgctccccagggccaagggtgtggcttccccgtctccatccctctccttctccaaggtcactgtcacctcttgcggcacttccaagtccttgccctctacagctttccacactgctgtattctcacatgcagtgatgtactgggggcagatgacactgggtaaggggccgggagatgcaaattgaggctgaccatctgggggcaggggtcagagcttccaagggtctgatgagcaggttctgtgcagggtgggtcaggacgttgccgccagagagggatctcagttcccatcactggagcagagtgcgtctggtcgcaaagttcatggagagccgagtgggtagcttaggtgtggtttgaggacactgtggtcaaggtgaagggaagggccatcagcatttggaattcttgagggtgtccctagggatggagcagagaggaaggggatcccaggcggcgagcaaggagctgccagccggatggtgcgatgggaggtggggaggacagctctggaagtgtggggggctgtgtgcagccctggggactggggagagtggcagcaggatgcatctctacttcgtggaggggtactgaggtactgtctgggtgtcattctgtccagatccaagtgtttgagtgagaggcagagaacgggcagtcgatattagtaggaggcttggagggcatcactggggagaaggcccagcttggatggggatgaggaagagggggaggtaggctggagggaacttggtgggacacatctcgtgcccagagggccagggcacgagaggctggaggaggcacagtgggcctgcagaactagctggaaggcccgtgtagctcagtggctctgcaggagctcccacagcagaaaaggcccccatggcctgactcgctacgggcctctcggctgtcagtgtgagggacaggtggccggggtcctccaacgccctgcatcttcctggctcctcttcttccacgccctaaatgtcagaactctccagaattccgtaccacctgcttggtgctctctgcttatggccggtacctccagccacctgctgggctcctccacattgctgttctctgggcacctgtttgggactcaacatggaattcccttttcctccgccccacacccactcctcccagctccgccatggctgtttctggctccgccgtctgagtagggatccaggcttaaagcccctccactgcctcttccccctcatctctgtcccttgcccctcccagggccgaggctccggggctgcatgtgactgagtgagggtgagttccccagtccctgcccatctgtttttacagctccagggctgcagatgctgggggaaggtcacgtgactgacaaccccaggcaggctgggcacggggagcggagggccaggagaagccttcgagaagggcatggcacatcctgaggatacggggcagcaaccttggggtcctggtggtgccgtgccatgtggaggcctcaggcctgccagctgcccttctgcagggctctggagaaacggacgcctgcagggggctgaagggctgccctgcaccaggtcagaggccttgccatcagggccattcaccccctacgacgtccagccccaggccgcgctttacagggccccacagagatgggctggtcatagctggtacagctttgggaacgagactgacactatgggtcacctttatcattccagactccaggaggctggctgggtggacgagggctgatcgctgaggagccgccacaacctaagcctgggcagggaggagcatttgcagcatcagctctgcagaggctgagcacctacagggacaggcagggctgctcctcagggcacgctgctgggcagggtcagcgcagagtcccggaccagcccagtgggggcatcttccccattccatccatgttattgcggcactgcctctgggttgagattgcaggagatgttgcaagggggagcttttggacatctctctgctggggtccccgtgccgccccctacatcatctcccatccctctgcttttcccttccccagccactgacacctgcctttccctggacagaggctgccccgcccactgtgggtcattctgtctccacccactgagagcagcaggggctggggttttgctgagggcagttctgggccccacaggtgtcctctgagtccctggacagtgagaacaaggtaccagtgagctgtggtgtttttctccatcttcattgctggagagtgctgtgggttgaagtgtgtccctcagaattcctctgcagaaatcctagcccccagcacttctgagtgtcaccttttgtgggaatggggttgttgcagatataaagagttgagatgaggttctgctggggtagggcaggcccggatccttatggctggcgtcttgatagaaaggggcaatgtggacacagaggcacgtgcacgcagggagaacgccatgtgaatatgaaggcagagagcagggtgatgcctctcccaggatcccagactgccagcaagccaccaggagcgaggggagcgcctggaacagaccctccctcctagcccagacagagccagctgccagcactgtgatcttggacttccagcccgccgaacggagaggcagcacctttctgctgctgaagccgccccattggtggtactttgcgatggcagccctagcgaactaacagagcccagtggtctttaggtaaaaatgaggcccactgtgcaggctgtaacaggggcaactctccagaatgcttggcttgtctagtagccaccccagtgccctgtcacgactgtccctcctcccaccgaaggcccctgcgtgacataattcaaaacgactcagactccgggaacacgcgcggtcgagttccaatgtctgtgccgcagtcggccccgtgaccccgtgcgggcttcttcctctctggaacgggtgggtgtggggtgggtggtaacactgtcctgattaaagctgtgcacatctgctcagcagatgtcacctcttttctcacttccccgagcccccagaccttcctccaggccctcttccttccctgaacctctgttctctcaggctgtgcagatggtgcagagatgccagcagttgcaaagcagggccctggcagcctccagcgtgcggggagaggctccaggaggcggaggccgtggtgctggttctttctggaggggaggagctgtggctcatgttggagggagggcctggaggggaagccctctgcggtgtgcctccccacagggtctctgtggggcccggtgccccagcagtcctctcctgtcctgccaggcagcctggttgcagcactgagggccaaccccagtgcccactcagcctgcaaagcaacagccgcgcctcgacctcgcttgccccttccaagttctggggatgttgtggtttggcaactcagttgctggccttcaaagagggctggggtttgaaaacaagcacatgtttcttaggaggtcccacagacgagggtgagcacatgcctgccacctgcttagtgtccctcctatttccccaggcaagtcctgccagccactcgggcacccagctctcctccaagtgctagtgtggtgagcttggaggacgtgggccctgctggaggggaaagcacagcctctgcgcctcctggcaggctggctttgtctgagcggtgctgcctcgcctcaccacagggcttgttttgggtaggtgggaggcagcagttcccttttctgggcagaggcatttgtggaaaagcataaattatttgcctggaaatgtggagttgccctttcagcagcgtgaccctggacaggccagtttttgagcctcagcttcctcatctgcacaatgggtatatgaaccaggagtccctcagtcttcaggctctggtagaccgtggctctatgaggagcatctcttagtcctactgcaaatggcctgtgtgacgttaggaacacttattcttttttcttgagacggagtttcactcttgttgcccaggctggagtgcaatggtgcaatctcaactcactgcaacctctgcctcccgggttcaaacgattctcctgcctcagcctcctgagtagctgggattacaggcgcacgccaccatgcccggctaagttttgtatttttagtagagacggggttttgtcatgttggccaggctggtctcgaactcctgacctcaggtgatccgcccacctcggcctcccaaagtgctgggattacaggtgcgagccaccgctcccggcctgggaacacttcttaccttctctgtccagtagagctggagacctcagcctgctttaggtcttgttatcaagagatcctaataagggtcagttctgagctggcagtaaggactgctctagggacacgggtacttagagctccgtggtggtcctacaactccaggatgtccatgtcttctccagtttgataccacagggcagtggttcccctaaaggactgaagagctcgagactgccccacagaacttcagccttagctccaggtaggaccaagatgcagggtcatgggtctgaaattagccgacatcacccagccagggcgcagggtgtccggagagcctctgggcctgggtggacttgaaatgtccctggatcaccccagaggacctggctggtgtggatgaagtgctggacagctgctgagtgttgcttttccctcctggactctcatcttggatgactggaaaacaaggtcccttccacgccaaacgagctcattgggccaggcacacatgcatgggtatgagggaaatcacgtttccgggttccaggcctcactgactgcacagcctctgggccgggtgcttcctctgggaggaggcccagatgctggcccttcagtgactgctctcaaggctgaaggacgccccagaggtacgccttgcgaggccgtgtgctgaatctcagacctcaaatggagccttctttgcctgacagtctacagcctgaacttagcctgagtcagcacaggcttctagaaccttcctgcagagtcttgtgcagacagcccaggctcagcattttcccatcctcgcttcctccctcttggaggtggtggtggtgaactcgacctgaggagctgagaaaggggcaggagaaaaaaaatcacgaagagtcggaggcaaaagggcctgtggtttggagtggtgggaggaggaggtgggagggctgatggccacgtgtgccctttactggggaggacgagcccttagattctccagcccggctctctcgagagcccttagcagagcggccttggttgtgatcatcagggaaagacttgaagcgaggaagtaactgtgcttttccaaatgacttcagatgcccttttccataaagatgggttttcttcatgaaaactagttgactagcttttaatagtcttttttatgattattaagttatattcaatgttaaaaatttagaaaatgcatttatgactggaagaatgttcttaaagcttcttaatttttattttcccaaagggcctccttgacttctgaaaagacccaatatttaccagggactgtctgcgtgggggcttgttttccagttgaaattatttctaaaggggtgaaaaaggcttatcccctctaccgtgggtctccaggtgactatggaagacaggaacaagactctccacaggccggacggttagacaatccagatagttagagcaaagtggctgggttgtgggcatgagggggggaggggttagtcagagaaacttctggatgctccaggactcagaaccaaatacctgcatttatacaaaggtttcctgcagcctctgcacgtgccacagacagtgcccctgaatatacgttgtcagccccagactcctgtgaagaagggcaggggtctgggacactcactgccctgcctcgtagaggcctcaggtctgagccctaagttcctaatgtgccagcatcacccgatcaccctgtcccctggcctcggccggtgccacccaaattcagaaataagattgaaatccaagcgcacctccttggaaccctagcccgtggaatccgaggcagtcagatcaaagggacctcagagatcagaagccctgcctgcgacaaactgaggacctctgttccctttctgcaaaaatgcaggcagtaatgtccctgggctgccagggagagggagccgaggtggagagtgtgagagggcttcgtgacccacgctgtgctgttgcgttggggggattggcggtactgcctgtttaggccattttgccatgggatagaagttcctcgcacgagctccaatactgtccacaccccgtaccattccttctaccccgaggctgatgcgattcctctacgagaaccagcagacacagaagccagagaaacccaccattcccttaggtgactgctctgtctttctgggttcatttggggatagtagggacgccttgaacaagggccccctgaacatcgctttgggtggggacagtcattgttccttttcaggctgtgtttctgctgcagcacacacacggggcagcttgcacgcccaatttcctgtccctcctttccttctcaggctgatgcccagaccagtcctttctgaccatcatcaaatacctcttcatcctgattgagtggtggtgctgagcattgtccccaaagagccacttgtgctgtggccttctcctggaggcatattctgtcctcttctctctgcctgcggcccccatctcctgagcccagcgagctcagtgctagttcactgtttgctcctccttgctgcagacacagaagatttgggagcgttcctgccgaggttggtaaggatacctggaacagtgggcggcctctttgctccccacttgctaggagtaaagccgtttaaaaagacacctgagcctctccgggttcctgctcctcactcaaccccacagtagatctggtggggaggttgagggctcagtgaatctgcaggtgcagcatcgtgtcctcagtgtcctgccccctgcttccacccggtgtcgacagctgcacggtccaccccacgcctgcctttccatcgttcctcatcagccctgtgatctttcctgtggccctgctgtgctggtgccctgtgaggtcctgtggacacaagagactgcacgggccacacccccagctgggtgagtcctctccctcctgggtactctggacagtaaagaaagatggacacgtgggctccgtggagcatgaggtagtccaggacctcggcggccacaggtcctgcctccctgcttctcgtgccctccctccctttgggtctctgctccacctcggtaaacgcttcgttcccacccctcgaagggtaaatcgagctccttggtggtaaagcacccactgcccctagtcagagggtccctcctctctgatgtcatggtgccctggtctgcctggtagaattttagctgctttataacctggtcctgaaatgaaccactgggaagaaatagggtaaaatgaacacacagctgccacactgcatcccaaccctgtgtgaccctatcaccgcagacttttgtggcaagatgacagcatctcagtttgcttgagaagcttatttttgccaaggctgttaccaccaggcaggcaccagagctcggttccactcacagcagaacacaagcagtggccctgtggattcccctgtaagaatgtccggagggaatgcttccccctcgccaggatcagactcttggcactctctgtgatacgtgagaccttgaggaaggttcctccgttcccagaagcggagcaatgtgctggtgctgagaagtggcccctcagggccaccctgggcagggtctccggttttattcccccgtaccttctgcttcatcacgcagatcctatcctgggtttgggtggggaagtctctctgcgggggccggtggggcagcatctccaggctgggaggcagagctggttctgccacgatgtgtcctccccgtgaggacccactcccacgcctgtccctgccacagtgggcctcctgatggtcctccttcctccaggtcaccggcacgattgctgtggcccctcctctgtgggtgtgggcttggacgcctctcccctccacctgcacaccccttgcagcacacatgaggcttagctattaaagaggctggaggacagtgcagcgctttaaccctggccctcacagggaggtgtctaggtctttcttctcccctccagatggaagcatttgggtagaggacctagaagaggctaacactccctgaactatgaacctagattggtttctaaatctgctgagagaaaaattgaacttgaagtgacattccttctaaagtagacatcatcctacatggctcttctacagctgtctttcaccctaacccatggtgtgccctgggctgtcgcaggcccccagcccctgcccagcctttctgaagtgccaggcttggggctcaatgaatgagccttgttctaaagcagaaaacagttctgttccagtcagggttcagctgcctgcgtcttgatgagatctctgttcaggattgtgtcccctgcttctctctcccttctccttttcaagatcacaggtgaagacaagggggtggaaagttctacctagattgctgctatcttaagaatgtggactttggagccagattgtctgggtttagtccctgcgtctgctgcttactaggtgtgtgactttgggcaaataccttgacctctctgtgcgtccgttttcttggctgtgaaatgatgtatcatctcagagcacccatcccctggggttgtgtggggagtaagtaagccggtctagtatggcgcctggtacatcctcagtcaataatatcaatgttggctgtggtgaggacgtagcagaggatggtagaaagaatctgaggcttggggtccagagccctgggttcaggtcccagctctgccacttgctggtgtagtgatgcggattctgcaccccggaatgtggcagtgtttgcatgcaggctggctgtgaagacccagggcagcaggccggcaggctggttcccctgcacaccggactaactctgtcctctctctccacaggcacacattctggcagttccgccatgagaacccccagacccgggttgggggcccgccccccgaggggctgccgggcttcaacagcggggtgatgttgctgaacctggaggccatgcgccagtccccgctctacagccgcctgctggagccggcgcaggtgcagcagctggccgacaagtaccacttccgcggccacctcggggaccaggacttcttcaccatgatcggcatggagcaccccaagctcttccatgtgctggactgtacctggaaccggcagctgtgcacctggtggagggaccatggctacagtgacgtcttcgaggcctatttcaggtgtgagggccacgtcaagatctaccacgggaactgcaacactcccatcccggaggactaggcgctccccgtgccttgcccccggggcctccagatctgggggaaggacagggttccttgggacagacccaagggcagtgtctgacccgctagagagacaccgcagggaagtcctgtgattaaggtgctgagacctcctgccgggcaggtcactgtgctgaggccacccgccaaggactggcctgtgcactgctggtgcttgggaccttattcctccagggagcaggcgacacaaaggacacgcatgtccagtgggctgggaagcaagcacttgaagagaaggaaggggagaaagggtcccccttgctgtctgcctctgaggaatggaaatcctttagacccggccttttttggaccaatataaatttaatttaaattgacagccttccatttttcgagaaagtacaaacagaactgctttagcacccatcgagccccaaacgggtaaggtaagccaaggttttaatgaccagcccagtatctaagcttccaaacgaatgccagcccatcacatactcaccctgggaggctgctgcacgcgcattctcctgatgctcacgtcacttggtgtaggtttcaggatcgcctctttgaggaaggacttcaggaccaactggggcctgcataagaaaacttatctcattattagagtactcacagcttgtatctcccagctacatcctagaaccccattgtcctttattccaccaaaccagctccaggtgaccagactctactcagaaagcaaattcgtcatcaaagaacagagactggccaccacaaggacatgcaggagaactgtcgggaccaggaagactcattccaaaaagcccaggccgggcacagtcgtcaagcctgtaatcccaacactttgggagaccgaggtgggggtatcgattgagcctcggaggtcgagatcagcctgggaaacacagggaggcccccatcgctacaaaatattttaaaaattagccaggtgtggtggcttgtgcttgttgtcccggctacttgggaggctgaagtgggagggtggcttgagtccaggagttcactgcactgagctgtgatcacaccactgcactccagcctggacgacagagtgagacgtccatctcaaaaaaaaaaaaaaaaccaaaaaggaacccagcaattcccaagtgtgaccatgtgggcttggaagacatgtcactcatgggctagtaagcattctagtttctttgtttaaaaaatccccttatcataccacgttagaccgtagaccttagcagaaattaaagcgtcatttcttttgatggggcctcctgtacgtaggctgcagacgtgaaagccccaggggtccatttgtatcaattttcatcttgttttgttttgatttcatttacgtttttctttttcccatgagtgaggatagctaataaatcatctttgagaacatggtgattcatgttgtttgttctctgatcacagtttcagctgcatgaaggctctgaatcaagtgtgtactcaatgccattggaatccccacctcccctgatgaagatgagtgcttacaggagatcctaaggaccaaggagagggcacatctgagagggtgtcagagagggtagtattggcatgtttggttcaaagcaaggaatcatttcattctaggtattggcaggtccacctgcactggggagcaaaagcatccccatttcttctcatccctcttaccctagactgcccagttacatcctgccctgaagaggtggagcagatatctttcccagccctctgctgtgacagaattggtctgttctctcacctacttgatttcctatttataggtaacaattcttgaatgcctgctgtgcaccagccattgtattgggggatttattacgctattgataatgtttatgaaaacttcatgaaggtcattatgtctaaagtcgactgtaagaaaatgtgagagatgtggacagagtcatatactatatgtttatcacattttttatagtagaagaaaattggaagcaacttaaaatgtgaaaaagaggggccaggcgcggtggctcacacatgtaatcccagcactttcagaggctgaggccggcagatctcttgagcccaggagttcaagaccagcctgggcaacatggcaaggcccagtgtctacaactatacaaaaattagctgggcatggtggtgcacgcccagctattcaggaggctgagctgggaggatcactcaaacccaggaggcagaggctgcagtgagctgagatcacgacactacactccagcctgggggaccgggcaagactctgtctgtctttaaaaaaaaaaaaaaaaaaaaaaaaaaaagaatggaataggtagatgaataatatgcttcatccatataacagaatacttgaggcattattcgaagaatatgtaatgcctcaggaaatacttagaatgtgctattaaataaagaatgcaaaatgtaagatcatatgtttaatacgatcctatttttaaaattacatatatgtgtatgtatatcagtgtacacacgtgtgtatagatacatacctacacacacacgtatgtataaaaagagcatctattctgctgtatttcaacttctaaaaacataggtgtttcaaacaccacattaaaaaaacaattatttcaacgggaaaaaagtgagttaaaggctaaagaattttagactcacaataataaaggtattttccctgcaatcctttctataattaaaatgtgtctatagctatgtgtgtattttgttgttgcaagaaaaaaacaataagctggttggtcaaaatgggcaaaggccaaacaacatccctcatttacttttaagtaaacctctcaggagcttcccctctgtcaccagtggcctcgaccttccaaccccccagtgcacagcagactgtcactgcacaggcaccccagcccacccacagatcacaccccagcccgctgacagatcacaccccagcccgctgacaggtcccaccgcagcccaccaacagatcccaccccggcccgcggacagatcacaccccagcccgacagatcacactgcagcccaccaacagatcacaccctggcccatagacagatcacaccccagcctgctgacagatcaccacataggcaccccagcccgccgacggatcaccacacaggcagccagcccaccgacagatcactccacagcctgccgacagatcacaccccggcccaccgacagatgacttcacaggcaccccagcccgcccacagatcaccgcacaggcaccccagcccgcccacagatcacaccccagccccccgacagatcaccgcacaggcaccccagcctgcccacagatcacaccccagcccgccgacagatcacaccccagcctgcggacagatcactgcacaggcaccccagcccgcccacagatcacaccccggcccgccgacagatcactgcacaggcaccccagcccgcccacagatcacaccccagcccactgacagatcacaccccagcccgtcaacagatcacacccagcccaccaacagatcactgcacaggcaccccagcccgctgacagatcacaccccagaccgctgacaggtcacaccacagaccgccaacagatcacaccccggcccaccaacagatcactgcacaggcaccccaaactgcccacagatcacacctcagcccaccgacagatcactgcacaggcaccccagcccgccgacagatcacacccgagcccgacagatcacaccccagcctgccgacagatcactgcagagtcaccccagcccgcccacagatcacacctcagccccccgacagatcactgcacaggcaccccagcccgctgacagatcacaccccagaccgccgacagatcacaccccagaccgccgacagatcacaccccagaccgccgacagctcacaccccagcccgcaaacagatcaccgcacaggcaccccagcccgctgagagatcacaccccaggccgctgacagatcacagagcgccgacagatcacaccccggcccgccaacagatcacaccccggcccgccaacagatcacaccctggcccgccgacagatcaccgcacaggcaccccagcccgcccacaggtcaccgcacaggcaccccagcccgcccacagatcaccgcacaggcaccccagcccgcccacaggtcacaccccaacccgctgacagatcactgcacaggcacccgagcctgctgacagttcaaaccccatccccccgacagatcactccccagcccgacagatcaccgcacaggcaccccagcccgccgacagatcacaccccagcccgcccacagatcaccgcacaggcaccccagcccgcccacagatcacaccccagcccgctgacagagcagccggggcttgctgtgcctcgccattgccgtgcttgacaagtcgtggagtgccagctcctgacctgggtcctgttacagttgctgtcatgcaagcatagttccttgtgctgtgcttaacttgcttcatggaaacccactctcgagaatacgcctgtacatatgaggaaaacagaaatctgaaaagataacatgtctgggtgctaggattaaggtgctttttgttttcatctatatttctgtattttccacatcgagtattaattacctttattataagataataaatgctgtacatttttaaccacatcccttctccccagttccaggtgagtgtcagcctggccgtcttacagctcccggctgtccatggccgatgtcacccctaagaacacataatctaggctgagtcggctctgggtcttcaacttccctgtggatgccccagttctccaaataaaagcgatctaataatagcagctccagaccctgctttcatttctcatatactgtcatcttttgtgtatacacaaagtccaccctacaaatgatgatggcctttggaaagcacgcaggcttgctgaagagatttgctcttctgtgtgtgtcaaaccaaacagactgcggcctctccttcaacagcatttcatcaagtcaaagtatgatgtgttggttcacaggcccaacctagagcacaccaggagtttgtaggttaaggtagtaagtgcagctgtgtcttggcacctgctttgactagaggccaaacctctgctaattttaacacttcctggctgatcttaatatgggaggcccacgggctgggctaaatctggaggttggcagggagcagaaatttccaagcaagcaggtggtatagtggagacagcctcacacccgagacggaggcctggctttgagtccacatcctgccctcactacctggccatcttggacaggcaaggccacctctttccccagttctagacactggtaagagctcctcaaaggagtgtggaaggaggaaaagatgtgtaaggacttggtaagctgtgaaataatacagatgtaagggaattctaaccattattacttagaatattctttttaaattataaattacagccgttttggagctcatgaaatgtgttggtagcatctccgtaaccccatggatgaacagatgcatgcttgtaagctgtccaatttttgttggctgtgccactccacaaaaaccagtaggtcaggggctacctcagctcacagtgaacctgtcagtcaggtgtccacagataacttgctgggcgtgtccaggaggtggaggcagtgctgcctcagctcaaagctaacctgtcacgagtccttggataaacctttttcctctctgggcctgtttcttcatctgcaaaaacaaggagctgagggattgaaccagatctctgggcagtatccctgcccccagctgtctggggaaacacatgtttcaaatgcagccactggggttcacatgtgggtaaagaagagtccagatcaaatgcgaaactgccagacctcaactcgtcattcacccacttaggattcatgacatgaacatgcagagtaaaactgtctcaaaatatgcggttacacacttccctcctcccgcattctccacaggcacagtgaggggtgcagaccaactctggaggcgcacttacaatccaaagagaatcagctgtcccccaggagccctcacctctctgcttatgatccattgacagctatacctgctaacatcttgtcccgttcagctatgtgaccaccttccaaagggtcccccccagcagaaagtcccatgccccactggtctcaccttgggaagtgccgagtcttcaccagggagagaaggtagagctaccctgcggggcgtgttgagcggaccagccagccactccccaaggagcttgcaaagaacaaaacaccttctagagtgaagggaaggccggtttaattgaggctggctcagctcagagcatctccactggcacccccattctgagggggaagaggtgtcccaccacgcagacacactcagcagccttgctgaaggccactcatctgcggagcctcagagcgggagggcctcttcacatctccaaagccggctgccctcctgtctccagcctcccttcctgaaccgtagggcttggctccagcctgcaccccagccccctgccccctgctgctcaggcctgtgcaggagcgcgggagcatggagcccgcggaccttcccagctgccttatggagcaagacaacgttccccctcacttcaggacccacgctcgccactgttttctgtaggggcctctcgctccatttttcattcccttttattcccacagtcctctcccatcccccgagcagccaaccattctgatgggctcactgtgcactgacggatacctatggagcctgggaccacacgctcaccccagtaaccctgcgtgagcatccctgcccttgttccttacagacccgatgagaatttgtgttgcatatccaggaacaaaaccgccagatcataagctatgcagatacttcatttttgactaagtggtgcaagctactcccccgagacctggcccccacccctatggtcaccggcacgagcccccactttctctccaccacagtgctcgtgttcacgtgtctctgtgcattgacacgttgtgatccaagatatactggagtcctccagcgcgtgtggcccgcgtcagagctgcctccgcatgagtggcatatgccgctgtggaaggaggctggacggggaggcaggggccctggcttctggcctgtcctcactgcctgactgtggccagcgggtgcaccactgtgagtgggggagaatgtaaccagctcctgatctgcccgccctcccaggactgctgtgagtagcaggtgagataactcatagcaaagaactttcaagaccctagacatacctcactccctcacaccccagcccaacccagtgccgcatggagacgccagggcagacacaggccatggctgagcttcctcggagctctgtggtgtgctgaagtcctgccaggggagtgccatggccatccgaccccacactcgagccgtctcatggatggagcctggcgttcgtccattaagcctcggccgatcccacagagagccccagagccagggtggccttgcacagaagccgtggggtgaagcccaggagtgcgaccttcaacccccacttatcccgtcactgggcacctccaccttctctcaggaaaagcccctctcccttacctcaggcaaaaccaggaagctcttccgcctacccagcccggtcctggcacttcccaaggcccagaatggcttgacgcaggcacaagcccgagggctgagagtgcccgctgggtgtttgtgaatttccgtgctcgcaaggcacggtgtcagggaagcaggtaatcctcttctttccagcaatagagagtgacacgactggctgtaatcttccaaggccaggtgagcacacgcacggaaaactcaaagtgcctggttatggtcatgggcaggcggcttcagggtaagcttagatccatctcatcctgtccatccttttaggaaatttcatcttctctccaaaccaagaagccacggcagtctctttccttccagcctctttccccagctcagcctcctttcccagggaccccaggatcctcctgccgcacaggccttgaaactccccagctggggctccccccgtctccctggcacccagaccccttgtactacaatcccacaccactgctgcctctccctactgggtttctgctgttcctaggacacagatcgagagatggagattcacgagcaggaggcttcctggaaactgctctgtgggaggggagggaacaggattaggcagggagatgttgagctccgagacagtcatgacaaaggcctcagccagtcccacagagagccccagagccagggtggccttgcacataagccctgggttgatgcccagaagtggggccttcaaccctcacctgtcctggcactgggcatgggcggccccgggtgagggcatagccttgggcaaggcagctctcttcagccagggtcactcctggggactctgctccctgccatcagcgcccaacacttgcgggagaacaaggcctccatcctgaagcaggggctggtggcacagcagcgtccctcccggagcgctgcccctgcaggcccggcggcccacagcaccccctcctgcagctcccaccttggctgccctctagtctactcttggttctttctcctcaaaggctttcagctctgggcatgtcctgcctccgctctctcctcttgcaggttccctggcatccttccctgggcgagagcacaggccaggctgcctgtgcaggtcagccacctctccatggtgacactgcccagactgtcccagcccagcgtgccccagtggtgctagctggtcccaatggcaacaccagggagggccatctgcttttagcagggaacaagaccttattcttctgtcctttccctccacgtgtggatcccgacagggcccagtggcccacaggggatctgtgagcagccctgggcacaccgacaggctgtagggctgtggctcggcaggaggaggcaggacctcagccaccttcgagacaggtgaggagctctccaaaggtgaagagccctgcagacccagaggcagcatctgcccgtgccaggggtgatgccaaagtggtgagcctccatcggggtgaggccactgcttatcatgggcagggtcagtcagaagaactccatgaaaagaatataggctttcaggagggggcacaagttgacatctgtgacactttgttcatttgtacccaggctggagagcagtgacatgatctcagctgaccaagcccctgcatgggctagattctggggtcacagaggtgaagagggcgggtcagtcctcattctgacagaacttcccacgcagtgagtctgtctcactgctgcaggtcggtgcccagagaggggtccccatggatccacactgagggtgagggatgcctcctggattcctgctgcgtgccccaggtgagaaagcacggctgtgtggcctttagttaggagcatacttggcctctctgagcctctctgtggcacatgctagggtcccaactctacacagggagctaccagggaactaccagggaggctatgacctgagccctagagaggaaatacgtgctgtgttccatccaggctctgggtggactctgcccctaggattattatccttgccctgccacagacttgctgtgtgacccagacaagttagtcccatctctagccctcacttgcctcctttgtagcagaaaggggttgtgccagaatctatacttcaaggcctaggtggagacaaagttttaaaagcaaagcgagcatcctcacgttctagggagtcgtcccgcatggaaaaggggaggggtcccggcacggcgcgtgcaaaaggggaggggtcccggcacagtttgggtgagacaggacagggccttctcaggctggggctcctggcggtcatcacaggcttttagacctgccaggggactgaagcctttggttggaatctcttggtaccaaaagacaagaaagtgggaattataccaagtgcagcgagcgcctccggactcaggtctgcgtgaacaagccgtcgtgggaagagctaactttgagtctgtcttctcagcccgtgacccgtggggatgaaggaacgaatgggccaggctctgcgcttgtgcccagaccctcctgtggctctgctggggcacctgccctgctcctcaccgctttcttccttccacctctgctcctctgtgagaactgagctcaagggagaggaagcctccctgccccctcagctggagctgggtgtccctcctgtcacctgtgacaccctgagcctccctctgcaagttggtggagaatatttcttgtccagggcttgtaagaaagagcgttatcctgagcaacgagctgcatgtcctgaggtgggtgaaggaggcgggggcggagggcggacgctggggcctctgtctaggagcagcctgtgttttctggcatggcctgcggaaggaagcagaagtccagggcccttttgacaggaggccgcgcggccggatgatggggagaggagagaggtgcttagggcctgtttcacagaaagagagtttgagagatggtgacgcttgtggccggggttatgaataggatcctcactctttttcaaggcacacagatacagacggaccttcttaatttcactttgccgggctccatgttgttggatgccacaagaggctgatgcgggtccccggggcctggcgtgtcagcgggttgcacctctagctggacaggcaccaccgtgctcccaccgcctcttgcatcccactgtgcctctggtttccgcacccctgggaggcaggagctctggcatcttcgtgctccctgcacctgactccactgactccactgccaggcacagggtgggccctcattaactctctgctacttgcctggggataactgaaaaccatccccttcctcagtacaggagagaaatggaagcggcggattcaggaaacaggagggcagagtgagtggagacaggcccagggctgcccagcccccagaatcccagagggggccacaggagggagggatgggagagtgccaggcacttgggaggacttggcgtcagggcagactgaggggtggaggctcagaaatgaacactcctggcaggaaaggcccctctgtgcccccactgaattaatatcctgtgctcacatctgtcctcttctctagcttaatagattcctgggacatgacggtctctgcggcaattgtttcaccataaaattccctttatctggccgggtgcggtggctcatgcctgtaatcccagcactttgggaggccgaggca

SEQ ID NO: 113 - DNA, 2177 bp, Homo sapiens
tggccgccgcctggcgccggggctaagtggccgccggcgtccgggtacccgagggctctcccgcgttgctggcaccgctggcgccgcggtctcgtagcgcatgggcctcctccgaggcgggctcccatgcgctcgggccatggcgcgcctgggcgctgtgcgctcccactactgcgccctgctgctggccgcggcgctggccgtctgcgccttctactacctcggctcaggccgggagaccttctccagcgccaccaagaggctgaaggaggcccgcgccggggctcccgccgcgccctcgccgcccgcgctggagctagcgcggggctccgtggcgccagcccccggcgcgaaggccaagagcttggagggcggcggtgccgggccggtggactaccacctgctgatgatgttcaccaaggcggagcacaatgccgcgctgcaggccaaggcccgcgtcgcgctgcgctcactgctgcgcctcgccaagttcgaggcgcacgaggtgcttaaccttcacttcgtgagcgaggaggccagccgcgaggtggccaagggcctgctgcgggagctcctgccgcccgccgctggcttcaagtgcaaggtcatcttccacgatgttgctgtgctgacggataagctcttccccatcgtggaggccatgcagaagcacttcagtgctggcttgggaacctactacagtgactccatcttcttcctctcggtcgccatgcatcagatcatgcccaaagagatcctgcagatcattcagctggacctagacctgaagtttaagaccaacatccgggagttgtttgaggaatttgacagtttcctgccaggcgccatcatcggcatagcccgggagatgcagccagtttacaggcacacattctggcagttccgccatgagaacccccagacccgggttgggggcccgccccccgaggggctgccgggcttcaacagcggggtgatgttgctgaacctggaggccatgcgccagtccccgctctacagccgcctgctggagccggcgcaggtgcagcagctggccgacaagtaccacttccgcggccacctcggggaccaggacttcttcaccatgatcggcatggagcaccccaagctcttccatgtgctggactgtacctggaaccggcagctgtgcacctggtggagggaccatggctacagtgacgtcttcgaggcctatttcaggtgtgagggccacgtcaagatctaccacgggaactgcaacactcccatcccggaggactaggcgctccccgtgccttgcccccggggcctccagatctgggggaaggacagggttccttgggacagacccaagggcagtgtctgacccgctagagagacaccgcagggaagtcctgtgattaaggtgctgagacctcctgccgggcaggtcactgtgctgaggccacccgccaaggactggcctgtgcactgctggtgcttgggaccttattcctccagggagcaggcgacacaaaggacacgcatgtccagtgggctgggaagcaagcacttgaagagaaggaaggggagaaagggtcccccttgctgtctgcctctgaggaatggaaatcctttagacccggccttttttggaccaatataaatttaatttaaattgacagccttccatttttcgagaaagtacaaacagaactgctttagcacccatcgagccccaaacgggtaaggtaagccaaggttttaatgaccagcccagtatctaagcttccaaacgaatgccagcccatcacatactcaccctgggaggctgctgcacgcgcattctcctgatgctcacgtcacttggtgtaggtttcaggatcgcctctttgaggaaggacttcaggaccaactggggcctgcataagaaaacttatctcattattagagtactcacagcttgtatctcccagctacatcctagaaccccattgtcctttattccaccaaaccagctccaggtgaccagactctactcagaaagcaaattcgtcatcaaagaacagagactggccaccacaaggacatgcaggagaactgtcgggaccaggaagactcattccaaaaaaccgaggtgggggtatcgattgagcctcggaggtcgagatcagcctgggaaacacagggaggccccc

SEQ ID NO: 114 - protein, 385 aa, Homo sapiens
MGLLRGGLPCARAMARLGAVRSHYCALLLAAAVCAFYYLGSGRETFSSATKRLKEARAGAPAAPSPPALELRSVAPAPGAKAKSLEGGGAGPVDYHLLMMFTKAEHNAALQAKARVRSLLRLAKFEAHEVLNLHFVSEEASREVAKGLLRELLPPAAGFKCKVIFHDVAVLTDKLFPIVEAMQKHFSAGLGTYYSDSIFFLSVAMHQIMPKEILQIIQLDLDLKFKTNIRELFEEFDSFLPGAIIGIAREMQPVYRHTFWQFRHENPQTRVGGPPPEGLPGFNSGVMLLNLEAMRQSPKRLLEPAQVQQLADKYHFRGHLGDQDFFTMIGMEHPKLFHVLDCTWNRQLCTWWRDHGYSDVFEAYFRCEGHVKIYHGNCNTPIPED

SEQ ID NO: 115 - DNA, 2720 bp, Homo sapiens
tggccgccgcctggcgccggggctaagtggccgccggcgtccgggtacccgagggctctcccgcgttgctggcaccgctggcgccgcggtctcgtagcgcatgggcctcctccgaggcgggctcccatgcgctcgggccatggcgcgcctgggcgctgtgcgctcccactactgcgccctgctgctggccgcggcgctggccgtctgcgccttctactacctcggctcaggccgggagaccttctccagcgccaccaagaggctgaaggaggcccgcgccggggctcccgccgcgccctcgccgcccgcgctggagctagcgcggggctccgtggcgccagcccccggcgcgaaggccaagagcttggagggcggcggtgccgggccggtggactaccacctgctgatgatgttcaccaaggcggagcacaatgccgcgctgcaggccaaggcccgcgtcgcgctgcgctcactgctgcgcctcgccaagttcgaggcgcacgaggtgcttaaccttcacttcgtgagcgaggaggccagccgcgaggtggccaagggcctgctgcgggagctcctgccgcccgccgctggcttcaagtgcaaggtcatcttccacgatgttgctgtgctgacggataagctcttccccatcgtggaggccatgcagaagcacttcagtgctggcttgggaacctactacagtgactccatcttcttcctctcggtcgccatgcatcagatcatgcccaaagagatcctgcagatcattcagctggacctagacctgaagtttaagaccaacatccgggagttgtttgaggaatttgacagtttcctgccaggcgccatcatcggcatagcccgggagatgcagccagtttacaggcacacattctggcagttccgccatgagaacccccagacccgggttgggggcccgccccccgaggggctgccgggcttcaacagcggggtgatgttgctgaacctggaggccatgcgccagtccccgctctacagccgcctgctggagccggcgcaggtgcagcagctggccgacaagtaccacttccgcggccacctcggggaccaggacttcttcaccatgatcggcatggagcaccccaagctcttccatgtgctggactgtacctggaaccggcagctgtgcacctggtggagggaccatggctacagtgacgtcttcgaggcctatttcaggtgtgagggccacgtcaagatctaccacgggaactgcaacactcccatcccggaggactaggcgctccccgtgccttgcccccggggcctccagatctgggggaaggacagggttccttgggacagacccaagggcagtgtctgacccgctagagagacaccgcagggaagtcctgtgattaaggtgctgagacctcctgccgggcaggtcactgtgctgaggccacccgccaaggactggcctgtgcactgctggtgcttgggaccttattcctccagggagcaggcgacacaaaggacacgcatgtccagtgggctgggaagcaagcacttgaagagaaggaaggggagaaagggtcccccttgctgtctgcctctgaggaatggaaatcctttagacccggccttttttggaccaatataaatttaatttaaattgacagccttccatttttcgagaaagtacaaacagaactgctttagcacccatcgagccccaaacgggtaaggtaagccaaggttttaatgaccagcccagtatctaagcttccaaacgaatgccagcccatcacatactcaccctgggaggctgctgcacgcgcattctcctgatgctcacgtcacttggtgtaggtttcaggatcgcctctttgaggaaggacttcaggaccaactggggcctgcataagaaaacttatctcattattagagtactcacagcttgtatctcccagctacatcctagaaccccattgtcctttattccaccaaaccagctccaggtgaccagactctactcagaaagcaaattcgtcatcaaagaacagagactggccaccacaaggacatgcaggagaactgtcgggaccaggaagactcattccaaaaagcccaggccgggcacagtcgtcaagcctgtaatcccaacactttgggagaccgaggtgggggtatcgattgagcctcggaggtcgagatcagcctgggaaacacagggaggcccccatcgctacaaaatattttaaaaattagccaggtgtggtggcttgtgcttgttgtcccggctacttgggaggctgaagtgggagggtggcttgagtccaggagttcactgcactgagctgtgatcacaccactgcactccagcctggacgacagagtgagacgtccatctcaaaaaaaaaaaaaaaaccaaaaaggaacccagcaattcccaagtgtgaccatgtgggcttggaagacatgtcactcatgggctagtaagcattctagtttctttgtttaaaaaatccccttatcataccacgttagaccgtagaccttagcagaaattaaagcgtcatttcttttgatggggcctcctgtacgtaggctgcagacgtgaaagccccaggggtccatttgtatcaattttcatcttgttttgttttgatttcatttacgtttttctttttcccatgagtgaggatagctaataaatcatctttgagaacatggtg

SEQ ID NO: 116 - protein, 385 aa, Homo sapiens; identical to SEQ ID NO: 114

SEQ ID NO: 117 - DNA, 1468 bp, Homo sapiens
atgtggccacctcgctgcaaggatccaggaaggcagagtgcggagatcctgcagatcattcagctggacctagacctgaagtttaagaccaacatccgggagttgtttgaggaatttgacagtttcctgccaggcgccatcatcggcatagcccgggagatgcagccagtttacaggcacacattctggcagttccgccatgagaacccccagacccgggttgggggcccgccccccgaggggctgccgggcttcaacagcggggtgatgttgctgaacctggaggccatgcgccagtccccgctctacagccgcctgctggagccggcgcaggtgcagcagctggccgacaagtaccacttccgcggccacctcggggaccaggacttcttcaccatgatcggcatggagcaccccaagctcttccatgtgctggactgtacctggaaccggcagctgtgcacctggtggagggaccatggctacagtgacgtcttcgaggcctatttcaggtgtgagggccacgtcaagatctaccacgggaactgcaacactcccatcccggaggactaggcgctccccgtgccttgcccccggggcctccagatctgggggaaggacagggttccttgggacagacccaagggcagtgtctgacccgctagagagacaccgcagggaagtcctgtgattaaggtgctgagacctcctgccgggcaggtcactgtgctgaggccacccgccaaggactggcctgtgcactgctggtgcttgggaccttattcctccagggagcaggcgacacaaaggacacgcatgtccagtgggctgggaagcaagcacttgaagagaaggaaggggagaaagggtcccccttgctgtctgcctctgaggaatggaaatcctttagacccggccttttttggaccaatataaatttaatttaaattgacagccttccatttttcgagaaagtacaaacagaactgctttagcacccatcgagccccaaacgggtaaggtaagccaaggttttaatgaccagcccagtatctaagcttccaaacgaatgccagcccatcacatactcaccctgggaggctgctgcacgcgcattctcctgatgctcacgtcacttggtgtaggtttcaggatcgcctctttgaggaaggacttcaggaccaactggggcctgcataagaaaacttatctcattattagagtactcacagcttgtatctcccagctacatcctagaaccccattgtcctttattccaccaaaccagctccaggtgaccagactctactcagaaagcaaattcgtcatcaaagaacagagactggccaccacaaggacatgcaggagaactgtcgggaccaggaagactcattccaaaaaaccgaggtgggggtatcgattgagcctcggaggtcgagatcagcctgggaaacacagggaggccccc

SEQ ID NO: 118 - protein, 188 aa, Homo sapiens
MWPPRCKDPGRQSAEILQIIQLDLDLKFKTNIRELFEEFDSFLPGAIIGIAREMQPVYRHTFWQFRHENPQTRVGGPPPEGLPGFNSGVMLLNLEAMRQSPKRLLEPAQVQQLADKYHFRGHLGDQDFFTMIGMEHPKLFHVLDCTWNRQLCTWWRDHGYSDVFEAYFRCEGHVKIYHGNCNTPIPED

SEQ ID NO: 119 - DNA, 19968 bp, Mus musculus
  misc_feature (1)...(19968): n = A, C, G or T/U
gttgggatcacaggtgcgtgctgccattgccgacttccttttccctttatttattttcttaatttttaagaagtacggtgcccagaaaagatgattagttaaggactgactgagtagatgaaaacagacgactggatggatgacccttctaaatggcggactcgtccccctttccaattaaacaaatttgtgttgcccttcactgaattctgccccaagctggcccttggatagaagcctgtagaagagttcctggaacagcagaccacaagccaggactcctagttcccatgtgccatcaaagcaggagccacaagagcatgcttagcgacgacctaacagagcttggcaggctgcacctgtagagtgacagccctgctggtgaggggccatgtgctacctgcatcctcgtccaaccccacccccaccccaccccccgcggtggcagttccttctaagacgcgggctgagtgctgagtcgctgagaggcgagctctccatgtgacttcagtttccgttggttccttccgcaagtgctaaaataatctgatgccccagagcgagtaggcagcgcagcagcggcaagtgctgtccaggaggctggggccctggagacgatgcgccccgcggagccgcctgggcctgcgggagcagtgagtatttcttgcgtgggttcgttgagcattgccgggctacaagaggtgggcgagctgggaccgggttgggtggtggggaggttaggcatcagctcccccccaacccacgcacgccgcgctcaggctcattgtgaagttgtggtatccagtctccccgcctctgggctggatttggggggggggctacacctttggtgtaggtggaagtctcaggaactcttacagctgagagaggaggtgtgtgatgtgggagaggcacgtagggctttacaaccagctatggtttgattcctggctctttcagggagagtgtgaacaggttagggaacttttcggagcctccttttttttcctcatctacacagtggtcagtgctccttgcctagtctgagtgaccggacgtcatgagaggacgctgtgaacactcagcatacgggtgtttgcatcgactcctttgcccatcaacataaattgagacccaccattacacaggcaaagacacggaaatccatccacagtcgcacttacttaaccgggatcttcccagggtcagctgtgtgtgtacatccagaagacagcaaaagcccttctcctagagcctttgtcctgggtaacttgtgctggggtattatttggtccacagctacccaagtgtcagagagagagattagagccaggctctcctgactcctgctcagtgctctgctgtggtcctctcggcctctgcaggcacagacacacatccatggacctacccacaggctcgctcgcactcaggagctgggcagggaaaagcactgctctccctgcagttgctagctcaccattgcgctgcggcgatgaccacgtgccccactgtaactaggatcggagcagactaaggaaggctttccagtgtctctctctgctactgaccgtgaggtacggacagttttcacggtgtttgaggcctggggacaccccctatgagctttatatgtgagccccagagttcctagagggggttatagactcatgggcccagaaaaacaaaaaacaaaacaaaacaaaaaacctcaacacttaggttaaaatcaaaaccaaacagcctcacaagagaaggtgccttcatttgactggtccttcgagagaactctggacaatggtacacactccaccaggctgtcctggagctcattagcttctaagccaatctccactggcctgacttgtgaagcaggaggcaaaccctttctccttagtgatagaactgtccgtggatagattcttggggaactagcttctgtactgtgtctaatataagccagtgacacagaagattgtaacagggccagcctccttcgtagtccctattgactggagtcaggattgggatcggaccaaaatacctaacaaaacccaaagaaacaaaacctggacttcttaaggaggcatggtctggtcgaacagtaaaatgtagtcaacaatgctgaactgcaggtctgaaaatggctaaatgatagagtttatgtgataaaacagatgaagggagggagggagggagggagagtgtgtgtttcccccccaaaaaagcaaccaagcagttgttatcagaagcgggggaaatgaagttgctagacagacttttcaggacaaacagaatcaggggctgagacccaacgttttgtgtcttcagtgtgtgactttagcctcagcagagggcacaaaggaggaagtagaactttgccctggttctcaccagtgaggtgggtacaaagaacaaggctgggaccagtgatgcgctcagcgtggccacaaagttctgtgaggtccccagggactcccctcctcaagccccagcctccacatttaccaccctcaggcactgtatgtgggctcaccttgagtgctgctgcctggccctacctctaagaaagataacaatctggaggggatttctctgcaggagatagcatttgaggctctgactttctttcacacagcttctgctcagtgaaccctgtctatctctggtagccctggtatctcctggctttccttgtctcccttggatgctaagactgagcactgaccctcagccatcagctctctccctgcccggcctggggccacatctttcaacttcaggcaagttaatggtccttgtaaccacccaccaagacacttgaaacttccccaaggggactgttctcagcctcagcctcctcaacgttggtctgacaggttttcaaaattttgtgtttacttaactaaggtgattgaccagaggtcagaagatgtcattagatcccctgggactggagttaacaatggatgtgagctaccatgtggttgctgggaattgaactcaagtcctctggaagagtagccagtgctcttaactgctgagccgtctctccagcccctacttacaggaatgtttaaagagttccgttgttttatatgcactctgaagtattttagaagagctgtactggtggccatggtatttgtttatttgtttgctgttgatgactgaatgcaggaccttgggcacgctaggtcaggctcttccactgatcagccaggtcagggttctcttctgcctcccacccttttaaagttttgttttgagaacaggtcatgaaattgcacaggctggcctcaaactcaccatcttcctgtctcagcctcctcaatgctgggattacagatgttttacaatgcctagcgatttggcttttttttccctaaatatttaatctacctgtatttgaatgtgtgtgtgtgtgtgtgtgtgtgtgtgtgtgtgtgtgtgtgtgtgtgtgcgagcgcacacacacaatnnnnnnnnnnnnnnnnnnnnnnnnnnnnnnnnnnnnnnnnnnnnnnnnnnnnnnnnnnnnnnnnnnnnnnnnnnnnnnnnnnnnnnnnnnnnnnnnnnnnnnnnnnnnnnnnnnnnnnnnnnnnnnnnnnnnnnnnnnnnnnnnnnnnnnnnnnnnnnnnnnnnnnnnnnnnnnnnnnnnnnnnnnnnnnnnnnnnnnnnnnnnnnnnnnnnnnnnnnnnnnnnnnnnnnnnnnnnnntgtatttacatgcagtcatgaggccccatgtgggtgctgggaactgaacccaagtcctctgcaagaagcagcacaccctcttaaccagtgaggcacctctctgaccctgtctatttgtgctggggtatgtgtttgtttgtttaagatttatttgtattgctctttattcatttgtgtgtctgtgtgtgagcctacattgtacatgcaggagcctttggagactggaagcattgaatcctctggaactggcaatgttgttgtgagccaccagaggtaggtgctccttgacgtctatttttatataataataataataacaacaataacaaatgagttgagtggtggtagcgcacactttcaatcccagcacttgggaggcagaaggaggggaatatctatgagtttgaggccagactggtctacagagtgagttccttgacagttagggctattacagagaaacccttgaaaaaccaaaaatgaatcagtgaataaataaataaataaataaataatacaatgaattgaaggataagtaaaatatgataaaaataagtatagtaaaatgttataagcagaaggtaggtaggtggtggatatacagtggtgcctgatgacagactttttcgattttgttctatgctaaagtcttgtcttgtcttttcttttctttccttttcttttttcttttggtttttccagacagggtttctctgtgtagccctggctgttctggaactcactctgtagaccaggctggcctcgaactcagaaatcctcctgcctctgcctcccaagtgctgggattaaaggcgtgcgccacccacgcccggctttcttttcttttctttaaagatttaattattttatgtatatgagtacactgtagctgtcttcagacaccccagaagaggcatcagatcctattacagatggctgtgagccaccatgtggttgctgggatttgaactcaggacctctggaagagcagtcagtgctcttaaccaactcagccatttctctagccccaagttttttctttatatgaaatgctggaggaaagttaagttgctaataattaataactactcaaattgcttctcatcaacataaaattaaaataataaaaaaccctgcaatgtgttatcataggttatccttcagctgaactgttaggctataaaaaggagggaactcctcgaaggataaataggaatttggtaaaagaagaccccagaaagggtctttcctgctgaggaaccagcttgtgaaatgtgtgattcagctggggaccacatgcgttccagggtggcttgggctttggggtgttgaggtggagttgatgcggaactcagagactagagtttgaacggaaactctccattctccgagcactcagccacacttctgtatgcctccagtcacaggcactcagccacagttttgtatgcctccggtcccacagggacgccagcatttctactaaactgtgcacttgttaggagtccctgttaggtggtgatcctttgtgccttctaaaagaaactgagttggagagtcggtattttcattctgactccaggctaaaattagcctcaagtaatctctgtggtctttgcgtatggtgccctacagactctgggtagtcacctcccccagggaagtccaagattcatgggcattgccaggaatggaaggagaaggcatggctccttcatcttagtttttccttcatagtgactcattagcacagaagacctccacttcccattggttcactggtacctggcttcaccaaggcatgagtctgccccctgagtggggctgctgaaggctctgccgggtggtcctgtttcctcttgaagaagcccttactcttacagaagtgactagtgggaatgaacctgtgaaaagaacagagaaactaatgcaacgcagggtgggcctccgaagagatcatgcatttttctcatatacaaaggggacactcattgccagccacagcgagacacacaagagccagctgttacctgttggagggaacacacttgcatttttgacaatctgtggctagacgcattctgtggccatggaagggacagagtgagctgacctctcttggtttggatgggctagccctgaccacacaaggagccaattcactcatctgtggccctgtggaaacggaggcgtttgagcagatagtaagtgcttgaagcagtctctataggaaaagcgctgtttggggtggtggggagggggctgttgtagcccttacgcctccattcaagcagaagtgagggtagagcctggccagacctgacatatttgctcgggagacatcttgagctttgtatgtgacaagtgctttggtgccatttcacagaattccccaggctggctggctgccctccccactccatcgttttgttaggatttccagctcaaaaacagtacctgagcagacccttggaaaattgtgctggccagattttgctcaacctgacccaagctagagtcatgtggtagaggaaacctcagttgagaagatgcctccaccagatggcctgtaagcaagtttgggggacattnnnnnnnnnnnnnnnnnnnnaaaacaacaagttgagttaggcagtggtggcatacaactttaatcccagcacttgggaggtagaggcaaatggatctctgtgagttcgagaccagcctggtctacagagttagctccagaacagccagccaaagaagaacagagaaattctggaaattctgtctctaaaaattgagagagagagagagagagagagagagagagagagagagagagagagagagagagagagagagagagaacgagaacacaagttgaacaagccatgggaagcaggccaggaagcagcactcccctgtggtctctgctccagtctttgtgtcctctccactttcctaccttgaaataagcccttcctgcccagtcaatcttggctatgttgttgatgcagaaatgtctagattcttagaaacctagccaggtcagaaatgctactttttctcaaaagggtggccaacaccaaactttgaataaaaatttatttgccagagggatcatgtgcaaccaatcttcccttcttcatgcagaagaaatgcagtatgttcaaggggttacggtattctagtaatttcaaatgcttccactccttactgctcggccagcctgtgtctctgagaccaacagagcagggccctggtaggacaatcatctgcttttgaggaagctctcctgctctacacatgtttgagcacaagttgcttaacagtgtgtgagaggccatcatgatgctactttctgaacattcttttaaaacttaatcatgggctggagagatggctcagtggttaagagcattgactgctcttccagaggtcccgagttcaattcccagcaaccatatggtggctcacaaccatctgtaataggatccaatgccttcttctggctacagtgtattcataaaaaataaagataaataagtcttaaaaaaaataataataaaaaaaccctttaatttagtagtacctgcaccactgctggtctcattttattggcgaagacacttattagaattaagaattgggccgggccgggcgtggtgtcgcacacctttaatcccagcccttgggaggcagaggcaggcggatttctgagtttgaggccagcctggtctacacagtgagttccaggacagccagggttacacagagacaccctgtctcgaaacaaaacaaaacacaaacaagaattggaattaattattgtattatgaagagtgcattgtgaaagttgtctttcagaagtttttttttttttaagatttatttatttattatatgtaaatacactgtagctgtccagaagagggagtcagatcttgttacagatggttgtgagccaccatgtggttgctgggatttgaactctggaccttcagaagagcagtcgggtgctcttacccactgagccatctcaccagccccctttcagacgttttttatctcacattctttctttgttttttttttaaagatgtattattattatacgtaagtacattgtagctgtcttcagacacaccagaagagggcgtcagatctcattacgggtgattgtgagccaccatgtggttgctagcatttgaactcaggacctttggaggaacagtcagtgctcttaccccctgagccatcttgccagccttcattcttttttttttttttaattattttatttatatgaatacactgttagctgtcttcagatactccagaagaggacattgaatcccattacagatggttgtgagccaccatgtggttgctaggaattgaactcaggacctttggaagagcagtcagtgctcttaaccactccaggcccctttattattatttattattattttttaaattttgaaaaatgtcaagttataggaaggttaaatgaaaataaaatattttttttaatcatgatgttaaattgagtaatcagttgaccaatttagggagcattttgcctttccctgaccaagccatgaatgaaggattttatgtgtgtgtagagatatgtatgtgtatgtatatatgtatgtacataattgatagtaatactacttttgtttgttttttgagggggagggtccttagtctatacccagggtctaaaactcatggcagtcctcctgtctcagccttgtgggataatagatgtgaatcactacactggacaagattttgacctttgaagactccaagtcagttgttttgtagtgcagtacagccctggctaggatccatttgggtttcatcatgactgggttcagggtatgccctcacacttggggactgtgaggacagagaattgcgctgcttccaaagttcagagcacctggacaactctagatctgaacttttgctgaaagctggagtcctactaatcttgtactgagaatccaagggagcaaacctgcctgcccggaactttctgtgctgcctgggaccatgtgaagtagtcactgtggagatgctaacgctctttatgctgtgggctgagatcagctgcccttgcttccaagatcctaggtggcagcttctgtgtgcttttacacaaaggcagacttgctttctctcagagctctccctctctctgctacatagtcacaccctctgtgtgttcagagtgtcaccttcgcaagtgatgctgcaacctgcttctgatgacccctgtccccaattcataacttcttatctctaatacaaaatgactctgacagctacctgccttctccacaaagccccattctttatgactttaaaaagcttctccatttgaggagaaagctcttaattatgtggtaatgtatgtatgacacttgctaacagctcctttagcaacaaggttgcagcccctttcctggcagcagctggtatggcaggaacagttggaggggtggagaggtgaggatgccaccctgtcgtcccagtatccggagagggctcctgggacttcctagtggaatatgataactgcactgtttaatcccggtccctgcagtgcagtgtctcttgggagctttctgcagatgtgtagtctagaagagtgttcccagcctgaaaaactgctatttttaaagtcttttactttttctccatcatttcatgccttgcacgcaggacctcccacacctgcttgtctgctgcacgctattactgagctacaccccagcccgggaacaccagcccttttagtctttcattttgaaagcctcagaaagttgatcagactggcctcagagttgtgatcctttggcctctgcctcccaagctggctggattacattcatcaccactggttctacctgtttatcgaatactgcttcaaggccatttcatttacatcgttagatatcagaaagggaagcagaatagtcccagcnnnnnnnnnnnnnnnnnnnnnnnnnnnnnnnnnnnnnnnnnnnnnnnnnnnnnnnnnnnnnnnnnnnnnnnnnnnnnnnnnnnnnnnnnnnnnnnnnnnnnnnnnnnnnnnnnnnnnnnnnnnnnnnnnnnnnnnnnnnnnnnnnnnnnnnnnnnnnnnnnnnnnnnnnnnnnnnnnnnnnnnnnnnnnnnnnnnnnnnnnnnnnnnnnnnnnnnnnnnnnnnnnnnnnnnnnnnnnnnnnnnnnnnnnnnnnnnnnnnnnnnnnnnnnnnnnnnnnnnnnnnnnnnnnnnnnnnnnnnnnnnnnnnnnnnnnnnnnnnnnnnnnnnnnnnnnnnnnnnnnnnnnnnnnnnnnnnnnnnnnnnnnnnnnnnnnnnnnnnnnnnnnnnnnnnnnnnnnnnnnnnnnnnnnnnnnnnnnnnnnnnnnnnnnnnnnnnnnnnnnnnnnnnnnnnnnnnnnnnnnnnnnnnnnnnnnnnnnnnnnnnnnnnnnnnnnnnnnnnnnnnnnnnnnnnnnnnnnnnnnnnnnnnnnnnnnnnnnnnnnnnnnnnnnnnnnnnnnnnnnnnnnnnnnnnnnnnnnnnnnnnnnnnnnnnnnnnnnnnnnnnnnnnnnnnnnnnnnnnnnnnnnnnnnnnnnnnnnnnnnnnnnnnnnnnnnnnnnnnnnnnnnnnnnnnnnnnnnnnnnnnnnnnnnnnnnnnnnnnnnnnnnnnnnnnnnnnnnnnnnnnnnnnnnnnnnnnnnnncttttctggagctggatttataggaggttgtaagccacatgacataagtactggtaatcaaactcaggtcctctgcaaatgcagtgagctcaattaactgctgagccgtctctccagccactttccttgattgttaatatagacctttagatccagccttcctagatagatgttctgaatttaattggtatagccatgcagtcatccctctagatgttcactctgctgtctttttttctgtaccacacagagttgatacataagaacagcagtcacccaagctgctaggtgctgtttggagctcataaataataattaggttattagcggctttcatggttaatgaagcacttttgcatataccatcctcggcggcactcataaaagtccgtgagtggatatcattgctcctgttttgcaggaggactatccaagtcttggagacttcacacccatgatggagagtggagacagaatttaaactctggactgtcaggttccaaactctatcgtctttctatgacattctgttacttaatgccagatgttgcccttacaggcatggtgagatttattcctgtatgtatgttggtgtgtgtgtgtgtgtgtatgtatgtatgtatgtatgtatgtatgtatgtattctgggctagttggctgggtttaagaggaaagaacacatttaaattttgtaaacattttggtgtttcacaaattaaaattacgcttgtgggtgtaattctctagcacaccagtctgaagcattgtgcagccctggaaagctgcactcttggcctgctgtacacatcgagatttagtttgtcagtattcagggtacagcagcacgtagcagcccacgcatgacaggaagtggagaagatttactgtgctgacaattcccgtttccctatctctcctctctgtgagccgcaggacgttcagtgagatgagaacgtgagcgagcaattctttagcgtccttggcattttctaagtttggcaaccttctctcaggatgggcggggatcccaaagtttcaggggcgcttgtatgtgtgtgtgggagggtgccgggaggacagtgaggacaggagtccagatggctctgcatatgccatctgtgccctgtgctgcaaatgtgcagaaatggaaagaaggccctgggcgggattcccagaggctagcaggactgatcccagattgtttctgtggcatcgggagctgacctggccttcagtgatttctgatagtctattttttgctggtggagcattcatatctgtccaggatgttaaatcaccctttgggatgggtacacatgctagaagaaaagcaaagaggtgggaggcaaaggtggcctgtgtgtgtcagtgcaaggtctgtaagtgtcatggaaggtgaggaggttcttgttagcagggagagactgaagagctgccctgtggttcttcctggtgaggatggggcagatggacctggaccaggcacttgatgaagctaaaggaggtcaggaatgccccaaggctgttaggtctcacacttggagggttgtccaagcaattacatctatgggggcggggtaggggggaatccccccagtttcccactatggagctcagagagggagacctggactgctctcagcccttgatactcagaccatttggaatcctggatagaccagtatcatccctggatccttattcccctggaatttgtgaagacggtgctgttacctcttcattggagacttctgttattagatgtatcatttcaagccttcccaggactgttgttcacacacagacaagagagctacagctgcacttcagaatttttttgatccatccaaagattgctttttcattttctcaagttttttttttcttatccaagtgaaaacatgcactttttttggtggtggaggtggggaagggccatatttaaaagagctaaccgatgtgatagacatatttctgaaatccgtcttctttgtctctacctctgcctcctcctcctcctctttttttcaagacaggttttctctgtgtagtcctggatgtctagaaactcactttgtagaccaggctggcctcaaacttagagatctgcctgcctctgcctccagagtgctaggattaaaggtgtgtgccaccactacctggcttgaaagccttctttcagcaagataattaatatatttatgagtccagaagctacagttagtatttctatccgagtttctccttcttttgtctattcattcattcactcattcattcattcattcactcattcattcattcatggtatatatctcaagctcatgtatgcatcaggtagcaatgagtttcagagaggaagactgcagagcggcaaagcacaggacactctgggacctcagccctggcactcaagtcctttgcatccccccgtgctccccctttggggtttcagaggtcagccagctgaccattaaatgccataggcaaaacaaaatgagctcttgccacgctgtcagtgaaaggttggctgagctgagaaatttgaatatctgtggttttccaccttcttgtagttgtgggcctctaagaccagacacatgtgggaactagctggctccttctgccccgtggtgatcagccctcttggctaatctgccttactcagttcttcctggtcttctgtccacagagctgtgcctgagatggagttcccgcccctctggctttgcctgggttttcacttcttgattgtggaatggaggagcggacctgggacagccactgcagcttccccaaggaggctgcaaggtggtgagnnnnnnnnnnnnnnnnnnnnaatagcattggttccgtatttacgaaccgactcggcaatttccttaatctgtacgtattctaccggagcgtggacacgcccaccctcggctccttcaaagactggaaatgcctgttctattttcctttgttcctctcggggaatgaatgagtctgcgcactgcctctctgcgcactgcccctctgcgcattgctgacgcactacgggctgacgcactacgcagggcggggactccgcatagggcgggagtgcacctggtagccgattgccctgaggccaatcagcaaactggccttcgccagccgcttttggctttttccttaaatgactagttagcactttacttggcggctggtatccttttctttcataatgagccgcttttttctcccagtctgtttcttcagagcacaggctccttctcctagagacctccgctaatcgatcttttttcttttcttttttctttttcttccttctaatctctccccaggtattcctacctgaccttaacttttcctcgggttcaagacccttggaaaggcctgtatacttaccgtttctccttgctcctactctctctccccgctttacttctgatagactgtcctgaatttcctctagaattttcagccctatcttaagcactatataacatgtgaaaaggaacagaagggcttctaacactagaaaaaatttaaggccaaacataacttgtaaagccattttccactttacttctgatagactgtcttgaatttccttagaaagttcaagatcagacttacctcgttccccagctgaaaagttctgaattcatacagttgaatccttcttaacagtctgctttacgggaacctttatcaccgtcgttccccagctgatgagttctgaattcggcagttgaatccttctcaacagtctgtgttacgggaacctttataaacgtgatccgcagttctggttctgaaatgaagtatccctcctgcgccagtccggagttttttctcgtcccggaattcggcaccaattgttattcgacgcgttctcacgaccggccaggaagaacaccacagaccagaatcttctgcggcaaagctttattcttacatcttcaggaaaagagagcaagaagcaagagagcaagaagcaagagagagagaaaagcaagagagagagaaaaacgaaaccccttctattttaaagagaacaaccattgcctagggcgcatcactccctgattggctgcagcccatggccgagctgacgttcacgggaaaaacagagtacaagtagtcgtaaatacccttggctcatgcgcagattatttgtttaccaacttagaacacaggatgtcagcgccatcttgtgacggcgaatgtgggggcggcttcccacactcattcattcattcatggtatatatctcaagctcatgtatgcatcaggtagcaatgagtttcagagaggaagactgcagagcggcaaagcacaggacactctgggacctcagccctggcactcaagtcctttgcatccccccgtgctccccctttggggtttcagaggtcagccagctgaccattaaatgccataggcaaaacaaaatgagctcttgccacgctgtcagtgaaaggttggctgagctgagaaatttgaatatctgtggttttccaccttcttgtagttgtgggcctctaagaccagacacatgtgggaactagctggctccttctgccccgtggtgatcagccctcttggctaatctgccttactcagttcttcctggtcttctgtccacagagctgtgcctgagatggagttcccgcccctctggctttgcctgggttttcacttcttgattgtggaatggaggagcggacctgggacagccactgcagcttcccaaggaggctgcaaggtggtgagtttctccttgggttctaatctctctctcctttgcccctgtcctaatgaggcctggtctgcttgggaagtggatgacttgtcaatcaaagctccattaatgcttccagagtcactgagggaaacacaccagcaccagagaagtcctgccttcaaggccatgagtgagccaacaaagatggcttcagcaactctgcagagaacatgtacccaaatggtactgcagagcaaatgctcatgaccaagcctacgtctctgaagacccagcgctggggtgtcttgagcctttgaaggttttttgtctgcacatggagatagaggcggactctagaaatttgcctgtaactgaagaatagcaaatgtctgtatgagaaacacgtgcctgttggggcgttacccaagcccaagaactggaaagacaaattggaagccagagttaatccttatattcaagatctttttcagtgtattcgacgatagataaagaaagtgttctaaaggcgattaatcttaaagatggtggctatcgcggttctaacctgcttgtgggaaccagtagccactgtgtttgaggacgctccagtatgatgaaagtccgcctgaatttaaatcctagccccactactgtttagctggtgatacaaagtcactctgtgccagtgtcttcacctgtaaaatagaagtaatgataatacctgctggtcatgggggcacatgcctgacaacccagttctcaggaagtggagacaggagggctaagagttcaaggccagtctcagttacatttcaagttcaaggccagtctgggctacatgagactccatcaataataatgatgatgataactaataatttctactaatggaatcgtgatattgggtgctgtggtgattggatgtatttataacaacccccaagacggtggcatgtgttttaccgagtatcgttactgtggtagtatcactggcagtccagcctcttttgactgccactgttcccttacagaggcaacaatgggcttaacttctgtagctctgggggtcaccaggcataggaagagaagggagtaaagtatgggttattcagctgattctcagggctcagtctggactctgcctgggggatgtggtacggacttggccatcacagaagtcaagcaatgggttcctctggctcttatgatttgaggggtctggaagtttaggcgttagactcttgttcttcattacacgagccattcaaccttagcatcaaatggacacggtaaagttggctgtgtgctcggatggccacaccatcctttgcaacgctttggtgaatccatgggaattacaaagatctgatctccctctgactacagcaactgtggaggagcaggctccattacaggctgaagcaagcccctgagttcagtgctgtccagagaggcctcgggaaaatcaagagatacacctgtctctcagttcggaggttcagtttataaaaagtcagctcttaacacattaatgcaatcccaatattaatgcagtaggcctgggagggggagttgaggtaggaaggaacctgaaaaagtcattctaatgtctatgctgaaattaaaaaagaaaaacaaacaaccccccccccaaaaactcgagtgttcaacaatgagcagcttaattaattagcacatgctggtaattacagttgacatgctgacacttattagccataataaatgtgatttgcatactcaatccttgaaaaaaattctatgagaaaattacaagcataatggttagtgacttttatctgagagggaggctgagactatctgagggtctccctttctttctttctttctttttttttttttttttttgaggcaggatcttcttatatagtcctgactggtccctaactctttaagtagtccagattgcctcaaactctcagagatcctcttgcctctatctccatgggtccagggattaaaggcttgtgctaccatgcccagtttctttctgttgttgttgttgttgttttaaaggtgtattttatgtatatgagtacactgtagctgttttcagacacaccagaagagggcatcagatcccatcacagatggttgtgagccaccacctggttgctgggaattgaactcagaacctctggaagagcagtcagtgcccttaacctctgagccatctctccagcccctaagttttattttaataacccagtaaagaatttgaagctgcaagaggttagttagttccttgctcagggtcaaattaacaaactatagaacccaaacctgggcatcttcgtattagccactgcgccttccaagagcgaggcctcttacacaacttcattgcactttgccttggaggttggctgtttggtactcactggccttgccctcctgaccaacctgtagaaagcaatagtattgcttttcttaccgttcttctctggacacctaacccaacaccttctggctagctgtttgcttttgcaaactacatttctgtgaattaacctcatgtgtttgtggacctaggtcgacggagtcgctgactgccggggtctgaaccttgcttcggtacccagcagcctcccaccccattcccggatgctcattctggatgctaaccctctcaaggacctgtggaaccattccctccaggcctacccacgcctggagaacctcagcctgcatagctgtcacctggaccgtatcagccactacgccttccgagagcaaggccacttacgcaacctggttctggcagacaaccgcctctcggagaactacaaggagtcagccgcagcactccacaccctgctgggacttcggagactggacttgtctggaaactccctgaccgaagacatggcggctctcatgcttcagaacctctcctcgttggaggttgtgtccttggcaaggaataccctcatgaggctcgacgactctatctttgagggcctggaacaccttgtagagctagatttgcagagaaactacatctttgagatcgagggcggggcgtttgacggcttgactgagctgaggcgtctcaaccttgcctataacaacctcccctgcattgtggacttcagcctcacccagttacggttcctcaacgtcagttataacatcctagagtggttcctggcagccagggaggaggtggccttcgaattggagatactggacctgtctcacaaccagctgctcttcttcccactcttgcctcagtgcggcaagctgcacaccctcctgctccaggacaacaacatgggcttctacagggagctttacaacacctcctccccgcaggagatggtggcccagttccttcttgtggacggcaatgtgactaacatcacaactgtcaacctctgggaggagttttcctccagcgacctgtcagctcttcgcttcctggacatgagccaaaaccagttccggcacttgccggatggtttcctgaagaagacaccttccctttcccacctgaacctcaaccagaactgcctgaagatgctccacatccgggagcacgagccgccgggagcactcaccgagctggatctgagccacaaccagttggcagagctgcacctggctccggggctcacgggctccctcaggaacctccgggtgttcaacctgagttccaaccagctcctgggggtccccactggccttttcgacaatgccagcagcatcactacaatcgacatgagtcacaatcagatctcactttgtcctcagatggtgcccgtagactgggaggggcctcccagttgtgtggatttcagaaacatgggctctttgaggagcctttctctggacggctgtgggctgaaggcattacaagactgcccgttccaggggacctccctcactcatttagacctgtctagcaactggggggttctgaatgggagcatcagccctctctgggctgttgccccgacattacaggtcctgtctctcagggacgtgggccttggttctggcgctgcagagatggacttctctgcgtttgggaatctgcgggcgttggatctgtcgggaaactccctgaccagcttcccaaagttcaagggcagtttggcccttcggactctcgacctccgcagaaactctctcacggccctccctcagagggttgtgtccgagcagcctctgaggggtctgcagaccatctacctcagccagaacccttatgactgctgtggggtggaaggatggggggccctgcagcagcacttcaagactgttgcggacttgtccatggtcacttgcaacctctcttccaagatcgtccgtgtggtggagctgcccgaaggcctgcctcagggctgtaagtgggaacaggtggacactggtctcttctacctcgtgctcatcctgcccagctgcctcaccctgctggtggcctgtactgtcgtcttcctcacttttaagaagcctttgcttcaggtcatcaagagccgctgccactggtcctccatatactgacccgtgtgccaaggctagagacttggtttttcctcgaggatgcgtctctccgctggatctttacttttgcaggggtcgagtgtgatgcattgaaggttaaaactgaaatttgaaagagttccatcctcagtcccattaacttctcctcccatccgtgtgatttatcctcattgtcctggtgaaatatttattaaacgacattctgtgagaataaagggtgtgcctcataaatatttta

SEQ ID NO: 120 - DNA, 3105 bp, Mus musculus
gttgggatcacaggtgcgtgctgccattgccgacttccttttccctttatttattttcttaatttttaagaagtacggtgcccagaaaagatgattagttaaggactgactgagtagatgaaaacagacgactggatggatgacccttctaaatggcggactcgtccccctttccaattaaacaaatttgtgttgcccttcactgaattctgccccaagctggcccttggatagaagcctgtagaagagttcctggaacagcagaccacaagccaggactcctagttcccatgtgccatcaaagcaggagccacaagagcatgcttagcgacgacctaacagagcttggcaggctgcacctgtagagtgacagccctgctggtgaggggccatgtgctacctgcatcctcgtccaaccccacccccaccccaccccccgcggtggcagttccttctaagacgcgggctgagtgctgagtcgctgagaggcgagctctccatgtgacttcagtttccgttggttccttccgcaagtgctaaaataatctgatgccccagagcgagtaggcagcgcagcagcggcaagtgctgtccaggaggctggggccctggagacgatgcgccccgcggagccgcctgggcctgcgggagcacttctgctcagtgaaccctgtctatctctggtagccctggtatctcctggctttccttgtctcccttggatgctaagactgagcactgaccctcagccatcagctctctccctgcccggcctggggccacatctttcaacttcaggcaactgtgcctgagatggagttcccgcccctctggctttgcctgggttttcacttcttgattgtggaatggaggagcggacctgggacagccactgcagcttccccaaggaggctgcaaggtggtcgacggagtcgctgactgccggggtctgaaccttgcttcggtacccagcagcctcccaccccattcccggatgctcattctggatgctaaccctctcaaggacctgtggaaccattccctccaggcctacccacgcctggagaacctcagcctgcatagctgtcacctggaccgtatcagccactacgccttccgagagcaaggccacttacgcaacctggttctggcagacaaccgcctctcggagaactacaaggagtcagccgcagcactccacaccctgctgggacttcggagactggacttgtctggaaactccctgaccgaagacatggcggctctcatgcttcagaacctctcctcgttggaggttgtgtccttggcaaggaataccctcatgaggctcgacgactctatctttgagggcctggaacaccttgtagagctagatttgcagagaaactacatctttgagatcgagggcggggcgtttgacggcttgactgagctgaggcgtctcaaccttgcctataacaacctcccctgcattgtggacttcagcctcacccagttacggttcctcaacgtcagttataacatcctagagtggttcctggcagccagggaggaggtggccttcgaattggagatactggacctgtctcacaaccagctgctcttcttcccactcttgcctcagtgcggcaagctgcacaccctcctgctccaggacaacaacatgggcttctacagggagctttacaacacctcctccccgcaggagatggtggcccagttccttcttgtggacggcaatgtgactaacatcacaactgtcaacctctgggaggagttttcctccagcgacctgtcagctcttcgcttcctggacatgagccaaaaccagttccggcacttgccggatggtttcctgaagaagacaccttccctttcccacctgaacctcaaccagaactgcctgaagatgctccacatccgggagcacgagccgccgggagcactcaccgagctggatctgagccacaaccagttggcagagctgcacctggctccggggctcacgggctccctcaggaacctccgggtgttcaacctgagttccaaccagctcctgggggtccccactggccttttcgacaatgccagcagcatcactacaatcgacatgagtcacaatcagatctcactttgtcctcagatggtgcccgtagactgggaggggcctcccagttgtgtggatttcagaaacatgggctctttgaggagcctttctctggacggctgtgggctgaaggcattacaagactgcccgttccaggggacctccctcactcatttagacctgtctagcaactggggggttctgaatgggagcatcagccctctctgggctgttgccccgacattacaggtcctgtctctcagggacgtgggccttggttctggcgctgcagagatggacttctctgcgtttgggaatctgcgggcgttggatctgtcgggaaactccctgaccagcttcccaaagttcaagggcagtttggcccttcggactctcgacctccgcagaaactctctcacggccctccctcagagggttgtgtccgagcagcctctgaggggtctgcagaccatctacctcagccagaacccttatgactgctgtggggtggaaggatggggggccctgcagcagcacttcaagactgttgcggacttgtccatggtcacttgcaacctctcttccaagatcgtccgtgtggtggagctgcccgaaggcctgcctcagggctgtaagtgggaacaggtggacactggtctcttctacctcgtgctcatcctgcccagctgcctcaccctgctggtggcctgtactgtcgtcttcctcacttttaagaagcctttgcttcaggtcatcaagagccgctgccactggtcctccatatactgacccgtgtgccaaggctagagacttggtttttcctcgaggatgcgtctctccgctggatctttacttttgcaggggtcgagtgtgatgcattgaaggttaaaactgaaatttgaaagagttccatcctcagtcccattaacttctcctcccatccgtgtgatttatcctcattgtcctggtgaaatatttattaaacgacattctgtgag

SEQ ID NO: 121 - protein, 631 aa, Mus musculus
MLILDANPLKDLWNHSLQAYPRLENLSLHSCHLDRISHYAFREQGHLRNLVLADNRLSENYKESAAALHTLLGLRRLDLSGNSLTEDMAALMLQNLSSLEVVSLARNTLMRLDDSIFEGLEHLVELDLQRNYIFEIEGGAFDGLTELRRLNLAYNNLPCIVDFSLTQLRFLNVSYNIWFLAAREEVAFELEILDLSHNQLLFFPLLPQCGKLHTLLLQDNNMGFYRELYNTSSPQEMVAQFLLVDGNVTNITTVNLWEEFSSSDLSALRFLDMSQNQFRHLPDGFLKKTPSLSHLNLNQNCLKMLHIREHEPPGALTELDLSHNQLAELHLAPGLTGSLRNLRVFNLSSNQLLGVPTGLFDNASSITTIDMSHNQISLCPQMVPVDWEGPPSCVDFRNMGSLRSLSLDGCGLKALQDCPFQGTSLTHLDLSSNWGVLNGSISPLWAVAPTLQVLSLRDVGLGSGAAEMDFSAFGNLRALDLSGNSLTSFPKFKGSLALRTLDLRRNSLTALPQRVVSEQPLRGLQTIYLSQNPYDCCGVEGWGALQQHFKTVADLSMVTCNLSSKIVRVVELPEGLPQGCKWEQVDTGLFYLVLILPSCLTLLVACTVVFLTFKKPLLQVIKSRCHWSSIY

SEQ ID NO: 122 - DNA, 2987 bp, Mus musculus
gttgggatcacaggtgcgtgctgccattgccgacttccttttccctttatttattttcttaatttttaagaagtacggtgcccagaaaagatgattagttaaggactgactgagtagatgaaaacagacgactggatggatgacccttctaaatggcggactcgtccccctttccaattaaacaaatttgtgttgcccttcactgaattctgccccaagctggcccttggatagaagcctgtagaagagttcctggaacagcagaccacaagccaggactcctagttcccatgtgccatcaaagcaggagccacaagagcatgcttagcgacgacctaacagagcttggcaggctgcacctgtagagtgacagccctgctggtgaggggccatgtgctacctgcatcctcgtccaaccccacccccaccccaccccccgcggtggcagttccttctaagacgcgggctgagtgctgagtcgctgagaggcgagctctccatgtgacttcagtttccgttggttccttccgcaagtgctaaaataatctgatgccccagagcgagtaggcagcgcagcagcggcaagtgctgtccaggaggctggggccctggagacgatgcgccccgcggagccgcctgggcctgcgggagcaagctgtgcctgagatggagttcccgcccctctggctttgcctgggttttcacttcttgattgtggaatggaggagcggacctgggacagccactgcagcttccccaaggaggctgcaaggtggtcgacggagtcgctgactgccggggtctgaaccttgcttcggtacccagcagcctcccaccccattcccggatgctcattctggatgctaaccctctcaaggacctgtggaaccattccctccaggcctacccacgcctggagaacctcagcctgcatagctgtcacctggaccgtatcagccactacgccttccgagagcaaggccacttacgcaacctggttctggcagacaaccgcctctcggagaactacaaggagtcagccgcagcactccacaccctgctgggacttcggagactggacttgtctggaaactccctgaccgaagacatggcggctctcatgcttcagaacctctcctcgttggaggttgtgtccttggcaaggaataccctcatgaggctcgacgactctatctttgagggcctggaacaccttgtagagctagatttgcagagaaactacatctttgagatcgagggcggggcgtttgacggcttgactgagctgaggcgtctcaaccttgcctataacaacctcccctgcattgtggacttcagcctcacccagttacggttcctcaacgtcagttataacatcctagagtggttcctggcagccagggaggaggtggccttcgaattggagatactggacctgtctcacaaccagctgctcttcttcccactcttgcctcagtgcggcaagctgcacaccctcctgctccaggacaacaacatgggcttctacagggagctttacaacacctcctccccgcaggagatggtggcccagttccttcttgtggacggcaatgtgactaacatcacaactgtcaacctctgggaggagttttcctccagcgacctgtcagctcttcgcttcctggacatgagccaaaaccagttccggcacttgccggatggtttcctgaagaagacaccttccctttcccacctgaacctcaaccagaactgcctgaagatgctccacatccgggagcacgagccgccgggagcactcaccgagctggatctgagccacaaccagttggcagagctgcacctggctccggggctcacgggctccctcaggaacctccgggtgttcaacctgagttccaaccagctcctgggggtccccactggccttttcgacaatgccagcagcatcactacaatcgacatgagtcacaatcagatctcactttgtcctcagatggtgcccgtagactgggaggggcctcccagttgtgtggatttcagaaacatgggctctttgaggagcctttctctggacggctgtgggctgaaggcattacaagactgcccgttccaggggacctccctcactcatttagacctgtctagcaactggggggttctgaatgggagcatcagccctctctgggctgttgccccgacattacaggtcctgtctctcagggacgtgggccttggttctggcgctgcagagatggacttctctgcgtttgggaatctgcgggcgttggatctgtcgggaaactccctgaccagcttcccaaagttcaagggcagtttggcccttcggactctcgacctccgcagaaactctctcacggccctccctcagagggttgtgtccgagcagcctctgaggggtctgcagaccatctacctcagccagaacccttatgactgctgtggggtggaaggatggggggccctgcagcagcacttcaagactgttgcggacttgtccatggtcacttgcaacctctcttccaagatcgtccgtgtggtggagctgcccgaaggcctgcctcagggctgtaagtgggaacaggtggacactggtctcttctacctcgtgctcatcctgcccagctgcctcaccctgctggtggcctgtactgtcgtcttcctcacttttaagaagcctttgcttcaggtcatcaagagccgctgccactggtcctccatatactgacccgtgtgccaaggctagagacttggtttttcctcgaggatgcgtctctccgctggatctttacttttgcaggggtcgagtgtgatgcattgaaggttaaaactgaaatttgaaagagttccatcctcagtcccattaacttctcctcccatccgtgtgatttatcctcattgtcctggtgaaatatttattaaacgacattctgtgagaataaagggtgtgcctcataaatatttta

SEQ ID NO: 123 - protein, 631 aa, Mus musculus; identical to SEQ ID NO: 121

SEQ ID NO: 124 - DNA, 2513 bp, Mus musculus
taggcaaaacaaaatgagctcttgccacgctgtcagtgaaaggttggctgagctgagaaatttgaatatctgtggttttccaccttcttgtagttgtgggcctctaagaccagacacatgtgggaactagctggctccttctgccccgtggtgatcagccctcttggctaatctgccttactcagttcttcctggtcttctgtccacagagctgtgcctgagatggagttcccgcccctctggctttgcctgggttttcacttcttgattgtggaatggaggagcggacctgggacagccactgcagcttcccaaggaggctgcaaggtggtcgacggagtcgctgactgccggggtctgaaccttgcttcggtacccagcagcctcccaccccattcccggatgctcattctggatgctaaccctctcaaggacctgtggaaccattccctccaggcctacccacgcctggagaacctcagcctgcatagctgtcacctggaccgtatcagccactacgccttccgagagcaaggccacttacgcaacctggttctggcagacaaccgcctctcggagaactacaaggagtcagccgcagcactccacaccctgctgggacttcggagactggacttgtctggaaactccctgaccgaagacatggcggctctcatgcttcagaacctctcctcgttggaggttgtgtccttggcaaggaataccctcatgaggctcgacgactctatctttgagggcctggaacaccttgtagagctagatttgcagagaaactacatctttgagatcgagggcggggcgtttgacggcttgactgagctgaggcgtctcaaccttgcctataacaacctcccctgcattgtggacttcagcctcacccagttacggttcctcaacgtcagttataacatcctagagtggttcctggcagccagggaggaggtggccttcgaattggagatactggacctgtctcacaaccagctgctcttcttcccactcttgcctcagtgcggcaagctgcacaccctcctgctccaggacaacaacatgggcttctacagggagctttacaacacctcctccccgcaggagatggtggcccagttccttcttgtggacggcaatgtgactaacatcacaactgtcaacctctgggaggagttttcctccagcgacctgtcagctcttcgcttcctggacatgagccaaaaccagttccggcacttgccggatggtttcctgaagaagacaccttccctttcccacctgaacctcaaccagaactgcctgaagatgctccacatccgggagcacgagccgccgggagcactcaccgagctggatctgagccacaaccagttggcagagctgcacctggctccggggctcacgggctccctcaggaacctccgggtgttcaacctgagttccaaccagctcctgggggtccccactggccttttcgacaatgccagcagcatcactacaatcgacatgagtcacaatcagatctcactttgtcctcagatggtgcccgtagactgggaggggcctcccagttgtgtggatttcagaaacatgggctctttgaggagcctttctctggacggctgtgggctgaaggcattacaagactgcccgttccaggggacctccctcactcatttagacctgtctagcaactggggggttctgaatgggagcatcagccctctctgggctgttgccccgacattacaggtcctgtctctcagggacgtgggccttggttctggcgctgcagagatggacttctctgcgtttgggaatctgcgggcgttggatctgtcgggaaactccctgaccagcttcccaaagttcaagggcagtttggcccttcggactctcgacctccgcagaaactctctcacggccctccctcagagggttgtgtccgagcagcctctgaggggtctgcagaccatctacctcagccagaacccttatgactgctgtggggtggaaggatggggggccctgcagcagcacttcaagactgttgcggacttgtccatggtcacttgcaacctctcttccaagatcgtccgtgtggtggagctgcccgaaggcctgcctcagggctgtaagtgggaacaggtggacactggtctcttctacctcgtgctcatcctgcccagctgcctcaccctgctggtggcctgtactgtcgtcttcctcacttttaagaagcctttgcttcaggtcatcaagagccgctgccactggtcctccatatactgacccgtgtgccaaggctagagacttggtttttcctcgaggatgcgtctctccgctggatctttacttttgcaggggtcgagtgtgatgcattgaaggttaaaactgaaatttgaaagagttccatcctcagtcccattaacttctcctcccatccgtgtgatttatcctcattgtcctggtgaaatatttattaaacgacattctgtgag

SEQ ID NO: 125 - protein, 689 aa, Mus musculus
MEFPPLWLCLGFHFLIVEWRSGPGTATAASQGGCKVVDGVADCRQLASVPSSLPPHSRMLILDANPLKDLWNHSLQAYPRLENLSLHSCHLDRISHYAFREQGHLRNLVLADNRLSENYKESAAALHTLLGLRRLDLSGNSLTEDMAALMLQNLSSLEVVSLARNTLMRLDDSIFEGLEHLVELDLQRNYIFEIEGGAFDGLTELRRLNLAYNNLPCIVDFSLTQLRFLNVSYNIWFLAAREEVAFELEILDLSHNQLLFFPLLPQCGKLHTLLLQDNNMGFYRELYNTSSPQEMVAQFLLVDGNVTNITTVNLWEEFSSSDLSALRFLDMSQNQFRHLPDGFLKKTPSLSHLNLNQNCLKMLHIREHEPPGALTELDLSHNQLAELHLAPGLTGSLRNLRVFNLSSNQLLGVPTGLFDNASSITTIDMSHNQISLCPQMVPVDWEGPPSCVDFRNMGSLRSLSLDGCGLKALQDCPFQGTSLTHLDLSSNWGVLNGSISPLWAVAPTLQVLSLRDVGLGSGAAEMDFSAFGNLRALDLSGNSLTSFPKFKGSLALRTLDLRRNSLTALPQRVVSEQPLRGLQTIYLSQNPYDCCGVEGWGALQQHFKTVADLSMVTCNLSSKIVRVVELPEGLPQGCKWEQVDTGLFYLVLILPSCLTLLVACTVVFLTFKKPLLQVIKSRCHWSSIY

SEQ ID NO: 126 - DNA, 116043 bp, Homo sapiens
  misc_feature (1)...(116043): n = A, C, G or T/U
gttaacctattctttttttctggcgtgatctcggctcatttgcaacctccacctcccaggttcaagtgattctcctgtctcagcctcctgagtagctgggattacaagcatgcaccaccacacccaactaattttgtatttttagtagaaacagggtttcaccatgttggtcaggctggtctcgaactcctgacctcaggtgatctgcctgcctcggcctcccaaagtgctgggattacaggcgtgagccacagtgcccagtggtttatttttatagaacagctttattgagctataactcatctaccatataatttacgcatttaatgtgtacaaggcaattgcttttagcatgttcacatactcatgaaaccatcaccacaattttagaacattttcataacctcaaaaggaaaccccatacccattaccagtcactcccattttcccccaaacccccagacctaggtaaccactaatctttctctctctacagatttgccttctctgaacaattcatgtaaatgaaatcatgtaacatgtgatcatttgtgactgacttttttcacttagcataatgttttcaaagtttgtccctgttgtagcatgtatcagtactttattctcttctatggctgagaaatgttccactgcatagctgggcgcagtggctcaagccagtattcccagcactttgggaggctgaggcgggtggatcgcttgagctcagaagttcaagaccagcctgggcagaaaccccatctctaccaaaaatacaaaaaattagtcgggtgtggtggcaggcacctgtggtcccagctactggggaggctgaggtgggaggatcgcttgagcccaggaggaggttgcagtgagctgagatagcatcactgaactccagcctgggtgacagaaagagatcccatcaaaaaaaaaaaaaagaagaaagaagaaagaaagaaagaaggaaagaaaaagaaagaaagaaagagaaagaaaagaaagaaagaaagagaaaaagaaattccactgcatggatatactgtatccactcgtcagttagttgatggacatttgggttttttccacttcttggtaatcatgaatgatgctgttctgaacattcatgttcgggtgttagtatagcatggcttcaggtgttagtatagcatgtcttcaggtgtttgtatagcatgtcttcatttcttttaggtccctaggaatggaatttgtgagccacctgataactccatgcttttaccttttgaggagctgccagactcctttccaaagtttctgcaccatcttacattcccaccagcagtgtatgagggtcgcagtttctccacatacttgttttatttgaccttttgatgctaggcatcctagtgcatataaagtgatatgtcattgtagtttttgtttttggggtttttttagacagggtttcactcccgtcacccaggctggagtgcaatggcacaatctcggctcactgcaacctctgcctcctgggttcaagtgagtctcctgcctcagcctcctgagtagctgggattacaggcacaggccactgtgcccggctaatttttgtatttttttgtagagacggggtttcaccatgttggtcaggctgggtttgaactcctgggctcaagcgatccacctgcctcagcctcccaaagcgctgggattacaggtgtgagccacagcgcctggcctctcattgcagttttgatttgcatttccctgatgacaaatgatatcaagcatcttttcacatgattactggccatttgtataccttctgtggaaatgtggtaacaccctttgctgattttaaaatagggttatttgtttattattgagttgaaataattccttcttttgagtgtcagtgactgaggttcgctgtgacacagaggggttctcctggagagctatggcacatgctccatattaaaaggcaacatgatgctgtcaggaagaacacaaaagcaattataaaaacgtgttagtacatatttatgcatcttttttcttactctctctttgctatctattctcacagctctaaatatgaattatttctctaggtagaggccaagcatgagtcagcttctcccaagaatcagttgcctgggcttcgagacagttttctgccgtattttgggtaattgtagttgccaggagtctgacttctgagggtgtcaggtgccatttgccgttaagtggagatagtaggttgaacagggtgggactaattggggccagttttgaggaggtgaatctttagtgaaatcgccaagaacacagtggtgaggacctggcagagaggaggagattccaaggctgggggaattgggtagtggcgtctgggcactgggtcctgtagaagggaattggcgagatgaatgagcagggcttcacaggtgtgactgatcttggtaaagacggtgagaagccgtgaccaggcagggtgtgcatgggagcagtgaaaggtctaaaattcagcctttgagctcagtgctaggttcatgctagtaattggttccgataggttaagcttcctctggtttgccggtgtgagaagaaagaaaaacctactcctccctgtttccgcctcaccagcttcccttctctgccagccccaccctgcccccggcccgtgtggctaaactgcccaactgccgattaaaacccgcacctcccaacatacctcgcaccacccagaggccccggtccccgccattcattccgctcccggccgggagtcgctctagccaatcaccttccaggctcagggcggccgaggcagggcctctgcctcttcggggggcctctccctccccctgcccctgattgtggctgaactgccaccgcttgatagcaaaccacactcggcacaggaaggagaacagcgcccgcggccccgggcctccatgaaatcagcaagggcgcgctcctcccaccgccgcgctgctgagcctcccgcctttccttccggtcgctcgcgcctcgagaggcgccgcagggagccctctgccggtcccgcccttcgctgttagcgcttaggatctggtgccttttcacgtgggggcgggtgggcgggaggcgagtctggggtcttcgggccgggcctccgctctctggcagtttgcaccttgctccactcactggcctgcggtctgtgttcactcctcctcctctcccacgtctcaggaacctgcagctggcccccgagcccgcgccctcccggttctaggaattcaccactttcttgcctttgtttgggtatcttttgtttggagccagagccggctccaaggaggagctgccggagggtgctaggctttttgcagaggaagtgaggagcagagtgatagggcgtgaagtcagagggagcagagaaggggccgaatccagcggggcccggatcatgcagggcccggagcctgtggtgaggactccgggatttatattcaccaattatgagaaaggacttctcggccgggcgcggtggctcacacctgtaatcccagcactttgggaggctgaggccggcggatcgcctaaggtcaggagttcgggaccaccctggacaacatggtgaaactttgtctctactaaaaatacaaaaattagccaggcgtggtggtacatgcctgcaatcccagatacttgggaggctgaggcaggagaatcgcttgaacccaggaggcggaggttgccgtgagccgagatcgtgccactgtactccagcctgggcaacaagagcgaaactccgtcaaaaaaaaaaaaaaagaagaagaagaagaagaaaagaaaaaagcaaagaaagaaaagaaagaggacttatcaatgaccacaaatgactaagtcctcaacctctccaacagctctagagcaaatgacactttagcctgtgctgagcccctacaaggtgctagaccaagtattcttggggatatatacaaatgtgaacaagccagagaccctgcctggcaggactcactgtccagggggaaggcaaaactgcaaagatgagctgggacgccccatgggaaacgctggacagagtcagccacaaagccatccccttgcagcctcctccttggcatggccttattttccttgttggatccctagtgtcctaccccatgccaggtcccaccccaggagggtccagttcacacttccagaaagtttgggctgcactgtcccagcggctgtgcccttcgtgctctcccgctcccaggactctcccagcaccgcgtgcccattttccccaaggtcctttcggccctggaccagaccatggttagttatgggtgccccttcccctcgctgtcccactccacgccctggcactgataggacacttccatgttatctttgcaccacctggactctttgatcatatgttgatactgtcggtgtttcaggacaggaagaggcagtgtccccacagaggtcagtcaccggagtcagtggctgcgggaggccatgggcagcagggagctagaggagctgatctcaggattggagaccgccacctcctccaggaggagaaacacgcggggaagagcccccagccccaccccacccccgcactgccttcagcctctgcattgacccctccgcttttccaggatgggcatcatgaggcgttgagtggtaccaatgtgggcggtgggctctcctctttccggttttaattcttggttcttaaaaactccgttccaaatgagggaaatgaaactactgaacactctcccccagcagccagctgacgtggggcaagagaacaattcccagttaaggccccaaaggaaatcccctccctgccatgtgctgaggctggagaagtgggggctggagaactggagaagtgggggctaggagaagtggaggctggagaagtcggggctaggagaactgggggctggagaactgggggctggaaagggggggctgggagaagtgggggctggagaactggggtctggagaagtgggggctgaagaagtggaggctggagaagtggggactgggagaagtggggactgggagaagtgggggctagagaagtgggggctgggagaagtggggtctggagaagtgggggctagagaagtggaggctggagaagtgggggctggagaagtgggggctgggagaagttggggaggctctatctagctcactgctccgccaccaaggtgaagggcctgtctgtggccagcggctgagagcccacagcacagcggagaaccccagaggcaggagcaagaggaccatgattttgcccggggtgagccgccagttccaggtccccatggctccactgctaggtgcaatccctgtgctcctctctcacagacctgtctggagtggggagcagccccggctcctcccatggctcccttgcacaccgagttgtgtcccctctcacaggccagctgtagccccctcccctggtcttgaataggttgccatctggaaaagcagtcaggggtcggggtggagggcagaagccaaggctccctttgatctccttgggaggctgagaagtcccacaagtgacaaactcttatgaagcttagtttaagaaagaaaagagatccccacaccctcagagggcaacagctagagaattatacaaagtgggttgaccgccatcattccttccttccctctcttcgtttctttcctccttctttcttttttgtggagatggagtttcgctcttattgcccaggctggagtgtaatggcacgatctcagctcactgcaactgccacctcccgggttccagcaattctcctgcctcaacctcctgagtagttgggactacaggaatgcaccaccacgcccagctaattttttgtatttttagtagagatggggtttcactatgttggccaggatggtcttgaatgcctgacctcaggtgatccacccaccttggcctcccaaagtgctgggatgacaggcgtgagccactgcgcccggcctcctcctcctttctttgagcaaatagtcaccaagcccctttatgtgcataagatagtatattttttggaataacacatgaccctgcctccaaaagtttgtagtgggccaggcatggtggctcacgcctgtaatcccagcactttgggaggctgaagcgggcggatcacctgaggtcaggagttcaagaccagcctggccaacatggtgaaaccccgtctctactaaaaatacaaaaaattagctggaagtggtggcgggcgcctgtaatctcagctacttgggaggctgaggcaggagaattgcttgaacccaggaggcggaggttgcagtgagccgagatggcaccattgcactccagcctgggcaacgggagtgaaactctgtctcaaaagaaaaaaaaagtctgtagtgtagttgtggaaaaaaggcagaagtccaaaaaattaaatcacaacacaagagatgtcatgaggtcggtggattatgggaacgctggcaccatgtgttcacaggacaaggtggcaattgcagtggggaaggcttcatggaggaggggagtccaagccatgcctttgggatggggagggttggggtaggcagaagaggccattccaaacaagggaaccctctgccagagagagtagagagtggggagcgtttgttctgtgtttgggaaaatcgtgatcagcccgggctgggtgaacccacctgcaggccatgtgtgcagtgatcatgaagcatgggcggtagtcgtgaagagaggctggaggcagctcaggccgaatggactttctcctccagccgggagccgcctgggttcttgctttcacttcggatcagagacgctgctgcgctgcttgacactagacttgctttattcctgttgagtggaatacagcaaacaccccaataggtggagcaggctcaaagcaagaggcacatggccccccagaaattctcatgatcctgtggaggggtgagcttggtcagggcaaccaggcctggatgcaccagggttgcatctgagaggaagcaccctggtctcctctgcctcgaaaagcatagtgaggggggagcccaaccaagttggaggatgctgagctgtgcagtcgggcttccagccgtgctggcacgttctcctttcagctgaaatctgcattggtttcagctggacgtccaggcttccacccactgaggcagcgtgctgctagcctaggggagggctgctggtgttgccaaccaactggcttgtctctacacatccatcaagagcactggggccgggtgcagtggctcacacctgtaattccagcactttgggaggccaaggtaggcagattgcttgagcccaggagtttgagatcagcctggacaacatggtgagacccctgtctctaccaaaaatacaaaagacatggtggtgtgtgcctgtggtcccagctactgaggaggctgaggtaggaggatcacctgatcccaaaggtcgaggctgcagtgagccttgattgcgtcactgaactccagcctgggcaacagagtgagaccctgtctcaaaaaaaaaaaaaaaaaaaaaaaaaaagaaagaaaaagaattaaaaagaaaaaaaaaagaccattggtttactagattttttttttaggggtagcagctgcctttctcaaaagaaattctatagagaatctcccaatgtataaaacatatcaaagtagaattcttgggatgtggagggaatggggtacctggatcccacctgccagtctttaggcattcatgaggaacccttgaacctgctgaaccctgtaaaagggctttaagcagagagtgagatgacccaatacacattttagaaagatgcccgtggcagctaggtggagttgacattggacagggatgagattaggggcagggagcgagtttcaggaggctatgaaagtggtccagacatgagctgatgaggtctagacccagggcaacagcctaaggatgaaaagcaggttggattccagaaacatttctgagttagaatcagcaggaattgggggtcaattagatatgaaggatgaagtctgtgagggctggactgcctgggctgaaacataccgtaaagtgtgacagccatacaggagagaaactgctgggacaaaggataagagttgagtttggggccaggcacagtggctcatgcctgtaatcccaggactctgagactgaggtgggcggatcacctgaggtcaggagtttgagaccaccctggccaacatggtgaaatcccatctctactaaaaacacaaaaattagctgggcgtggtggtgggcgcctgtaattccagctacttgggaggttgaggcaggagaatcacttgaacctgggaggcagaggttgcagtgagctgagattgcgccactgctccagcctgggtgacagagcaagactgtctcaaaaaaaaagagagagagttgagtttgggatacatcatgttatggtgactctgggacatgtagcagttgattgaccagtagacagttaaaaatgcaagtctggatcttctctcgtggaagagaatgttggagctagaaattaaaattggggagttaccaactgattggtagacacaaaagacatgaagtagagaatgtgcatacaagagagaaagaggcctgaatcaagcacctgggtttgcaacaatttgatctttatttagctttttcattggtgtgattgttattaccattatgagataatattttatttttaaaattatttttatttttttaaagacggagtcacactctatcacacaggctgaagtgcaatggcgtgatcttggctcactgcagcctcaacctccctgtgctcaggtgatcctcccacctcagcctcccaaatagctgggactacaggtgcgtgccaccaggtctggctaagttttaaattttttgtacatatggagtctcagtatgttgcccaggctggtcttgcactcaggcggtccacctgccttggtctgccaaaatgctaggattacaagcctgagcctctgtgcccggccatgagtgaatattgtagaaagcagagacaatgtgccagatgtttggagtgaaaaggacttggctcctgttctcttaggatggacaatgctacacacaatcccaaatcacaggctataagagaggtgacccaatcctgcaggacagttcaacgtttcagatttgaaggggagtgagagagatcagaactggaggccccttgtctgagcccccgactatggtggtccacgtcactccacacgcagcaggcactgtaaatatttcaccttctctagacgacagtagttcctcgagaacaggagcgctggggtaatgcatatgaagctcttagcacagtgtctggcgctgcttcaatgatggctatatgatcaattattcttactcctttgaattcttggcaagagctggcagggaactttgtacacatcaggtacaaaaaaacccatccgcgcagtctaagatcaagaagctcttggcactctctgacagtcctcgacaaagcaattccccttctttctaacacagggtccgtaaaggagatgatccacaaggaccggctgagtggataagaagacagactggctgagcggctgaccctgccagacgacaggctgtgcctctttaccacggtgctgccgttcccaaagtcggcctcagcttggtccttggctggaagctcgtagcaaagtttctgggtcagcagacctcataggcaaggggcccctagctggccgcccccagccctgccaaggcaccaacgcaagaaagccgggggagcctcggtcgcattgctggaagatcgtctaaacatccccgctgctcggccgctaggccggcaggtgttcgggccccgctcccccggcccgccccacccccgcgcccgcgccgcgcttccctctaagaggccgggtctgagtgagcctgtgctgagtcgccgagcagcccgctctccatgtgacttcagtttccgtccgttccttccgctggtgctaaaataatctgatgccccacagcaaggaggtagcccagccccgcgttcggctgctctcgaggaggccggagcccccggagacgatgcgccccgcgcagccgcctgcgcctgcgggagccgtgagtatttcccgcgtgggggcgtccccggggcacagccggggcccttctccaggtgggcgagctcgagcgaggttgggtggtaggaggtcagcgtccgcggcccgcagctcagggctcacgaggaagctgtggcttgctgcgtccaagcgccgccgcttttgtgctgggcgtgggggctgcagctctgggtggaggtggaaatacctccctccaggagcacttagagctgagaaaggtggtgcgacgtagtggaaaccacgagggcttcagattcagacgtgggtttgagtcctggctctgcagggagcatgtgagcagacagttaaggtttctgagcctcagttttctcatctgcaaaatgggaacagagatgctccctccctgggctgggcgactggatatgatgagaccgctctgtgcacactcagcatgctgagcactgggctctcctttcctgtcccacaacgtggattgagaaccactatctcatagatgaagacactaagactggttaacagcaacacctatcacagatgccgtccacgtgccaggcctgtccaaggccctggggatacagctgtgaaaatgtgcaaagccccttctcccacagaacgtttgtccttgggagattcactggggctctgtgacttggatcttagcctagacttagatccatggcttatcagagggagactaacaggagggcgacgaagactcggacgctcttccgtagccctcgtggcccctgcatgtgggccggcttctgaaggggtcagcgtacttccccacgtacccaggagctagacggaaagaagtaaggagccactggtgtggctttgtgctgcctctgagagaaggtggacacgtgccagttggtggctgcgactggaggaggccggatcgggggtcctaggaatggagcctctccggacagggctggtcggggctgctgtgcttccctaggggctgaggggaccccaccggaggcttcttcatgatgggcacagcccgttaggagtctgggtgctagaaacattcagcgtctgtggccctccatgctttcctgtgtgctcctcacctgccggctgtgacacacagactgttctgtggatgctgagggtttgctgggctttacatttacaatacgtatttattctcctcacacacctcttaggtttgtgtgtgtgtgcccgagagtccctaaaggagattatagaatcatgggcccaggaaaaaaccttaactcctgcctttaggttaaaaaaacaaaacaaaacaaaacaaaacaaaacaaactcagcttcacaaagaaggcactttttaaaaatatatatatttatttatttatttttagagacaggctcttgctctgttgcccagactggagttctgtggcacgatcacagatcactgcagcctcaaactcttgggctcaaataatgctcctgcttcagtcacctgaggagctaggacaacaggtgcacaccaccatgccagctaatttttaaaatttttttgtagacacaggatcttgctgtgttgcccaggctggtctcaaactcctgggctcaagcaatcctcctgccttggcctcccaaagtgctgggagtgtgggcgtgagtcaccgcccccagctttcatgtaatgagtgccctcatgggaacttcatgaaaacacattctcttatagtttttaaattcatcatccaagagttcctgctctttgatgatgagacatacctggtagactccaaaacagagagcagacgcctagtatctttgttctggggtgtgcattaagagtacattgacctgtctgtctccagtcttgactcttttggaagagagatgctagtactgatgacaacctgcattctggctgcggtgtgcgtccacactgcacagtgtgcaccagactctcgtatggacaatgactgtccctcacatcaggcgcagatccattttagagcctcagaagtcaggagagggtggactttcaaccacgactgaaaacactgtctttcttaggacatgctgtgtgtatgacacacttacagatgtctgtgctcactgatgcttgttgatgtgtcatcgcacatcagtgacaaacatttgtcatgtttttgcctttggtggaacttctttattatactcactttcctcccaaaccatttttctcaacttcatcatgaagcaaatgtcatgtggtcattctgtgatggggctcagggctaggttaggtgatgatttctgaaagctcagagacgtgaaggaaaaaggacatcagtgcttggatcttagctcttataagcctcacgtgcaacaataaacccgagttcaagaatcagattcttagatagattggtttggtagcaaatgacaaaaaaccaacgtaaatatgcttcggcaaaaaagaaaaaaaaaaaggatttattgtttcaaataactgaaaagtgtatgggcaatagtttcaggcatggctgagtccagatgctcaaatggcattgccaggaatccatctgtctcctttcctcagctttgccttcctctctgtgggcctctttaccaggcaagtcccggagctggtggcaaagatggctgcctgcagctccaactatattcctactggtttggcatctgaaacagaaagagcaagtctcctttccatgagttctagcaactgcccgtggattgattctcatgggcttggcttttatgatgagcctgttaggaaaatggagtgctctcacgggcccagccttactcataggccccgccctggaaccaggagctgggatcagacccgaacacacagacttttgaagaaaggaagggggttggttgcacagccgcgtaagggtacttaacactactgaattgtacacctaaaaatggttaagatggtcactttcggccgggcgcggtggctcatccctgtaatcccagcactttgggaggccgaggcgggtggatcaggaggtcaggagtttgagaccagcctggccaaaatggtgaaaccccgtcactactaaaaatacaaaaattagctgggtgtggtggtgagtccctgtaatcccagctactcaggaggctgaggcaggagagtcgcttgaaccttggaggcggaggttgcagtgagccgagatgattgtgccattgcactccagcctgagccacaagagcaaaattctgtctcaaaaaaaaaaaaaaaagataatcgctttcatgttttgtgtattttactacaattaaacattttctaaagaaaaaaaggaaagaaagggggtgattttctcaaaggggaattgaggggttgttaccagaaggagaaacgaatgtgagtgagtaggcgaaaccaaccaatttccagagcgaacggagtcaggtgctgaccccaagccaatgtgtcttttctcactttaatgcctgagggatttcagagtgaacagagtgaagaaaggaggaagtggaacctcgtcatggtcctcacccacgaggtgggcgcgaggagcaggctggtactggataggctcaatgtggccacaaagcctggtgaggtcacagggactcccctcctccagccccaacccaaaaggttgcctaaggcaggtgctgcgccatgtgcaccaagcaactttctgctgccacctccaagaaagagaaggaccgggaggggatttctcccaggagagagagcacataacgctccgtcttttcacctgtctgttctcaagcaggacctaagtgtctaaggcaaccccacacccacagtgcctggcaggggcccacccatgggtacacatcgtgttctcctaagctcatgtcactccatttcagatgtcaactggacatggactcctgctgatcctccctactgtcattcactcctctcctgctccagccctgatccctgaggtctcttctacccttgcagtgtctcccctctgtggtcctcaggcaccaaggctgagccctttccctcggccctgcagtgtctcccctctgtggtcgtcagacaccaaggctgagccttttcccttggccctgcaggctcagtggggagcagggctttccctgcctggccctggaccacctccttcaacttcagcaagttagcggtctccctgtcaccagccagcctgacaccctgagacctcctcatgggcctcggccgttctcttgttctaggttattgggcccttcctcaggtccttaaactgatgcttccattcagcttctcatctccttccaaatccccagttttcttctaggctctctggctagagaaggttagagccattttgaaggcctctgacagcccccgtcttgctttgtctccacagaaggccatggtcccatgatacactcaggggtgctgttcagaatatcaggcaccgcatggcacagctacttgggaggctgaggcaggagaattgcttgtaccctggaggcggaggttgcagtgagccaaggtcacgccgctgcactctagcctgggtaacagagtgagaccccgtctcaaaaaaaaaaaaaaaagttaaatcacttgatatgcattctgaaatatttaaaggaaagtatatcaatgactgcaatgtactttgaaatgcacgatcaggctgggtgcagtggctcacacctgtaatcccagcactttgggaggccagggcgggagtttgagaccagtctggccaacatggtgaaaccccatctctattaaaaatacaaaaattacccgggtgtgatggtgatctgtagtgatctggtgcctgtgatcccagctacttgggaggctgaggcaggagaatctcttgaaccccggaggcagagatctcagcgagcagagatcgcaccattgcactccagtctggcgacagagtgagactctgtcaaaaaaaaaaaaaaaaaaaaagaaagaaagaaaggtggcatgggtggtgctgtgtgcctgtagccccagctactcggtagccctaggtgggaggactacttgaggctgggagcttgaggctgtagtgtgctacaatcccatctgtgaataactactgcactccagcctgggcaacatagcaagacctctaaaaaaaaaggagaaagaaagatggacagaaggatagatagatggatagatgtatgttgttggggaaaagttaaatgactaacagtacctagtaactgttcacattccttgtcatgatcataaaaatcaaataataagaaattagaaaacttccataggaaatgtagctacctataatacactgccatatgaattactgggttattgctccactcaacttttagcttgtgatgaggaggtgataccagcactgagcctgcaggatgagtaagagctttgcaggtgaacaagaccagcaaaagagcctttcccacagaggacagagcgtgtgggcatgcgtgatttagtcaagggtcgcaggcatcccagggtggctggggcttgtggtattgaggttgagctgatgcagaagtcacagacctgggtttgaattgtggctctaacattctctagctgtacagcctaaacctatgtgagccgccattgaccaagtgtgaaatggagatgacaacatttacctgctaggatttttgtgggaattatatgtaaagtacccggtatagcccgtgttccaaggtgagcactcagtaagcatgagctgtcacagtgaagagcccggacagaatctgggagtgattatgcagacctcgaacaccactgaattgacctttgaatcggcctcttgtcaggaatccatatgctttcgttcttcaatcgtacactttctcaaggaaaccaagtagtcggggtggggggatatattttcattgttttcccactggggccactaagccgctgtcatcacccataaaaaacccctgcccacagtctaccgtggaccctgggtgctcgcttctcccctggacatcccagggtccacacgctgcagctcccaggggtgggagaagggacgaaagctccttctccttcactgtatttccctcaacaccagcttgctgtttgcacagaggaactctgctttccctttgattaatacacctctttgtctcactatggaaagcgtctgtccccctccagtgggggcgtgtcctcctgcaggccttggaaggcttggtggggtcccccgcccactaaacgtgaagtccgaacattcccttacatcgacaaagccttttcacacacactgtcccattcagtctcgacacaaccctgtgaggccatcaaggcaagtgctgtcctccgtggtcaccaccagagtgaaggagccaggcttgggcccaggcctccttccccagcccagggtcccttcctctacacaggtcccacctgctccttcttatcgagaagggcggtggcaggtagccactccctcagaagtgaccagagggaacaaacttgtgatactgaagggaaatcagatgctaatgcgttatgcggttgagcgcctatcagcagagattatgtgggtctctcctatagaaaggtgacaccgaggacctaccaccagccaccaccagcatgcaagggcgaggtgtcacctcccagtgggagcaggtttgcatttattaagacctgtggccagatggcagcctgtgggcatggaacaggacgaggtgagctgacctctgatggctctaccaggccgacgctgaccacgtagggaagccagttggcttattcgtggccctaaggaagtgagggctgagcagggaggtgctcaaagcgggctcctcacactggctgtctggagtcgctgtgggaagggcccaggggaagaagggttgctggggcctctgaatccccccccgatggaggcagagcctcatccattcccagagagtctctcgccacgagccccggtacagcgcaggctgaccagagaaccggagaaccgggtgggaaccggagatctgagttgaaccagtgctgggaaccatggcactgccttcgccgagccgccgcgtgcctctcttttcacctctctggcctgcatattcttttagcaaacttggggattatactacacattctgctttacactttcctttccttgatattattttattatgaacgtctttctgcgtcaatcaatatattgctaccaaagcatttttttatcataccacgtcattcctatcatgtagttttaccataacttatttagccagtgcttccattattggacttttgatggtttccacttttttattattcttactaatgttacaatgaatatttcttttaaaatatttttatgtacattgtatttccttaggataaattcctagaacttgagtcattgaatcaaaaagaatccagactttcaaggtctttgataaattggctaaattgttcttcagaaaaagtgtgccaattttctgttctacctgcagggtgtgagacagttcttagggggggagaagtcaaaacaattgtattgtctatattttgacaaattcattattaagagaaagctagagaagcaaatcacaagctctgaattcacacatcacaattctaaatgtttgttgttctaatcctcaatttcaagttcttgttaatgcatccaccatttgaatatttactttttcaaaatataggaatgtgttaatttaccaaagatcacaatcggttctttgctttttgcttattttttgagacagagtcccacttcgttgtccaggctggagtgcaatggcatgatctcggctcactgcaacctctgcctcccaggttcaaatgacactcttggctcagcctcccgagtagctggaattacaggtgcctgccactatgctcggctaatttttgtatttttagtagagacggggtttcaccatgttggtcaggctggtctcaaattcctgacctcaggtgatctgctggccttggcctcccaaagtgctgggattacaagcgtgagccaccgcgcccagccacctggctaatttttgtatttttagtagagacggggtttctctatgttggccaggctggtctcgaacccctgatctcaggtgatccacccacctcggactcccaaagtgctgggattgcaggtgtgagccactgtgcccagcctgtatttccatttttaacataacaaatgtttcctgagcacctttctgagaagagtgtttgaaaaaggtatgttaatgattcctggaaatatggggacagagattaccataatttaacatctcttttcaggaacacttatttcattttcctcatttttaaatgtgagtactttaaaacttacagaaaagtttacaagaaagtacaatactaaatttaccgagtagtaatattttgctttactgtctctattgagccatttgaaggtagtttacataaattacggacatcatgaaagttccctgtaagtgcttcagcatgcatttcctaacaatagaggcgatgtcttacataaccacaggcttgttatccgacctgcagacctcatatcatctgtgcatctgaaaactcatcacttagtgcctatttaaatttccccaattgtctcatacttttctgttagagattctttaaaatccaacatccggccaagctcagtggctcacgactgtaatcccagcattttgggaggctgagttgggtggatcacctgaggtcgggagttcaagaccagcctgaccaaaatggaaaaaccccatctctactaaaaatacaaaattagccaggcatgctggtgcatgcctgtaatcccagctactcaggaggctgaggcaggagaatcacttgaacccgggaggcggaggttgcaatgagccgagattatgccattgcactccagcctgggcaacaagagtgaaactccatctcaaaaaaaaaaaaaaaaaaaaaaaattccaacatccactcaaggttcattcactgcacttggttaaatgcttcttagtcacttgtaatctagaacagacacccccagccccactccagcctttctttgattttcaagactgactcttgagaagtccaggccagttaccttgcaggacgtcttacagcccagatctgtcagaggctttcctcatgactggattcagggcaagtgtttctggcaggcgttccaccaggacagtaccctgtttcctaagtcatcacactcagaggctcagaatggcaggagctctcaccacgggggtgttgagtttggacatttggtgaaagttgaggtcatcctaatgttttgctaagaatcagagggaccagagctgcttgcttgagacttcccagtgcttcctggagaagggactgttggaaatggtcacagactgggggttggttttgttctgtatcatctgttctcagtggtctgtgaccagctgcccttcccattctcccagatcccaggtgcaattgctctttttcttgcagtcaaaggcagactccctttcttgtggaggcctccatccggcaccgtgtgcccttgtgtgtccatgagtgtcactgtcacacatttaccactgcacctgtgcgcactctgcctctggagagccctcccccagacccagggagaaatatttgtttctctcttttttttttgagacggagtctcgctctgtcgcccaggctggagtgcagtggcgtgatctcggctcactgcaagctccacctcccgggttcacgccattctcctgcctcagcctcccgagtagctgggactacaggcgcccgccaccgcgcccggctaattttttgtatttttagtagagacggggtttcactgtgttagccaggatggtctcgatctcctgacctcgtgatcacccgcctcggcctcccaaagtgctgggattacaggcgtgagccactgcgcccggccaaaatatttgtttctagcacagagtgccccgagagctgcccactttctccaggagacctctttccgtaaagctttttcagcttctctgattactttgaggagaaaattcttaactacgtggtaacatacgtatggcacttgctcagagcccctttagcggagagggtccggtcccagctctggcagcagctgctcacgtagtagcagtcaggggaggtgggggtggggacggtaaggtgtccgagcagctccaacaaggagaggccgtcactctggccgggataacaattcagatatccagcgtgcacctgaatagtagaaatccagcatccttttctaaaaacaaaacaatagcaaaattcagatctgagctactctgtagcatttctttttttagagacagagtctcgctctgctgcccaggttggagtgcaatagcgagatctctgctcactgcagcctccacctcccaggttcgattgtcctgcctcagcctcccgagtagctgggattacaggcatccgccaccacgcccagctaatttttgtatttttagtagagacagggtttcaccaggttggccaggctggtctcaaactcctgacctcaggtgatccacctgcctcggcctcccaaagtgctgggattacaggagtgagccactgcgcccggccatttttgtattttttttagagaggcagggttttgccaccttgctcaggctggtctcgaactcctgagacccagtgaccccccactccttggcctcccaaagtgctgggattacaggcgtaagccaccgcacctgttcgcaacaaacataatttctaaaacaaaggagactctttgcagcggctgtacgttcttcttcctcactgtcagcattctcttgttgcagaatacaacctccattcatgttgtttttatgaatgaatctttttaccactttcttactatgaccaggtctggaggcagaaaaccacgttgtcttctctgcctaaaaagcaacaccacatcttcatagacaaggttggctatggagtagactcacagcattccatgataactagttagaatgcagcagtgttccaaatgggccaaaccttgtccagacaggagcaacaggcagctcagggtcccaggaacactcaccagctggcagcccctcgggaagcggctgggctttccacctgttcctgcatgctgggcacactctggcttagatgccctcttacagctgcagatgctgtggcgtggtcctcagccctgaggatgtgggaggagaggaagcagtcctgtgcatgcaggggatgagtcacgggattttgcagagagatatggcaagaggattgtttatcttggactctttgcagtgccatggctctgaggaagctctctgcagctacacactctacgaagagtgtttctcaacctcaatggtcactattttgaaagccttttatttctttacagtcattacatacttttaatttagcactgggtcttggccattctcacatgattgtattagtcagggtccaaccaggaaacggaaactgcccagattatttaagacagaggatatttaatgcaagaaagtggcaacacatggtggaaaaggctgagaaagcaaataaacagtcaacacagcgacgagcagcttcaggaagcttcttatcctcacctaggtagggtgaggacaagaggagaaggtgggccaggcaccatgactcacgcctgtaatcccatcactttgggaggtcaaggcgggcagatcacctgaggtcatgagattgagaccagcctggccaacatggtggaacctcatctctactaaaaatacaaaaattagccaggcgtggtggcgtgcacctgtaatcccagctacttgggaggctgaggcaggagaattgttgaacccgggaggtggagtttgcagtgaggcgagatcacaacattgtactccaacctgggcaacaagagcaaaactccgtctcaaaaaacaaaacaaaacgaacaaaaacaaagaggaggaggtggtgtcaccagagcctaggggtcagcggaagaaactctaggatgtctctgtccaaggcagagaggaagggagagaagtatgctggattctttctgccctctactgtctgacctcccaggaggagtgtcttccattgactaaaccagcagagtttgtgacaggtgacagcagtttgaggccaggtgacagcagagtttgagattcagaaccttcagaagtcagagccctgccacactgaggagggcagggaaggggaaggcgcagctctggggacaaaccgctgtcagccagcatagtcatctgtgctcagggctagccttgctctgcaatttatgaatgcagagtttttaattgaaccttcctgcatatgttttacatatctagttggtataattcatccttccagccacattactcaggcctttattttagactttgtgtagctgttgaactaccttggagattacacaggaataaccagcactcagtcaactcactggtgtttggaactcacaagtaataattaataattgtgttactcgctacctttacagccatgaagccctttcacattcatgagactggttattctcatgcaactctggaatagttattattactcccattttgtagacggattctctgagtcttggagactttgtctgaattcctaaaggacaaataacaaataacagaggcagaattcaaactctggtctgcttggttccaaattccatgatcttcccatgatatcctgctgcttcctgccagggccacaacaagagtttttttctgggctggttggctgagtttaggaggaaggagaggatatgttttaaacttgcaaaattcttgatgacccataaattaaaatgcccctcctgagtgtgacacaaggcctggcttgccttccagtctgaaggttgccttttcgctgagggacctgcactcttgccccttacacgtctagattcagttcttcgatacgcagggctggctcttccagagagactggagtcacagcagcaggtaccaccccacacctgacaagaggtggccagggaggaagggagggttcttacctccccatctcccctcagtaaaattcaggatgcccagtgaagtttgaatgtcagataaacaatttgttagtataaggatgtatctagcattgaaatgatgccttgtaatttactaaatctgcaactatgcagccttatttcatggcgggcagtggtggtgatcccaggtttcaggggcggggaagggtgctggggggatcctgaggtcaggaacccgtacacctctgcttctgccctctcttccctgtgccggccacaaggcaatgactcctgtgtgggtgcagaggcagaaatgggtctggaaggggattcccagtgtctggcaagttctggtaaattctgcattggaggttctctctgtagtaaggggagttggcctggcctgaagtgaaagctggcttacccggtttcattgagctcttcaattagtctgtttgcactggtgagcattcaaatctgatcaagaaggtaaaatgagctttcaagatccctaaatgcatttgaagaaaggaaagaggaggcccctgagtggctggagcgagcaggtggggtgagctggtgccgctggcccaggagaagatgggagggcagacactgggcctccggtaggtgtcaaggaatgggcagatggaatgctggggccagctcttgcctctgggtctgcagaatgcagagctgggggcatgcactgggcgtcaggtccccagcagggcagcagtgagtgcagcctcgctgctgggagaaactgccctgctcactcatcggagctcggggagcgaggcggggctgctcttagccctgccactaagttcatccacaacctcgagtagtatctctgggcctttgttcacctggcaaatgtgatgagtatattgcatttcccttatggctccccttagttctgaatctctgctggtgcgtgtataccttcaagccttctcattattgctgttctctgtgcactggccaggcaagcgggctggcaaccacgtttcgttaaccacctttattctacccaaagattgcttcttcattttccctccgtgtttcccccgtccaagcaaaatatcaaacctcttttttcaaagggtcatagtcaaatgagtgaaccaaagagatcaacgcttttgtaacagccccacatcagcagctgaggagtaactctgggacagaggcccccatccgtgtttccgtctccgtccactctccagttgttcattcattcactcagcaagtacttactgagctcaggggatgcatcagaccgattggagctggaggcaggaaaacttcagcagaattacaaaatatgggaaactccaggtgactggaggcctggttactcaagctttttgcttctcccttctgtgctggactcgctgaagtttagtgttcagccacccgtccatcaagtggtagaggcaaaatgaaattgagttcttgtcaacagtttcagtgaaaggccggaagtcttggctaaatggaggtatctgagtatcctgtgggctgcacctctatggagctccacagagctccaagaccacatagaattggaactggctccttctgccgataatacaaacagccctctgggatgtccttctctgacttacctcttccctgctctctgtccacagggctgcccttgagatggagttgctgcctctttggctctgcctgggttttcacttcctgaccgtgggctggaggaacagaagcggaacagccacagcagcctcccaaggagtctgcaagttggtgagtttcccttgaaccctgatctgtcggctgctcctgtcctgacaaggcttggtccatttggaaagctgacagattgtccatcaggaagggcagagaatgaaggagcctgcatcactctgtgcctgcctagcacaggggcatgtgcagctgccctttaaccacaggattttaagatgcttcctgggaagagccaggcagtccctgccccgccgttctcacgcctgctgaggataggaggcatccgagaccagcctagggcatcctcccggaacaagaacaacttgttaaaaatctggatgattcaggccgggtgcagtggctcaggcctgtaatcccagcactttaggaggccgaggcaggcagatcacttgagcccaggagttggagactagcctgggcaacatgatgaaaccacatctctacaaaatacaagaatcagtcaggtgcggtggcacacacctatagtcccagctacttgggaggctgagatgtgagggtggcttgagcccaggaagtggaggttgcagtgagctgagatcatgcccctgcactccaacctaggtgatggggccagaccttgtctttaaaaaaaaaaaaaaaaaagccaggcgcggtggctcacgcctgtcatcccagtacttagggaggccaagtccggcggatcacctgaggtcaggagttcgagactagcctggccaacatggtgaaaccccgtctctactaaaaatacaaaaattagctgggcgtggtggtgcatgcctgtaattccagctacttgggaagctgaaggaggagaatcgcttgaacccgggagacggaggttgcagtgagccgagatcacacccctgcactccatcctgggcgacagagtgagactctctcaaaaaaagaaaaaaacaaaacaaaacaaaaaactggatgactgagctgcaccgatggtatgagaatctccgggtgaggtgcttgagagctggagaagcctgcctcggagtttgtggacgagttgaccgctaaggcttacacagctgcggggaggacttgctgccatgccactctgcagagcggcagcccggaccacgctcaggctaagaagacccggagcgtggatacccaagcctcctctagggctttcagcctagatgtgaaaatagacttgggtccaaactgagaaatttccagtaattttccccttcatctatataacaatgatatcaaaagtctgctcaagaaacacatatttaggccaggtgcatggctcacgcctgtcatcccagcactttgggaggccgaggcgggcagatcacaaggtcaagaggtcgagaccagcctggccaacatagtaaaaacccgtctctactaaaaatacaaaaattacccaggcatggtggcacatgcttgtagtcccagctactcgggaggctgaggaagattgcttgaacctgggaggcagaggttgcagtgagctgacatcgtgccactgcactccagcctgggtgacagagtgatactccatctcaaaaaagaaaaaaaaaatgaaacacatatttaataaacatttcttgagccatattatatactaggcgttgggaagacaaattggatgtcagggctaacacttacattcaagtatgtattcttaaagcatagctgtcatggtttttaacctcttttagtaggaacctataaccactgtgctagagtctattccaatatgacatagaggttacaagctagactggcctggtttaaacccagccccacccttagctggtgacattggggtcactctaggtcatagtttctccatctgtagaatatatacgtaataataatatctaccaataacatcatgctgtgttgactgatgattaaatgggttaatacatgtaaagcactcaggacagtgcctggtaggtagtcagtgctacgcgttttatccgttatcactcatattattattaatctctgctatgtttgacctccagcattctcttacagaggcaataaaggattaactacacagtagttattcaggggttaccaggcacaggaagaggagagataaatgaacagcctttcagagttcaggcaaggccctctgcttgacactttctggcccagtgggcaggagtagagaattggctgccaggaagcccaaagagtgggtttcctgtggctcttccgagttgaggactgagaattggagagtctgggtgccctccactggccctcatcacattatccatttgaccttattagaaagtggacgttggccaggtgcggtggctcccgcctgtaatctcagcactttgggaggccgaagcaggcagatcacctgaggtcaggagtttgagaccagcctgaccaacatggtgaaagcccgtctctactaaaaatacaaaaattagccaggcatggtgacgggcacctgtgatctcagctactcaggaggctgaggcaggcgaatcgcttgaaccagggaggccgaggttgcagtgagctgagatcgcgccactgcactccagcctgggcgacagagcaagactccgtatcaaaaaaaaaaaaaagaaaaagaaagtggacatggtaagcttttctgggatggccatatggtccttctacatcacttcagcggggccacagggaattgcagaggtgtgacccacgactgcagcagctgtggtggaacagcaccccatagcgtgaagaaagcccctgaccacaacattctccagtgagtccacacgcagggaggagcgcaacacccactcacataaagacacacacctggccgggcgcggtggctcacacctgtaatcccagcacttggggaggccaaggcaggtggatcacccgaggtcagggtggccaacatggcaaaactctgcctctactaaaaatacaaaattagcccggtgtggtggtgtgagtctgtaatcccagctacgtgggaggctaaggcagcagaatcgcttgaacccggcaggcagaggttgcagcaagcagagatggcgccattgcactccagcctggacgacaagagtgagactctgtctcaaaaaaaaaaaaaaaagataaaaattctcttccagagtactttgtaattataatgcaatcccaatcaaaataccaaagagggaagggggatgtggaaagaacttggcaaatcctttctaacgttcgtctggaaattagagaaacccaaatgctcaacaataggagatgattaattagatcatcctaataattatagctcacatttattaagcacagtaaatgtgtttcacctcaacagtcacacttgatcctgaaaaaaaacgctatgcgaaaatgacgagtataatttcggttttacaggcagggtaatggaggtctctttcggttccgtaaccatccaaaggtcacccatttgatcaaaagcagagccacgaagcattggccctggaactcttgctctcagccactgtgctattcatgagatgaatgcatatgcttcctaaaaagattatgatcacatttatttgtactgccaaggcaataagtccgtcatactttattgacagggggagaaaaataggttactgaacagtttgcacagtatggtcttatttttgttttttagacaaaggtaggtaatatcttacgaaagatccagaaagacatggaacagaaggtgactggtgtttctctgagagagaggcggaggtgacagaagagttgaggtttccatatgtcaatacagtatcaatgtttaattattggaaggttttattttaattatcagataaagaacccgaggggccaagaaattccactgctagtggtggtagagccgagattcagattgagtctgtcctccaaacctgtgcttcttctaacctctctctcgggattttcctcttctgttgccgtgctgcacttgccctctgggattgaacccacaattgtaggcaaccactgcccttgtattactgatgaacttgtgcaaacgaatgccattgctcctctatcttatcacttaaaacttctttctggccgggcacggtggctcacgcctgtaatcccagcacttttgggaggccgaggcaggcagatcacctgaagtcaggagttcgagaccagcctggtcaacatggtgaaaccccgtctctactaaaaatacaaaaaaagttagctgggcgtggtggcatgtgcctgtaatcccagctactcgggaggctgaaacaggagaattgctcgaacccaggaggcagagattgcagtgagctgagatcacaccattgcactccagcctgggtgacagggtaagacttcatctcaaaaaaacaaaaaacaaaaaaaccatttttgtcctagacacctaaataacatcctatggctgatggttgtttttgccaattttgcaaagcgtggggtgaattaaagtatcctgcacgtgtgctttctgcagtgcgaccagggtggcctcgtccctcccgcctccttattctgcatgatcagagtagagccctgtttaggaaaagcactgaactgggcattcagagccctgggctccagtcccggcacagccactggctcttcacttctcccctccagacccactttacttccctgtacaattcaggatggtgaaagctctcaagtccttttttttttttttttttttttgagatggagtcttgctctgtcgcccaggctggagtgcagtggtgcagtggtgcagtctcggctcactgcaatctctgcctcctgggttcaagcaattctctgcctcagcctccggagtagctgggattacaggtgtccaccaccacacccggctagttttttgtatttcctgtagagacaggacctcaccatgttggccaggctggttttgaactcctgacctcaagtgatccacctgcctcggcctcccaaagtgctgggattacaggcatgaaccaccgtgcccggccttgtctatcctatttttaaaatgaacatctctagagccatccccggcggttgcagggacagtctgataagtgaactaagtttctatgcataaatgcttgcctctgggcctcctcgctgctgaccggtgtggttttggccgcaggtgggtggagccgctgactgccgagggcagagcctcgcttcggtgcccagcagcctcccgccccacgcccggatgctcaccctggatgccaaccctctcaagaccctgtggaatcactccctccagccttaccctctcctggagagcctcagcctgcacagctgccacctggagcgcatcagccgcggcgccttccaggagcaaggtcacctgcgcagcctggtcctgggggacaactgcctctcagagaactacgaagagacggcagccgccctccacgccctgccgggcctgcggaggctggacttgtcaggaaacgccctgacggaggacatggcagccctcatgctccagaacctctcctcgctgcggtccgtgtccctggcggggaacaccatcatgcggctggacgactccgtcttcgagggcctggagcgtctccgggagctggatctgcagaggaactacatcttcgagatcgagggcggcgctttcgacggcctggctgagctgaggcacctcaacctggccttcaacaacctcccctgcatcgtggacttcgggctcacgcggctgcgggtcctcaacgtcagctacaacgtcctggagtggttcctcgcgaccgggggagaggctgccttcgagctggagacgctggacctgtctcacaaccagctgctgttcttcccgctgctgccccagtacagcaagttgcggaccctcctgctgcgcgacaacaacatgggcttctaccgggacctgtacaacacctcgtcgccgagggagatggtggcccagttcctcctcgtggacggcaacgtgaccaacatcaccaccgtcagcctctgggaagaattctcctccagcgacctcgcagatctccgcttcctggacatgagccagaaccagttccagtacctgccagacggcttcctgaggaaaatgccttccctctcccacctgaacctccaccagaattgcctgatgacgcttcacattcgggagcacgagccccccggagcgctcaccgagctggacctgagccacaaccagctgtcggagctgcacctggctccggggctggccagctgcctgggcagcctgcgcttgttcaacctgagctccaaccagctcctgggcgtcccccctggcctcttcgccaatgctaggaacatcactacacttgacatgagccacaatcagatctcactttgtcccctgccagctgcctcggaccgggtgggcccccctagctgtgtggatttcaggaatatggcatctttaaggagcctgtctctggagggctgtggcctgggggcattgccagactgcccattccaagggacctccctgacctacttagacctctcaagcaactggggggttctgaatgggagcctcgccccactccaggatgttgcccccatgttacaggtcctgtctctcaggaacatgggcctccactccagctttatggcgttggacttctctgggtttgggaatctcagggacttagatctgtcggggaattgcttgaccaccttcccaaggtttgggggcagcctggccctggagaccctggatctccgtagaaactcgctcacagcccttccccagaaggctgtgtctgagcagctctcgagaggtctgcggaccatctacctcagtcagaatccatatgactgctgtggggtggatggctggggggccctgcagcatgggcagacggtggccgactgggccatggtcacctgcaacctctcctccaagatcatccgcgtgacggagctgcccggaggtgtgcctcgggactgcaagtgggagcggctggacctgggcctgctctacctcgtgctcatcctccccagctgcctcaccctgctggtggcctgcactgtcatcgtcctcacttttaagaagcctctgcttcaggtcatcaagagccgctgccactggtcctccgtttactgacctggctgtgtgccaagactcgaaattcggtccgcacacaacaggacactttctctgccagctttcaagatgtgatgcagaggccaagtctgacgaattgaagtttcaattaaaatttaatatgtttccattcctcatcgcccaccccacccccgcccccaccaccgcccaagttctttttccatcattataattcatcctcattatcttggtaaaatatttattaagtgactttttcagaaataaaaggcaacgtgtctcataaatattttttaaattaaatgcagcttgtgtttttttttattgttccttggtttcccttggattattttgtagtgtcctccccttggtgacatccatggagccgagggtagcaattcaatgcaacctactggaaaaagaactccaagagcaggtgctagagatggtgagtcagtgccctggggactcaacagggacaaggatttcatagcaggacgacgacaacaaagcatttcaaagcacagctggagggtctgacataagatcataagatgaggcctctcacctgctgcgtgactggccaccgccgtcagaacggtcctgtgatcctagcactttgggaggctgaggcgggtcacctgaggtcaggagttcgagaccagcttggcgaacatggtgaaaccccgtctctactaaaaatacagaaattagccgggtgtggtggcgggcgcctgtaatcccagctacttgggaggctgagacaggagaattgcttgaacccaggaggcggaggttgcagtgaaccgagatcacaccactgcaccccagcctgggcgatggagcaagaccccgtctcaaaaaataaacaaataaataaaataatggacctctagctgggccctctccaggtgccctggcttcatacccggagtctctggcagacagacatgactcttccatggagaaaccaagagaataataactggccccgagtttatccagtcagtaagccgactgccagagacagtcctcgttctgaagggaagtaaagaggaatgcagaaaggaatgaattctgctcacttgtgaaccctcctaactcttcacaaaaaattgcttacaacttcatagcagatgttcagtatctgtattcactagattcttagcttcccttctccctctgttcaatgactaacgaacaatgtctgtgctcctctctgagagaaaagataacaaggacacagcccccgtcctctggtagtttagaatttacactgtcctcaaagtttttaatccctgcttactaaatcataaaggaattaaacgcaatgggggagggatggggagggagagaggctagaaatcccacaaactgatagctattaccatgcagactaactgtcagcagaaatatttaggcaaatcaaagagataaaatcagtggtcttactctgacacagcagaaacttcccttggatgctctacagaggtttgaacaaggccatctcaggccccacattcagtagcgttagcggcaggtcctgttaggctttgccatctcaggccccacattcagtagcgttagcggcaggtcctgttgggctttgcccttgctatgaccccaccgttccctcctgcactgcgcccagcctagtgtcgtggatgtctctcaggttgccttgaagccttccgggcaagtcccatcagccaacgcaacatcagaccagactctcctgatttcctctccccatcaacaaaacccttctctggggtcctgctgtttcctaatgtgaacactagctaattagacaaatgcatctatctgtggctggtgcactgacggcttctcttgagttaatgcgtcacctctggtatccatcagtgttcttagtctcatgcaactgaagacggttctgtctgatttaagtagcttacgcatttagtaagagaatattagtaagctctggactctcgggaaggctgaggaacaggcttggaaaatgggcaggaacagaagatgctgtgtagcaattgggaccagctggtctcgaactcctgacctcagcccaaaccatgccatgagcagtaactgtgggagcatggctgcagccacccctgccaccttctgctgaaataaatgctccccaaattctgctgcatcgccagctcctgaccgtggtcatgtgcccctgccctgagtacaagaaggactggcacggcaatgctgtaccccttggcgaggtgtctatggcagaagataggctccgtgtcctccaaattcttatgagggggcagagttcttgaaacctaagaaaggaagtgagacgttgagcaaacaaaatgaatgaaaagtaagtcccgtatccttttatggctgcatgtacattttatttatttatttatttatttatttatttatttatttattagcctgagtctcgctttgttgcccaggctggagtgcagtggcgtgatctctgctcactgcaacctctgcctcccaggttcaagcgattctcctgcctcagcctcctgaatagctgggactacaggcgcccgccaccacacccagctaatttttgtatttttagtagagacacggtttcaccatgttggccaggctggtcttgaactcctggcctcagggtgatccgcccactgtggcctcccaaagtgttgggattacaggcgtgagccaccgcgcccaggcagcatgtacattttagcaggcaacttctggaagcaaattcttagcacaaagaaatgactcaaatgatggaaacttcagacagaaactcagggcagtcggggagatagtttggggttcagcaggacttttgaagcccctcaagtcacaccatgtagctgaccacccactctttctgttcttggggtccagcccgggaggatgacaaattgagccccagccctgcctgtgactgtgactttagaaggctgtgggctttccttcctagtgttttccatcacaaggatccaaaggtgatttcctgccgggtgcggtggctcatgcctataatcccagcactttgggaagctgaggtgggtggatcacctgaggtcaggagttcgagacccgcctggccaatatggtgaaaccccatctctactaaaaatacaaaaattagctgggcgtggtggcgtgtgcctgtagtcnnnnnnnnnnnnnnnnnnnngcgcaagcaagcaagctgtgtcactatcttcctgacactgcgtctggacaggcccaccctagcactgccaagttaatcagtggggttctagaatttctatataagagaggctagggctgggcctggtggctcatgcctgtaatcccagcactttgagaggctgaggtgggtggatcatctgaggtcaggagttcgagaccagcctgaccaacatggtgaaatcccgtctctagtaaaaatacaaaattagccgggcatggtggcgggcgcctgtaatcccagctactcaggaggctgaggaaggagaatcgcttgaacctgggaggtggaggttgcagtgagcagagatggcgccactgtagtccagcctggtcgacaagacaaaattccgtctcaaaaaaaaaaggatgattttctaggtttctctcagtatgcggaaagttacatagggaaggtgctttctgccttcagtgctcagctatggttcccccagcaaattctgtcccctttccctgcttctcccactccgacctggacccataggagaacctactggcgagggaaggacccacaaagcctgttaccagagttcttcggtggggccagaatggtgtctgcctaagagctcccattcagccaggtggggcaccacgtggttcttcctcagtgggtgggcagtagggggccatttccggttgccacatgccagaatattcacacaggaggatattcagaatcacagataaatcatgtcagagactggtctgtgaacatgagtaacagtaacttagattttggaaatccagtcataaaacaaaagctgaaggtttttctggaggcatttaagttagggatcaattgatttttttccgttctttctttttttgagatggagtcttgctctgtcacccaggctggagtgcaatggcgcaatctcggctcactgcaaactccgcctcccgggttcaagcgattctcctgcctcagcctcctgagtagctgggatgacaggtgcctgccaccacgcccagctaatttttgtatttttagtagagatggggtttcaccatgttggccaggctggcctcgaactcctgaccttgtgatccgcccgcctcggcctcccacagtgctgggatgacaggctgagccacggcgcctgctgatttctttttttaaacgaccccagttgcaagcaattggacaaactctaatccttggtttgtatcactggtcatatcactttttatttatttaatgtgccagataacttccatttgcccctccagatctacttcccactcttttccaccctgccccaggaggctggcctcaatgggctcccttgccctttggcttccagtggtatttggctaagaaggaggtttggcaaatcacaggggaggaagaaagtgaggtcagagtatttattctcctgactcctccctgtagatttgtctcaaactggctgcacctatcaaccaaactcacactcgtctcaaggcggctctttgcacacgaatctctgccttaggtatctaggaaccactcactcccctggctctcttctctgggcctagcatgggtaacagctctgcctcaccagctcgtgtaattgcattatcctttgcggtttgccctcccctctccaccgctttgtgaatcgtccctttgtaaatcctcctgacttgtccttgtttgaacgtgccatctggttcctgctgggtccctgcatgacgcagctggctactcatttagtaatcctgagcccgagagattccagcacttgtgtcagggagccacagagtgctaaggatgcgcggccagcgctaggaaagcaaatctcccgaagatggagtcccctgatttccatggagtccatgcgtggacatgaggaagaaggtggacatgaggaagatggcacgcctcagtgtgttacaaacatattcatattttacccaaattagagtgggagaagtttctagccttggagaccttctttaaaagagtgtgggtgttgcaatgaccaaagcaaacagatgatggagctggggaaaaaaaagtgttatttaaaaaaatccttctcggccgggtgcagtggctcatgcctataatcccagcactctggaaggctgaagcaggcggatcacctgaggtcaggagtttgagaccagcctgcccaacatggcgaaaccccgtctccactaaaaatacaaaaaattacccggcgtggtggcacatgcctgtaatcccagctactgcgggggctgaggcaggaggatctcttgaacccgggaggcggaggttgcattgagccaagatcgtgccactgcactccagcctgggtgacaagagcgaaactgtgtctcaaaaaaacaaaaacgaaaaacaaaaaaaaacacttctcaccaactagtcatcttctatttcatcctcatcaacaagtaccaagcacttattttgtgctaagtgctttatgtggataatttcgcttaatcttggagaaaactctaggctgagagcgcttaagatttgttcaaggtggctgggcgtgggggctcatgcctgtaatctcagcacttagggaggccatggtgggaggatcacttgagggtaggattttgagaccagcctgggcaacagagcaagaccccatctctacaaaaaaatagaaaaactagtcaggcatggtagcatgcgcctgcaggctcagctactcgagaggctgatcacttgagcccaggaggtggaagctgcagggagccacgatcgcaccatggcactccagcctgggcaatagaatgagaccctctctcaaaaaaaaaaaaaaaaaaaaaaaagatgatttgcccaagaactgtggtgaagatgttaacattacgcaaagaagagcaaacagcatcaacaacttgtcatctttatcaagtctatcagactgtcagccgatagtggttagtggctgcggaacagcacgtttgctaatgaaatggcagacgtggagaaggttcgtatggggtacaggtgacgaagcacatagtgatggaagatcactcacttccactgagactgttcaaaggcagcagcatgatgcagtgatagcttggaggtaattaacaacagaggaaccttactcaattccttcctccttcagccaagcaacatcttcctgctgaacagtcaggatcaaaggctgatgtagggggaccctggttttcaccatgattttaatggttcatggtgggtgtgggcactgattaggaaaaccatcttgccagggaggaaactgtttctgagataatcacctgatccaaatttttcaaacgtagaacccaattatagatgtcatttctctgggcctaggcaaagactgggcacagtggctcatgcctgtaatcccagcactttgggaggccgaggtgggtggatcacctgaggtcaggagttcgagaccagtctgaccaatatggtgaaaccccatctctactaaaaatacgaaaattagctaggcttggtggcgtgcccctgtagtcccagctactcgggaagctgagacaggataattgcttgaacctgggagacggaggttgcagtgagcagagatcatgccactgcactccagcctgggcgacagagcaagactgcgtcaaaaaaaaaaagagagagagagagaaagaaaaagaaagaaataaaagaaagaaagaaagaaggaaagaaagagaaagagagagagagagaaaagaaggaaggaaggaatgaaggaaggaaggaagaaaagcagaaagaaagattaggctaaataccaagatggactactcattcagagacttagtagttgttgaagcattgattcattcactccaggaccttgagagctcaagcagttggttcttgttctcagctttaccaagaatggtaggtggtggaaggatgagagccagctaaaccccaggaaagactggaagaggaggatcacaaggcacagaccttgactccccaaggagtcactctcaaattatacttctcagggctccttaaaaatggtcttctttaaggctgaggcaggtggattgcctgcggtcaggagttcgagacccgcctaggcaacatggtgaaacccccgtctctactaaaaatacaaaaattagccaggcgtggtggcgggctcctgtagtcccaactactaggaaggctgaggcatgagaattgcttgaactcgggaggcggaggttgcagtgagccgagagatcacgccattgcaccccagcctgggtgacagagtgagactcttgtctccaaaaaaaaaaaagggtcctctgtaattggtcccaagagcctctgtgactttcactcattcgggacacggcttttgttcaaggtcccatcttcctcccagtgcaatcggtgcaatgactgtcctcagcagctttttggaccttctgtccaaagtggtttcgtnnnnnnnnnnnnnnnnnnnngaggcaggagacttcaatcaaatacatttaagaaatgcattgcagccaggcacggtggctcacgcctgtaatcccagcattctaggaggctgaggcaggcggatcacaaggtcaagagatcgagaccatcctggccaacatggtgaaaccccgtctctactaaaaatacaaaaattagctgggcgtggtggggcacacctgtaatcccacctactcgggaggctgaggcaggagaattgcttgaacccaagaggcagaggttgttgtgagctgagatcctgccactgcactccagcctgggtgacagagttagactccatgtcaagaaaaattaaaaaaattaaaaacttgcatcatatttaaaactcttacccctgtacacactgagtttgcaaccagtattccctccctttgcttctttcaagggtgtttagcttataaatggcaacacagcaaaccattttacatataagaacatgcagagcaattctgacactaagtgagtctgtgtctcagtgactgattaaccctgattgatttgattgattaacccttagtaactttacataacagcatcttatcttgctgagactgagagaagtttcttgcatcatctcataatcttaagagagatggtattggcagatcacagttcaaaaccagtcttcccacagacctccaaaacctttgtctaggagaacatgggaaggtacacatacagccacatcaaatctcagtggggataaagctggcatggacactgcgggggcctgcacactgctaccccagtggggcctcccagtcattgagggagaagtggggccggcatggggagggcagagagagcaaggaggagggggagaggtcatgctctggaagatgggtgtgtgctctcttttccggctactgttttcagtgtggtaagcaaatcccttcagctgaatgccctggagaggaagcccagtgcttcctgttgtcttaccaacgctgtaaaatgcaagttagaaataaagcaaaaagggggaaaggggaaaaaaatgggaagctctcctggctagatcggaacgccagcctttaggaggaaactcagctcacttcttttccccggagatgcagaggaagaggcacacctcacatgtgagttgtttctcaaatcaatcaggattcagaaaataatctctctatataaaaagggcatttttggccgggctcggtggctcaagcctgtaacccttgcactttgggaggctgaggtgggaggatcacctgaggtcaagagtttgagaccagcctggccaacatggtgaaaccccatctctactaaaaacacaaaaatcagccgagtgtggtggtgcacacctgtggtcccagctactcgggaggctgaggcaggataatcgctggaactcgggaggcagaggttgtagtgatcagagatcgcaccactgcactccagcctgagtgacagagcaagattctgtctcaaaaaaaaaaaaaaaaagaaagaaagaaagaaaaagaaaaagaaaagacaagaaaaacagcagaataaacaacagagttgaaagtcttaaaaggatgactaaggagatatgtgtatgagatacagccaaagaaatacacccaccccctgtttaatgccctcaaaatccttccattctgtgagaatctaccccaagggtttgtagtgttggaaagaatcatttaaatatcagattttgtttgattgctttgctgctctgagcatcttagctgcctatgagatacttcatgagatgtagcagaaacatcctggcccccagggtagagtacacaggcagtcctgacaggtcacccggtattcatatacttatttatttatatcaccatcattaatatacatacattcatttatttttaacattaccatacagcttaccacttacgaaaatagcctctctttggctggcatttcactgacaaacttttttcttctattttcaaaaagccaatatagctccattcaaattttatttggccatttgccttccccacacccccttcttagataatgtctttgagaaatctgtgcgaaggactgtgtttaaaccgtcttctgctaatgacacctctcctgaaattttcagattatacaagaaacttctcttaaaagtttcaagcgaaccctgactttcttgatctagatttcttgaacaatatcatcttcctctactgcctgtgtttcactttgtagaacatccttcctctgaaagagcgataacaacaacaaaaattccactttgatcgtaacagtcgattagaaaaggaaatgcccttcaattctctaacttttcaaaaatgtcacatgctttcggccgggtgcagtggctcacgcctgtaatcccagcactttgggaggctgagacgggcggatcacgaggtcaggagatcgagaccatcctggctaacatggtgaaaccccgtccctactaaaaaatacaaaaaattagccgggcgtggtggtggatgcctgtaatcccagctactcgggaggctgaagcaggagaatggcgtgaacccgggaggcggagcttgcagtgagccgagatcgcgccactgcgctccagcctgggcgacaaagtgagactcgtttctccaaaaaaaaaaaaaaaaaaaaaaaaaaaagtcatgctttccttttgaatgcaagtcagtgttgcctccccagctccgcttcctacagttgtcctaacaggaaactaatttttcttcttttatttctttatggccactgtcctgatttaatttattatttttaacttttgtgggtacagaaaagtgtatttatttatggggtacatgagatattttgatacgggtacacaatgtataataatcacatcagggtaaatggggtacccattacctcaagcatttatcttttctttgtgttacaaacaatccaaatatactcctttaggtatttaaaaatatacagtaaattactgttgactgtagtcactctattttgctattaaatactagattttattcattcattcttttttttcccctgagacagggtctcgctctgtcatccaggctgaagcacagtggccggatctcggctcactgccttctcaacttcctcggctcaaatgattctcccacctcagcctcctgggtactgggattacaggcgtgcaccagcacgcccggctaatattttttatttatttttatttttttcaagacgaagtctcactctgtcgcccaggctggagtgcagtggctcaatccggactcactgcaacctccgcctcctgggttcaagcgattcccctgcctcagtctcacgagtagctgggattacaggtgcccgccaccatgtcaggctcatttttgtatttttagtaaagaaaaggtttcaccatgttggccaggctggtcttaaactcccaaccgcaggcaatctgcccacctcggcctcccaaagtgctgggattacaggcgttagccacggagcccggccattttttaaattttttgtagagatggcgtctcactatgttgcccaggatggtcttgaacttctaggctcaatcattctcccaaattggcttcccacagcgctagtagcataagcccctgcacccagcccattgtttctttttctctcttttttttttttttgagacagagtttttctcctgttgctcaggctggaaggcaatggcgcgatcttggctcactgcaaccactgcctcccaggttcaaacgattctcctgcctcagcctcccgagtagctgggatgacaggcatgcgccaccgtgcctggctaattttgtatttttagtagaaatggggtttcaccatgttggtcaggctggtctcaaattcctgacctcatgtgatcagcccacctcggcttcccaaagtgctgggattgcaggtgtgagccaccgcgcctgctccattgtttgtaactgtatttttgtacccattaactatcccagttctctctgaccaatcaccctttccagcctctggaaaccatcattctactctatatctccggggattcaactgttttactatttttagctcccacaaataaatgaaaacgtgaagtttgtctttttgtacttggcttatttgacttaacacaatgacctccagttccatccatactgtggcaaatgacaggatctcattctttttcttggctgaatagtactccattgtctatatggaccagtttctttatccattcatcttttgatggatacttaggttgcttccaaatcttggctattgtgaatagtgctgcaataaacatgggagggcaggtatctcttcgatatacagatttcctttcttttgggtatatacctagcagtgggattgatggatcagatgctagctctatttttagtttttgtttgtgtgttttgagacagggtctcaccctgtcgcccaggctagagtgcagtggcatgagctcggctccctgcagcctgaaactcccgtgctcaagcgatcctctcacctcagcctcccaagtaggtgggactacaggcatccgctaccatgccctgctaattttttgtatattttgtatatatatatgtatatgtatatgtatatatgtatatatagagaacgagcgatggagtttcgatcttgtttccctggctggagtgcaatggcatgacctcggctcattgcaacctccgcctcccgagttcaagtgattctcctgcctcagcctcctgaggagctgggattacaggcatgcgccaccctgcccggctaattttgtatttttagtagagatggggtttcaccacgttggtcaggctggtcttgaactcctgatctcaggtgatccgcccacctcggcctcccaaagtgctgggattacaggcatgagccactggcactcggccccaaaatacttttttttaaaagttacgtttaaaaataaaagaactctttgcataacgcatgtgttcacaaataagaaagtggcatatattaattcagtggctgaaatataattctgcgtatgaaagtacaaagtcttttttaaaatgtgctttatttacttttgattgctagtgcttctactgaggctctcatggtgggcgcagttctgcagctattcacctttctatgggtattttgggtctcccactctcctccctgtcaaccctgctccagcacccagcaggtaggacatccttgttcatactttcaaagtttatttagaccaacagtgaaatactttaacaactcagtttttttttctttcaatggctattaactctagtagtctcctctttttggcatttaaaatcttataaataggcacaatttgtttctcaggcttcaaaggaagaaaagagctgatacttgcttgagcagctcagcctctggtgactgccatcaaattccattagcccatcattgaatttatcgtcttttcccttcctgacttatttaatcttttttttctcccaatttgtacccactcagtcctttttcatttcattttcaagtgtccttcttgggtgtatttttgtgagttcatgaacaaattttacttcttttggggggcttagttttccaatgttgatttcttagcttgtgaatctctccacagtccttgcaaaatgttgtacttactggccgggcgcggtggctcccgcctgtaatcgcagcactttgggaggccgaggcgggcggatcacgaggtcaggagatcgagaccatcctggctaacacggtgaaaccccgtctctactaaaaatacaaaaaattagccgggcatgttggcacgcgcctgtagtcccggccactcgggaggctgaggcaggagaatggcgggaacccgggaggcagagcttgcagtgagccgagatcgcaccactgcactccagcctgggcgacagagcaagactccgtctcaaaaaaaaaaaaaaaagtttcacttactgttgtttacttttgtagtttgtggggttttttgcttgtttgtttgcttgttttgagacggagtcttcttccgtcaccaggctggaatccagtggcgcgatctcggctcactgcaagctccgcctcccgggttcccgccattctcctgcctcagcctcccgagtggccgggactacaggcgcccgccaccgcgcccggctaattttttgtatttttagtagagacggggtttcaccatgttgaccagcctcgtcttgaactcctgacctcaggtgatccgcccacctcggcctcccaaagtgctgggatgacaggcgtgagccaccacctggccgagtttgcggttttcatcactcagtcacttgaggagctgtattcccggcgcgtggtatccaagatggcgaccgccacggcttctttgttaagccttaagcggtacctgggttttgatgttgtgaggtttgttcattctcagagggcattttaatgttgcgttactactatgttgccatgttactgggattcaatgttaaattctagatcctgtttaatttttggtagtagatgacagggctcatcaccttttttgagatgatggagtatagcctactttgggaacttgtatcaagagagggagggttgctggttgaatggtatcaatcctttaagtcatcgccagttcacaatttctatcttcctgtggaacatactgtttttcccaatcccaagaagccttttgctagatacatgatttttaaaaatcaacgttttttgttttttttttgagacggagtcttgctctgtcgcccaggctggagtgcagtggcgcgatctcggctcactgcaagctccgcctcccgggtccaagtgattctcctgcctcagcctcccaagtagctggaactgcaggcgcccatcaccacgcccggctaattttttgtgtttttagtagagacggggtttcgccatgttagccaggatggtctcgatctcctgacctcgtgatttgcctgccttggcctcccaaagtgctgggattacaggcgggagccaccgcgcccggccccgtttttattttttattgttgttaagttttccactgtcagttcctgagcttccgcaggtggaaaggtaggtcagcctgcggtctggctgttgcatccactctgaggttactcaaggtggaggagcagcaccagaataacagagatggctttctactgggcgttagcactgaggttacagtcccaggttgactctaacgaaacatgcccttgacctaagcattgccctcctgggcttcactttcctcacctacaaaataaggaggttgaactagataatttctactgtttcctgcaagtctaatgttctgtgattctaagagctttctgttagattatctgagtgaattagacagatattagaaatatttataaataaaatatcgattgtaaataaaattagaaagagtgggaggggtcagcttagttaagaaagggagcaatgtggaggtgtttggtttgcccgtggcccagaggtgatgaggaagcagccttcccttcctgtccccacaacctttatctgattgtttataactgtgagcttccagtctgtgagaacacctatgtggattttgtttgttatcactgagggtttcagctaactcatagccacaaagtcattggactattggacttagagggctattgagccctctaagatgggtatgtctcagctctctttctcatccaggtgccagcacctacctgtgagatactgaccaggaatctctttcctaacacccctaaaataggctggaatctgccccccacccctcaagccagctgacagcaacatcaggacaagtttagatgttactaagctgacaaagggcactctgcttgggaactgcccactggtttcttggtatcaataaactagagcttcaccacccacccccacatcctcaaatctgatgtcctaatcagggaattacagctcggtcttcccttatgatttcaacatcataaaccttttaggtctgttcacttctagaaagatgcatttatttgcttgaggcttatttaaagtccaaatacacagaaatcttactccttgtttgagcaaatccctaagacattcatttattcagcaaatatttaccaagctgctgctctgtgccaggcactgcttagctctggggatacatacaaagctatatttttaattcattggttgtcacttacaagttacttttcttcacttccatcccccatccctccactgttcttgactcccccaagtatcctgagagctgagtgctgaactactcccgtcagcactgggtcaaggttctctgtgctgcatttggacaatgacaagaagggtgtgtggcatatgtatcatataagctgttttctgtgtcttcatttttcttaatttaatgtgctcctgaaagaggaatcagtttctcttcctgtgtcacccatgcatttgccacatactataacacaataggccatttctgttcttagtctcaaagctggatgacacagaacatcagtttgccacatatctaatcatccaacagacacattagtccagactctgggctcagaatctcaaagaaactagaaaacaagtaattttggcttagccctagtgccagtcagttgcctctttactttcagatcccttctccaccctttcctgttttgctctgtatccatccatactgatataaataaatgtctaaataaattaataagtgggaaagaagaattataaataatgtgtgtagattctttccattctaggaagtgaatcttatcctcctctgctgccctccctcaactttggagtgtggttggacttagtgatgtacttccaaaaaataaaatatggagaggcaaaaatagtaacgtcacagtaaagcaacctggcagatactacttgaaccgagtgatgaaggttaacatcaccaatggtgtcatgcaagtagtatgtaccccttgatacgatgtgatgagaacggcacatcacctctggtattccttccaataacccatcaccccagtcctataatgagaaaaatacaagacaacccaatctgaaatacattctacaaaatatctgaccagtcctcttcaaaactatcaaggtcatgaaacacaaggaaagcctaagaaagtaataactaatcacaatacagtattctggattggatcctggaagaaacaaagatcactaatgaaaatatctggtgaactatgagtaaagtctggagtttattaatagcaatgtatcaatgttgttttcttagttttgacaaatgtattggataaacaaattgggtgagaggtatatggaaacgttttgtagtatcttcagaactttgctgtgactctgaaattattctaaaacaaaaaaattttagtaaactctcaagaggaaaaaaatgaattaccaatgtcaggaattaaaatgagaatattgctacagaccctacaacaatagaagataatacgatgttgtaactatctttgcacaataatttgaataatttagatgaaatcagcagaggctttggaaaatacaagtaaataaatatgagatgagaagaaagaataaaatctgaatagtcctgtaggttagatttgtaattaaaaccgttctacaaagaaaactccatgtccagatggctttactagtgaatgactcaaaatattgaagaaagaaaaatattaatattcttcagaaattttttaaaacgatagaggttcatgaccaacatggtgaaacgccatctctcctaaaaatacaaaaattagctaggtatggtggctcatgcctataatcccagctactcggaaggctgaggtaggagaattgcttgaacctgggagacggaggttgcagtgagctgagatcgcgccactgcactccagcctgggcgacagagcaagactctgtctcaaaaaagaaaaaaaaaaggaaaagttaatatattccaacatgttttatgaggtgggcaaaatcctgatatcgagactcaaaaccagacattgcaaaaagagaaaattgttggacgacctctttaatgagcttggatataaatattctcaacaaaatattaacaaagcaaatctggcaatataccccaaaaagacttcacaccttgctcagtaatgccaggtttattctagtaatgcaagattagtataacatttgaaagtcaatcaacacaaattttacatgaacagactaaaagaataatcatgtaatcatctcaatatgcaaaaaagcacctgaaaaaattcaatacctgttaatgtaataacactcaggaaaccaataatagaagattttttaattcattaaatagtatccatctgtgccaggtgcggtggctcatacctgtaatcccagcactttgggaggctgaggcaggtggatcatgaggtcaggagttcaagagcagcctgaccaagatggtgaaactctgtctctactaaaaatacaaaaattagtcgggcgtggtggggggcacctgtaatcccagctactcaggaggctgaggcaggagaatcacttgaacccaggaggcagaggttgcagtgagccaagatcatgccactgaactccagcctgggcaacagagcaagactccatctcaaataataataataaaatagtatccacctgcaaaaggtttttgcgaaatactgcaaaaatagtatccatctgcaaaaagcactttttgcagaacttttctgtgactctgaacttttccgtgactctgaaattattctaaaacacaagaacattttaattaggtataggtatcatcaaactgaatgctgaaatattgaatacttccccctgacatcagaaacatggtaatgatatgtaccatcaccaccaatacccaacagtgtactggaggttctagccattactgtcaagaaagggggggaaggaataaaaactggaaagcaaaatacctgtcattattcacaaatgacgtgacgacatacatagaaagtctgaaagaatctgcaaataaatgatgcgatttcacagatgaatttagcacagttgctagaaggaaggtcagtatacaaaaaccaactgtatttgtacatgcttctacaatcaactagaaaataaaaatctttaagacaccatttatactaacacccagcaattccattcctagtacttatccaaggaaaatgaatcccccaaaagacatgtacacacttttagcagctttatcacagtaataaaaaactgacaaccacctaaaagcccatccacagagggctgaatcaccaaactgtaatatattcatatatagaaataccacacagcaatacaaaagagaaagtaccattttatgccacagagtcaatgaatctcactgccccacgttgagcagagaaaccagatgccaaaaagtatatactgtttttgttttgtttttgtcttattagtagagacggggtttcagcatcttggccaggctggtcttgaactcctgacctcatgatccacccgcctcggcctcccaaagtgctgggattacaagcgtgagccaccgcgcctggccaagtatatactgttttattcaattacattcaagatgacgaaagcaatctaaggtggtagaagttacagtggttcacccttttgggggtttggtattgacaaggaaggggatgaggcagccttttggaggtgctggagacgtgtgctggtgcccacaggggtgtacatctgtgtcaacgttcattgaactgtacacttcaaattgatgcactttgctgtacgtccgttaaataaaaatgactatggaataatcgcaaccaatctagacaatgataatactgtagacagcatatgacgaaagcctggtccaaagcacctgaggagggggatcgtaatgtctgagactgactcttcaggacttagaatctccttagaaagaaagataagtgtaaaagttaccaccctataatgatgacatagattttttttctttgcaattttatctttttttttttttttttgagatggagtttcactgttgttgcccaggctggagtgcaatggcacaatctcggctcaccgcaacctccgcctcccaggttcaaacgattctcctgcctcagcttcctgagtatctgggattacaggcatgcaccaccacgcctggctaattttgtatttttagtagagacggagtttcaccatgttggtcaggctcaaactcccgacctcagatgattcgcccacctcagcctcccaaagtgctgggattacaggtgtgagccaccgtgcccagcccttatattttaaaggatattgttgttttacgcattttgtatcagtcgttttcaaaaagtgaattgcctatgtgttactatctagcttggaaaaacttgcaggtctctttagcaaacacacattgtgtggaaaacacgctactctctgtgagaaagccagaaaggagcctcaggaaatgaacctgtaaattaaagaaaggagggagatgtttcctccagctagtgggaaacctggagagaggacagaggtgactcttccccaactcccacacctggacttttccctcacggaggaaggaaggagatgcaggtatatttgctggagggattttctctgaagtgggatgtaaacaaaatactgtgaaaccaacttaaggcaatttgtccgtttataatcgttggtagataacagatgaggtccacagatgtcctgacccaaacatcatggcatgatggaagcaagtctcagcccagatagagccatatgcacatcatgtttactatcaggcaggtacaggaacagttttcaaatgtgttctgtgtacttgacgaagccccagatctccgaccttttcggtactactccatttcacttgacacaaatgaaacgctagtctccagtgaggatccagctagcctcttgtcaaactcaaagggccaagactatttttttttgaaacagagtcttgctctgttgtccaggctggagtgcaatggcatgatctcggctcactgcaacctccaccttccaggttcaagcgattctcctgcctcagcctcccgagtagctgggattacaggtgcacaccaccactcctggctaattttttttgtattttcagtagagacagggtttctccatgttggtcaggccggtctcgaactcccgaccttgggtgatctgcccgcctcggcttcccgaagtgctgagattacaggcatgagccactgtgcccagcccagaaaggttttcttttcttttctttttctttttttttttttttttgagacagagtctccctctgtcacccaggctgcagtgcagtggcgcgatctcggctcactgcaacctctgctaccaggggacctgccccgataatcacgtacgttcttttctcgtttccctaagcgtccgccggcttgagaaataaagggacagagtacaaaagagagaaattttaaagccgggcatctggggaagacatcacatgtcggtaggttccgtgatgccccacaagccacaaaaaccagcaagtttttattagggattttcaaaaggggagggagtgtgcgaataggtgtgggtcacagacatcaagtatttaacagggtaatagaatatcacaaggcaagtggaggaagggcgagatcacaggaccacaggaccaaagtgaaattaaaattgctaatgaagtttcgggcaccattgtcattgataacatcttatcaggagacaggcttttgagatcaactggtctgaccaaaatttattaggcgggaatttcctcttcctaataagcctgagagcgctatgggagactggagtttatttcatccctacagtctcgaccatagaagatggccacacctaagggggccacaccgaagggggccatttatagacccaccctcaggggtgcattctctttctcagggatgtcccatgctgagaaaaagaattcagcgatatttctgccatttgcttttgaaagaagagaaatatggctgtgttctgccctgctcacatgtggtcagagtttaaggttatctctcttgttccctgaacaattgctgttatcctgttcttttttcaaggtgcccacatttcatattgctcaaacacacatgctgtacaatttgtgcagttaatgcaattattacagggtcctgaggtgacatacatcctcctcagctgacaggattaagagattaaagtaaagacaggcataggaaatcacaagggtattgattggggaagtgataagtgtccatgaaatcttcacaatttatgtttagagattgcagtaaagataggcataagaaattacaaaagtattaatttggggaactaataaatgtccataaaatcttcacaatccacgttcttctgtcatggcttcagctggtgacttcctgcaacactccgcctcccgggttcaagtgattctcctgcctcagcctccccagtagctgggactacaggcacccgccaccacgcccggctaattttttgtattttcagtagagacggggtttcaccatgttggccaggctggtctcgatctcctgacctcatgatccacccgcctcggcctcccaaagtgctgggattacaggcttgagccaccgcgcctggccaaggttttcttaatggagggacataaagtcgatattagtcgaaaggggcaagtccccctcttttacaatggacacagagctgaaaagactatgagtgacaaaaactggtgataagtgaaacacaaaacaggaaaatagaaggagttacagtaacattgtttgaagtgttttgtttttgtttgagacggagtcttgctctgtcacccaggctggagtgcagtggtgcgatctcggctcactgcaacctccatctcccgggttcaagcgattctcctgcctcagcctcctgagtggctgggattacaggtgttcaccacaatgcctgtatttttgtatttttagtagagatggggtttcaccacggtggccaggttggtctcgaactcctgacctcaggtgatccgcctgcctcggccttccaaagtgttgtgatcacaggcgtgagccaccgcgcctggcctgtttgaagttttcttaatgtattgcatttaatcaaagaggattgtaaaatgtttttaaactcaggtgagctctgaaagtgcctagtccttgtatttacccaaaccagtgtttaactcctgccactgccactcacaaaatgctggattgcctaccacttacttcactctgctccttggtttcttaatctgtataataggatcagaaattcttctgtgaggaaattcggaaaggaaaacccaaacgtagcagagacaatggacattggcacccttctgccccctggtggtaatttttagaaccatgtgggcagtggcgaggctaaaaataaaatgtgcaaagtgtaaaacaaaaaccacgcagtgtcttccttgtcatgcacagccgcgttcgaatcgctcattgtcttgcctcctcagtgctttctcccgcccacgactatcagtggtccaaccacacattgcaggaagttccaggagtcatccacttaccctagagcaagcttgtcccacctgctgcccgcgggctgcatgtggcccaggtggctttgaatgcagcccaacacaaattgataagcttttttttgtgactttttttttttttagttcatcagctatcattagtgttagtgtattttttaatgtatggcccaagacaattcttcttttaatgtggggagaaaaaagattggacacccctaccctagaggaatgatagtgtttagtatttgttttcattcttattttccttctcctctatatcgcatggattgtggagcgtgtccatgtcttcaggtcatcagcatgacttttaggggaggtgactacagagtcgaagccatgggagatgcggaattcagctgaagatcacttaaacatccagcaccgctgtagcactagtcatagaaagaatatgaagagaattcaagattaaacagattggccaggcgcggtggctcaggcctgtaatcccagcactttgggaggccgaggcaggcggatcacctgaggtcaggagttagaaaccagcctggccaacatggtgaaacccatctctattaaaagtacaaaaaatttagccgggtgtggtggcacatgcctgtaatcccagctactcgggaggctgaggcaggagaatcgcttgaacccgggaggcagaggttgcagtgagccgagattgtgccactgcactccagcctggacgacagatcaagactctgtctggaaaaaaaaaaaaaaaagattgagcaaagcagtcaatagattaattggatttaattaagtgatgaaagaattgagtaatggaacttcacccattctaaccatgtgataaagtagaaaaggttcaaagatttagtaggggtttaaaatgagtttaagagaatgggattacaattccaatcccattggtaagacaaattttatttctaaaaattcatgtatttcccccctttatacaactgcaaatgcgagtttggagctagagtgggagaggaaagcaaagaatgaagggaaagaaataggaggaagattctagaaatgggggcagcatgggagaagtggtgggagcaaagtcctggcatatagatgccacaatcaaaacttctgccctgtttcctagctgcttggtgtcagcactggggccattcccccagcctgtgaccttggcatcccctatgttgacctgggctcttcctctgtccttccacctggatgtcctttagtgggtcctggccagggtcctattgctccctttaacctctggagcttttgtctgctacattttcttacactgatgctgactcagacctaatgctgggtgaagttgtgatgtggctgaagtgtctgggtgtaattcaagaatcctcgagggagaatcaggagttttgggttccggttccaacttggtaatttaccaagtcacagcctcctggagcctggttttccctatcaataaaatgaagaaatctgtcttctctagttcataagttgtcaagatcaaatgtgtaaatacataggaagttcttaggaaagggaaggcttctatcactgtaaagaagtatcattgataactagtatatgatagtctgctgccgtctgccttccccatatgtaccctatcatgctctgagtccctccttcctgccttttccccatctcttatcacaacctgctttttgtatgtgattgctatttacaccttgataatattaaatcagagatatacacaattaaatttgagatagttacgccttgtccagaaatattcacatattaagcttgatcgctatttgggtggtaaaaagttagtccttgttcaagaaatgttaaccaacagtttggggtaggagggagaagtgaggctttccttgtgttctgaaatcactatatttcatgcctgaattagcctgtctgagctggaattcagagtgaatctttggatccatgttttaaagggacaactatagagactcccattgctttttctatgcacatagtttttgtgtggtttttactggaatcttattacagttacagttaccatcccatggaccaacatggtccatcgagggccttgcagtgagagggtcagtccatagatgctggagccacatgacgtgggttcaaatttcaactctcccacttattagtgtgtgaccttggacaggctgcttcactgctccggccctcagttttctaatttgcaaaatgggggagattaataatacctatctccagaggtttgttgggaggattaaataataggcctaaaacacctagagcagtgtctggcactgagtacacattagctggaatttatttcaattgcatgtttgaaaaaatttaaaccattcagaaatttaattttaaaaataaaaaatgaaaagtcacttaagctctctatctcccactttaaccccactcctctttccacaggcaaactgttaacagtcactttgcacacatcattcaagagttttgttttgtttttgtttttgttttgagactgagttttgctcttgttgcccaggctggagtgcaatggtgtgatctcggctcactgcaacctctgcctcccaggctcaagcgattctcctgcctcagcctcccgagtagctgggattaaaggcatgcgccaccacgcccggctaaattttgtatttttagtagagatggggtttctacatgttggttaggctggtctcaaactcctgccctcaggtgatccgcccgcctcggcctcccaaagtcctgggatcacaggtgtgagccactgcacctggcctcattcaagagtttttactgatatattttttaaatcaaagaattataatatactatttggcaacttgttttcctcacttaaccatgtagctaggagttatttccaggtcactatgcccagtgctaccttcttctgcctaagggtttcatagtatgccgcagcatggacactgcgcaattcacttaaccaatgtcttattgatggatatttggagtgtttccagttttcgatatttggagtgtttccagttttccacgatcatattcgctttttgcacattcttttctctttataattcagaaccatcaagctgaagcccagcagggcttcctcatttcatcatcatagctcatttcctattgagcaaagcttcttcctcgggtcagctcttgccacacttctttctacagaaacaagaagtggagttatctgtcctgggcttcgggagtgaacacacccattcccacgctgctgctgcccacgctgctttgcccacacagcaccactgtccctggggatcctgaataacaatctgctgagcaaaatcaacatccctttggctacagcgaggctaattgcacttaataggttgtaagagttctggtacagacaggctccttcccatgatgtatttcaccacctcattgaagagatgtgtgttccagtgagagtctgttcctccgtgtcatcccaacaaatgctcctatgtccaggggccattgtcaggaatgctcgttcctctcccttctacacagacaaatctccctttgaggacacactcaactccaactccttttgtgaagctttccctgttgctccagcctgcatgaatccttccctccgccgaatttcttcagcaagaatgccttctaggccaggcacggtggctcatgcctgtaatcccagcactttgggaggccgaggcgggcagatcacctgaggtcgggagttcgagaccagcctgaccaacatggagaaaccctgtctctactaaaatacaaaattagctgggtgtggtggtgtgtgcctataatcctagctactcaggaggctgaggcaggagaatcacttgaacccgggaggcggaggcggaggttgtggtgagctgagatggcgccactgcactccagcctgggcaacaagagcgaaactccatctgaaaaaaaaaaaaaaaaaaaaaaaaagaatgccttctaagtgcatagcacctgtgtgagggtgaaaccctggcccacagagccagtggtcgtaggatagttaaaatagaaggccacagtatattgggaggccaaggcgggcggatcacgaggtcaggagatcgagaccatcctggctaacatggtgaaaccccgtctctactaaaaatacaagaaattagccgggcgtggtggcgggcgcctgtagtcccagctactcgggaggctgaggcaggagaatggcgtgaacctgggaggcggggcttgcagtgagcagagatcgtgccactgcactccagcctgggcgacagagcaagactccgtctcaaaaaaaaaaaaaaaaaggccatagtatatcagaattccatagaaataagattattacaaaaagcctataagcagagagacactggaatatactgaagctagtatgagcaaaagggaattgtgggttggaacaccaatacccacagcaacagtgaaggaaagcaaaagcctcgcacagcgcttctcaaagtgtggtctgggggcttgttagaaatgcaatttcttggccaggcgcagtggctcacacctgtaatcccagcactttgggaggccaaggcaggcggatcacctgaggtcaggagttcaagaccagcctggccaacacggcaaaaccctgtccctactaaaaatataaaaattagccaggcgtggtggcacacgtctgtaatcccagctactcaggaggctgagacaggataattgcttaaacctgggaggtgggagttgcagtgagctgagattgcgccactgcactccaggctgggtgacaagagcgagactctatctcaaacaaattaaaaaaagaaaaaggaaaataaatgcaaattcttaggctccaccccagacttactgaatcagaaattctgggggtggaacgcagcaatctgcgctatcgtgagtcccacagatgagtctggtgcatgctgaagtctaagaaccactagcttgagtagagattcaaagtttgggtctctagcacagaaagacttttgcaacaacgagtctcgggaggcgtaaagcaagcagagaggactgcagctgttaaaagtagtcctaagaagattctaggtaggagaactcaagcgtggggagctgggaaaccccagctggcagggaggggtcctacctggcgagctgccccccaagggcctgcgctggtcaagtgtctcccgaagggtctgcctgcgggcaggagaaacacaggtgtccaggactagtgttctgactgatacgtggccctaggatttctctcctgggaccacttggagaggcaacccttggctgccagaggaagagactgatggaggcagcaggacgggaggaaggcctgtgggaggagggtgccagagtgggaagggagcatgtgaggagagtcttgatggttaatgccaattacctctagaaaattaccaggctttacagactcaagagctactacccaaaagattgaaaaaactgccttaaaaaaaaaaaaagcaacccaccccagggaagagagagagctatttagaaaactccagaagtaaataagctcagacaaatctgagatttatctggtctctgctcctgagtcctgtctgagaatcaggcacctaagagacggggtgttgtgtccaccagagacggtggagaggccgggcacggtggctcacacctgtaatcccagcacttcgggaggccgaggtgggcagatcacctgaggtcaggagttcaagaccagcctggccaaggtggtgagactctgtctcttctaaaaatacaaaaattagccagacttggtggcgcacacctgtaatcccagctactcgggaggctgaggcaggagaatcgcttgaacccgggaggcagaggatgcagtaagccaagatcacgccattgcactccagcctgggtgacagagcgagactccatctcaaaaaagaaaagagatagcgaagaaagccatcatctctggtggtttgcaggtttgattttcatagcagaacccttaatgaagatctcaagtagaactctgaaatgggaaaaacttcaacatgtaagaattgagctgctgtggataaattaggagtccagttcccacctccttattctttttatcactcagaacaatgaccacttttacacccgaccccaaccctagctccccaggatgctgctccacagaaggcagcttgaaaaacgccaatggttaacctctctggtgccttgctgggctgctgtagggacagcggggtcactgcttcacaaagtcacccttcccgttgctggcggttttgatcttcagagagttctgtcttttcttttttcttcttcttctttttttttttttttctgaggcggagttttatgcttttcccccaggctagagtgtgcaatggcgtgatctgggcttgctgcaacctctgtctcctgggttcaagtgattctcctgcctcagcctcccgagtaactggaattacaggtgcacacaaccacgcccagctaatttttggatttttagtagagacggggtttcaccatgttggccaggctagtctcgaactcctgacctcaagtgatccaccctccttggcctcccaaagtgctgagattacaggcgtgagccaccgcgcctggccagaaagttctgtcttttcttgaggtgagagctgctccctaaatttccaatcactgtgcctagtttttccctctagaagtagtaatatattcttctacgtgaaagatctgtaaagaactaaagagctttaagagcaatcttttaacttttgccttttccaggcaaaaatctcatcacttcttgcaaaggattctcatgtgacatggtcactctctgtgggacacactccagtttgtcaacatcttttaaaatgaggctcctggaagaaaacatggctccagacaggatctgatcaggacctttcccccatctgagcactaaccctcaattaatgtagcgtaggcttacattagctttctgggcagccagtccacagagtgttcatactgcgactgctgccaattggatgccctctgtctgtttcacgttgtttttaggttaactgtttcctgtcctgtgctcttgcagttggcatttcttaatgcaagtcatggactttacttgtgtctccataatatcttgtcctgtaggtgttagtccagtcactcaaaatattataaaatacagatcttttccttttctttttttttttttgagatggagttttgctcttgttgcccaggctggagtgcagtggtgcagtctcagctcactgcaacctccgcctcctgggttcaagcaattctcctgcctcagcctcccgagtatccaggattgcaggcgtgcaccaccacgcctggctaattttgtatttttagtagagacggggttccaccatgttggccaggatggtctccatctcctgacctagtgatccacccacctcggcctcccatagtgctgggattataggcatgagccaccacgcccggctggcaaaagactttttaaaaaaactttcacatattgaacacttactccatgacagatgctgtactatgcatatggtatctaacttcctccttacgctggcccagtggaaacaggtattaacgtcccattttacaaatgagaaaactggggaaaggaacaaagatgaatgtatcctgatttctgagggtcttttcggctgatgactgagcagggagatgttctacacacacagccatttaagccccacccagcagtcctaagggaagagttaggctcagcaccggatgaaaggcttgaaccacgggagcgagagcagaagaaaaactcactcctggttccttctccctagggtgacacctcatccaccttttgaagaaagtggggccaggcataggaatggaccaagaaaatgaaaaacagttaaagctggattttaaaaataaagcttattgagcatataatgctataaaatgtgcttgctcatgcagttgtcttggatgtaagaccctgatatttggatacagtggctttatcaggatgaaatattttttcttccttgacttccaccacgcccagttaattttttgtatttttagtagagacggggtttcaccgtgttagccaggatggtctccatctcctgacctcgtgagccgctggcctcggcctcccaaagtgctggaattacaggcgtgagccaccacgcccggccttgacttccttttttggttttgcgggagggaatggattgagtgaaggaggaaccccacacagtctactctatctacacagcatttatgaccgtgtgatatttttctttttctttttttttgcctatagtttcttgttggaaaaagacacgttttcttgttgactgttgctccccgacagaaatgtgagctccacgaaagaaaagtcctggcttttcctctctgtatacctgttacccagaacagtgcttggcacctgtgaagtgcttcagacatattcgatcaataattaaagaatgggtctatgtatggcacagacaacctagcgtttttaaaagatgatttaaaaacagtgtaaattctgagcaaggctcactctagatgtggaggtagtcacgtttaaattacaagaaaaaattgcagccaggcgtggtggctcacgcctgtaatcccaacactctgggaggccgaggcgggcggttcacttgtggtcaggagttcaagcccagcctgacactcctctaatcccaactactcaggaggctgaggcaggagaatcgcttgaacccgggagggggaggttgcagtgagccgagactgctccactgcactccagcctgggcaacagagcaagataccatctcaaaaaataaataaataaataaaaataaaataaaattttaaaaaaggataagaaatagaaaaagaaaaaattgctaatacccagtgccaagccagagctaccttttgataaaaaacaaatactgccctctgatggtagtagttttttaatttttaattttagcagcaatnnnnnnnnnnnnnnnnnnnnnnnnnnnnnnnnnnnnnnnnnnnnnnnnnnnnnnnnnnnnnnnnnnnnnnnnnnnnnnnnnnnnnnnnnnnnnnnnnnnnnnnnnnnnnnnnnnnnnnnnnnnnnnnnnnnnnnnnnnnnnnnnnnnnnnnnnnnnnnnnnnnnnnnnnnnnnnnnnnnnnnnnnnnnnnnnnnnnnnnnnnnnnnnnnnnnnnnnnnnnnnnnnnnnnnnnnnnnnnnnnnnnnnnnnnnnnnnnnnnnnnnnnnnnnnnnnnnnnnnnnnnnnnnnnnnnnnnnnnnnnnnnnnnnnnnnnnnnnnnnnnnnnnnnnnnnnnnnnnnnnnnnnnnnnnnnnnnnnnnnnnnnnnnnnnnnnnnnnnnnnnnnnnnnnnnnnnnnnnnnnnnnnnnnnnnnnnnnnnnnnnnnnnnnnnnnnnnnnnnnnnnnnnnnnnnnnnnnnnnnnnnnnnnnnnnnnnnnnnnnnnnnnnnnnnnnnnnnnnnnnnnnnnnnnnnnnnnnnnnnnnnnnnnnnnnnnnnnnnnnnnnnnnnnnnnnnnnnnnnnnnnnnnnnnnnnnnnnnnnnnnnnnnnnnnnnnnnnnnnnnnnnnnnnnnnnnnnnnnnnnnnnnnnnnnnnnnnnnnnnnnnnnnnnnnnnnnnnnnnnnnnnnnnnnnnnnnnnnnnnnnnnnnnnnnnnnnnnnnnnnnnnnnnnnnnnnnnnnnnnnnnnnnnnnnnnnnnnnnnnnnnnnnnnnnnnnnnnnnnnnnnnnnnnnnnnnnnnnnnnnnnnnnnnnnnnnnnnnnnnnnnnnnnnnnnnnnnnnnnnnnnnnnnnnnnnnnnnnnnnnnnnnnnnnnnnnnnnnnnnnnnnnnnnnnnnnnnnnnnnnnnnnnnnnnnnnnnnnnnnnnnnnnnnnnnnnnnnnnnnnnnnnnnnnnnnnnnnnnnnnnnnnnnnnnnnnnnnnnnnnnnnnnnnnnnnnnnnnnnnnnnnnnnnnnnnnnnnnnnnnnnnnnnnnnnnnnnnnnnnnnnnnnnnnnnnnnnnnnnnnnnnnnnnnnnnnnnnnnnnnnnnnnnnnnnnnnnnnnnnnnnnnnnnnnnnnnnnnnnnnnnnnnnnnnnnnnnnnnnnnnnnnnnnnnnnnnnnnnnnnnnnnnnnnnnnnnnnnnnnnnnnnnnnnnnnnnnnnnnnnnnnnnnnnnnnnnnnnnnnnnnnnnnnnnnnnnnnnnnnnnnnnnnnnnnnnnnnnnnnnnnnnnnnnnnnnnnnnnnnnnnnnnnnnnnnnnnnnnnnnnnnnnnnnnnnnnnnnnnnnnnnnnnnnnnnnnnnnnnnnnnnnnnnnnnnnnnnnnnnnnnnnnnnnnnnnnnnnnnnnnnnnnnnnnnnnnnnnnnnnnnnnnnnnnnnnnnnnnnnnnnnnnnnnnnnnnnnnnnnnnnnnnnnnnnnnnnnnnnnnnnnnnnnnnnnnnnnnnnnnnnnnnnnnnnnnnnnnnnnnnnnnnnnnnnnnnnnnnnnnnnnnnnnnnnnnnnnnnnnnnnnnnnnnnnnnnnnnnnnnnnnnnnnnnnnnnnnnnnnnnnnnnnnnnnnnnnnnnnnnnnnnnnnnnnnnnnnnnnnnnnnnnnnnnnnnnnnnnnnnnnnnnnnnnnnnnnnnnnnnnnnncttcccaggctcaagcgatcctcccacctcagcctccctagtagctgagaccacaggtgcacaccatcatatccagctaatttttttgtatttttttcagagatgaggtctcactttttgcccacactggtcttgaactcctggactcacctgatcctcctgcctcagactcccaaagtgttgggactataggcatgagccactgcacctggccctaagtgttgggactacaggcatgagccactgcacctggccctaaaaagatgttaatctgtttatcatacaggctatcagtgccaaagtataattttcaaaattcaaaaaacataattctcatataaatagaaaatgaatccatgtttaagacttattaacccattggtgaagaagaccagtaagatgtaaagctagttcaaagaatgtttacaggcattcacaaagggatgttaaaataagactgttagtttagatataatagtggttaatggactggacgcagtggctcacaattgtaatcctttgggaggccaaggtgggtggatcgctttaggttaggagttcgagaccagcctggctaacatagtgaaaccccatctctactaaaaatacaaaaattatcagtcatggtggtgcacacttgtaatctcagctacttgggaggctgaggcgggaggatcacttgagtctgggaggtggaggctgcagtgagccagcatacggccactgcactgtattctgggcaatggagtgagtcgctgtctcaagggaaaaaaaaagcggttaatgtcctctagggaaatgaaaataaccttcacagttatattttttagtgtgcagaaatcttcaagttaatatgcagctgcaccatgtctaggctctaatcaaatagtaaatagcaaagtcaaacagttacattgttctagaaaattaacccttgtggaagcttttaaataatgccccagtatgacattgaaaagacatgtggccctgatttttgccttattgtaagttttgggtagttttggatagttaacacaagtttatgtattcttcaacgtcttaccttcttctattagtctttccctgttttggagtgtgttagtacttctcaaattaaacagtggatatgagaaacagaaaatgtaaatctctgaaaacttctgttgttactagttgacaattctaatttcagggtggggagaaaaaaggaaaagtgagggaagagatgaaaagttttgagttaggccaggcgcagtggctcatgcctgtaatcccagcactttgggaggccgagcagggcagacacgcggtcaagagatcaagaccatcctaggcaacatagtgaaaccccgtctttactaaaaaaaaatacaaaaattagctgggcatggtggtgcacgcctgtaatcccagctacttgggaggttgaagcacgagaatcgcttgaacctgggaggcggagcttgcagtgagccgagattgcgccactgcactccagcctggtgacagagcaagactccgtctcaaaggaaaaacaaaacaaaacaaaacaaaaagtctgggtgcagtggctcatgcctgtaatcccagcactttgggaggccgaagagggcggatcacctgaggtcaatagttcgaaaccagcctgaccaacatggagaaaccccatctctactaaaaatacaaaaaattagccgggcatggtggcacatgcctgtaatcccagctactcgggaggccgaggcaggagaattgcttgaaccctggaggcagaggttgcagtgagctgaggtcatgccattgcactctagcctgggcaacaagagtgaaactccgtctcaaaaaaaaaaaaaattttgagttaaatgaattttgaggattatatataatgaggtttaatgtatccattctatttctattgttcattattagaaataacagatacctctaagtttcctgagggcagagaaggcctctggccaaaaatgtgaaaattatctagtatccagtatataatatcaggaaagagggagaatggaatcaagaaatatttaatagtagtgatgacagatgtcttggctgtggctaaaatttgcttctcagtagagaggcatatggcaatcttactggcccaactacacaaggctacagttaggccacggaggggagaagaaggcagccttaaaaggttcctggattaggcgtccacgtttaagttaggcccaaggaacattcattccatttgaagactgccctatctgtcttgagcatgtaccaccatttttttccttttggtggaccatgtgtatatacatatatgtgtgtgtggaaattttttttccatttttttacaaatggaaaatatatatatttttaaatctaaccttcctaatctttttaattttattttattttatttgagatggagtttcgctcttgttacccaggctggagtgcaatggcgcaatctcggctcactgcaacctccgcctcccaagttcaagtgagtctcctgcctcagcttcccgagtagctgggattacaggcacctgccaccacgcccagctaattttttgtatttttagtagagatggggtttctccatgttggtcaggctggtctcgaactcctgacttcaggtgatccccttgcctcggcctcccaaagtgccaggattacaggcgtgagccaccgcgcccagcctaaccttcctaatcttttatcacttctcttctctgtacttcttcttccctttttcctatctactataggaattagctactatatattatctactatatatatattatctactataattccatctttttacattttcttcttcaaattgttggtgcagttgccaataccatagtaagcattttgtacccacccaagtgactttaggatctggctgattttattctccattttgccactcatcaatgttcccaggatctttcaacatctgagctgttgctcctttagactcctcgatttcacaggactctgtaactttcttgatttcctgtacttccctctctatctgtcttggtttggaatgtgaagaggccggatctgattagcaccagggcttctaaacttctgagatctctttactcagcattccccttctatgacccaattgctttacctattttctcccaagcaaacctgccacaagttgctagaactgccctgtgcaacgagtcagcccctgtcattttacacgctgtctgctggctccacaggactctatccagccttagattccaagctccactgctttgcgctgcccttgccagcttcccggccttcctcagtccctgatgcctgctctgtccactgtatcagtctcttcccggaggtctcccggcctattcttgagagacagttggtccacattgtgtccagagatgggagaggctaatggaagaggcttattcccttgttaatggaattttttgctgcaagaaacagaaaaataccaattnnnnnnnnnnnnnnnnnnnnnnnnnnnnnnnnnnnnnnnnnnnnnnnnnnnnnnnnnnnnnnnnnnnnnnnnnnnnnnnnnnnnnnnnnnnnnnnnnnnnnnnnnnnnnnnnnnnnnnnnnnnnnnnnnnnnnnnnnnnnnnnnnnnnnnnnnnnnnnnnnnnnnnnnnnnnnnnnnnnnnnnnnnnnnnnnnnnnnnnnnnnnnnnnnnnnnnnnnnnnnnnnnnnnnnnnnnnnnnnnnnnnnnnnnnnnnnnnnnnnnnnnnnnnnnnnnnnnnnnnnnnnnnnnnnnnnnnnnnnnnnnnnnnnnnnnnnnnnnnnnnnnnnnnnnnnnnnnnnnnnnnnnnnnnnnnnnnnnnnnnnnnnnnnnnnnnnnnnnnnnnnnnnnnnnnnnnnnnnncaggtgtgagccactgtgtccagcctaaattggtttttaaaatgtgaaatttggccgggtgcagtggctcatgcctataatcccagcgctttgggaggccaaggcgggcagatcacaaggtcaggagtctgagaccagcctggccaacatggtgaaatcccatctctactaaaaatacaaaaatttctgggcgtggtggcgggcgcctgtagtcccagctactcgggaggctgaggcaggagaatcgcttgaacccgggaggtggaggttgcagtgaaccgagatcgcaccactgcactccagcctgggagacagagcaagactctgtctcaatcaatcaatcaatcaatcaataaaatgggaaatttgttaattcatataacgaggtagggcagcctccatgtgcagcatatcagggttctgtatccttctttctgtgattctctttgttctgccctcattaatgatgactgtcatcctcaggctggcaacaaaacgaccacagtatttcccaatatcacattcagacacaaccacgtctagagaagcagagaggccttttcttttctcccacaaatatagaacacctttctacagttgatctcagccgaaaggcagagaagaaatctagaacatctttctcacaagtcctcatagatgctgctttcacatctcattggtcagaaacaggtaatgtgcccatctctaaacaaatcacagacaatggaatgggatcactggtatttctttattattcatttttaaattttattctttatttatttctttttcttttcttttttttttttgagagagagtttcactcttgttgcccaggctggaatgcaatggcacgatctcggctcactgcaacctctgccttccaggttcaaacgattctcctgtctcagcctcccaagtagctgggattacaggcatgtgccaccatgcctggctaattttgtatttttagtagagacggggtttctccatgttggtcaggctggtctcaaactcccaacctcaggtgatctgcccacctcagcctcccaaagtgctgggattataggcatgagccactgcacctggcctattctttatttcttttagagacagcgtcattctgtctctcacccagcctggagtgcagtggaataatcatagctcactgcggccttgaactcctggctcaagcaatcctcctgccccagcctcccaagtagttggaactacaggtgtgctaattttttaaaatttctgtagagatgggcagggagcactctcactatattgcccaggctggtcttgaactccaggcctcaagcaatcctctcacctcggcttctcaaagtgctgggattacaggcatgagcacaccgtgcccagagatttatttagatcagtcaggatttgcctccggatctgagacttgtgtgggaggcttatacttgaacaacaaaattggacttctgcaggcaataaagaaggagattaaggatgttgagtaggtaatcagcagtatctgctatagtgtgaaatggtggaccattgagaggaagactttataaacacttttcagcttgaaggtcgctaatttaaccattaacggtctcttcttgtaaatttgaccatgggaagttcttttgttagtttgtcggttgttttttcaggggagatggtgaggatgggggagattctttttaatttctaactcctggccgggtgcaatggctcacgcctggaatcccagcactttgggaggccgaggtgggcggatcacaaggtcaggagtttgagaccatcctgacgaacatgaaaccacgtctctactaaaaataaaaaattagctgggtgcggtggctcacgcctggaatcccagcactttgggaagccgaggcgggcgaatcacttgaggtcaggagttcaagaccagcctgaccaacatggtgaaaccacatctctactaaaaatacaaaaattagccaggcatggtggcgggtgcctgtaatcccagctactcgggaggctgaggcaggagaatcactgaacctgggaggtggaggttgcagtgagccaagatctcaccactgtactccagcctgggcgacaaagttagattccatctcaaaaaaaaaaaaaaaaaaaaaagtaactcctggattatccatttttgtttgacatccccagaatatactttctccatctatgttgaacatatccaaccttagccttgcatctgaaaaaaggtcctctgctcacctgctcttttcaccctaactactccctctctcctatgcttcttcccatctcgctctaatcccatggctctgcttgcgccatttaggggaacacagaaatcgttaacctcaacctgctgtcggcatcataaactgacctgaccataactacatcagtcttttgtcttgttcttccttctccttgaaagctgtctgtttccagacatcctgaggagtttccacagagtaaatactcaaaagtgtttactgaataaatgcatttattctgtcccttctccagcctttttcaacctccacctttgtgtgggcgcaaggaatttttacatgtatttttggtcccccttgctcagtcttcaaacaatggtctgcagacatttgttttctattttttaacagctttatcgagacataatttatatagctcagtatataccataacatttacctgtttttaagtgcacaaatcaattcagtgaatttatagaattgtgaaaacaagacacaatccagttttaaagtgtttgcatcaacctccaaaaaatcatctcccatccccagccccaggcagccataatcaattcccatccccagacccaggcagccataatcaattcccatcctcagccccaggcagccataatcaattcccatccccagccccaggcagccataatcaattcccatccccagccccaggcagccataatcaattcccatccgcagccccaggcagccataatcaattcccatccccagccccaggcagccataatcaattcccatccgcagccccaggcagccataatcaattcccatcccccgccccaggcagccataatcaattcccatccccagccccaggcagccataatcaattctcatccccagccccaggcagccataatcaattcccatccgcagccccaggcagccctcatctgctttctgtctctatagagctgctttaaaaaaaaatatttcatggccgggtgcagtggctcatgcccgtaatcccagcaccttgggaggccaaggcgggtggatcacctgaggtcaggagtttgagaccagcctggccaacatggcgaaacctcatctctactaaaaatacaaaaattagccaggcgtggtggcgggcgcctgcagtcccagctactggagaggctgaggcaggagaatcgcttgaatctgggaggcagaggttgcagtgagccaagatcacatcactacactccagcccgggcaacagagtgagtctccatctcaaaaaaaaaaaaaaaagaaaagaaaaatcttgtggggaatgcctttctacgtatgacaaaaggtgcagatgtgtagagaaaaatattcataaattttaccacattaaacaattctaccaggaaaaaatatcaaatttttttaaatgacaaggtggaaatatttgcaacttatttcatagactaaggactaatttccttgataaacaacttttataaatctgtaagaaaaagaccagcaacccaataaaaaaatgaacaaaggacttaagttatttcataaaaaatgggtcttggccgtgtgcggtggctcacgcctgtaatcctagcactttgggaggccgaggtgggcggatcatgaggtcaagaaatcaagaccatcctggccaacatggtgaagccctgtctctactaaaaatacaaaaattagcctggcatggtggtgcatgcctgtagtcccagctactcaggaggctgaggtgggagaattgcttgaacccaggagggctgcagtgagctgagaggttgcagtgaggttgcagtgagctgagatcgcaccactgcactctggcctggcgacagagcgagactcagtctaaaaaaaaaaaaaaaatggttcttaaatatatgatactcagaccccctcaaaataagagaaatgcaaatcaaaactataagataccatttttatattagaatattggcaaaactcaaaaagtttgataacattctccattgatgagtatatgggggaaatgggtactcaaatgtattgctgatagtttaagttggtacaaccttcgtggtaagtactacgcattggtaaaatgcactccaacctcatctcctaccatttcttctcttgcacaatttgtattagccacattggcctcctgctcctcctcaaacatgcaaggcacactccagccccagggctaatacacttacctttccccgctaatcctgaaatgcataccaatttttccttgcctccttcaggcctttgctcatcatgtgatctaaaacagtggctcccatcccctctatcattctccttttcatcccattttgagcacttaccatctgatgacactattctatgcatttatgtctctgctctccaactgtaaacccaggactttgctgtatatactgctgtaaccccaaactccagaacagtacaggcttagaatgtagtaagtgcttattaactacaaataatgaatgaatgaacgtctattggtgacaacttagtatctattaaaacttagaatgcacatacttagtaattcccctttaggcatttatctaatagatatccttgcatatgtgcaaaacagagaatgtacaaggttatttgttgtagcactgtttgtagtcatgaaaggagaaaacaacccaaggataaattttttttttttttttgagacagagtttcactcttgttgccccaggcctggagtgcaataatggcatgacctcggctcaccacaacctccacctcccgggttcaagcgattctcctgcctcagcctccggagtagctgggattacaggcatgcaccaccacacccggctaattttgtatttttagtagagacggggtttcttcatgttggtcaggctggtcttgaactcccaacctcacgtgatctgcccgcctcagcctctcaaagtgctgggattacaggcatgagccactgcgcccagcaacccaaggacaaattttaaaataagttacctatagccaggcacagtggctcacatctgtaatcctagcactttggtaggctgaggtgggtggatcacttgagcccaggagttccagacaagcctaggcaacatggtgaaaccctgtctctacaaaaaatacaaaaattagccaggtgtggtggtgggcacctgtactcacagctacttgggaggctgagaggggaggctcacttgagcccaggaggttgaggctttggtgagctgtnnnnnnnnnnnnnnnnnnnnnnnnnnnnnnnnnnnnnnnnnnnnnnnnnnnnnnnnnnnnnnnnnnnnnnnnnnnnnnnnnnnnnnnnnnnnnnnnnnnnnnnnnnnnnnnnnnnnnnnnnnnnnnnnnnnnnnnnnnnnnnnnnnnnnnnnnnnnnnnnnnnnnnnnnnnnnnnnnnnnnnnnnnnnnnnnnnnnnnnnnnnnnnnnnnnnnnnnnnnnnnnnnnnnnnnnnnnnnnnnnnnnnnnnnnnnnnnnnnnnnnnnnnnnnnnnnnnnnnnnnnnnnnnnnnnnnnnnnnnnnnnnnnnnnnnnnnnnnnnnnnnnnnnnnnnnnnnnnnnnnnnnnnnnnnnnnnnnnnnnnnnnnnnnnnnnnnnnnnnnnnnnnnnnnnnnnnnnnnnnnnnnnnnnnnnnnnnnnnnnnnnnnnnnnnnnnnnnnnnnnnnnnnnnnnnnnnnnnnnnnnnnnnnnnnnnnnnnnnnnnnnnnnnnnnnnnnnnnnnnnnnnnnnnnnnnnnnnnnnnnnnnnnnnnnnnnnnnnnnnnnnnnnnnnnnnnnnnnnnnnnnnnnnnnnnnnnnnnnnnnnnnnnnnnnnnnnnnnnnnnnnnnnnnnnnnnnnnnnnnnnnnnnnnnnnnnnnnnnnnnnnnnnnnnnnnnnnnnnnnnnnnnnnnnnnnnnnnnnnnnnnnnnnnnnnnnnnnnnnnnnnnnnnnnnnnnnnnnnnnnnnnnnnnnnnnnnnnnnnnnnnnnnnnnnnnnnnnnnnnnnnnnnnnnnnnnnnnnnnnnnnnnnnnnnnnnnnnnnnnnnnnnnnnnnnnnnnnnnnnnnnnnnnnnnnnnnnnnnnnnnnnnnnnnnnnnnnnnnnnnnnnnnnnnnnnnnnnnnnnnnnnnnnnnnnnnnnnnnnnnnnnnnnnnnnnnnnnnnnnnnnnnnnnnnnnnnnnnnnnnnnnnnnnnnnnnnnnnnnnnnnnnnnnnnnnnnnnnnnnnnnnnnnnnnnnnnnnnnnnnnnnnnnnnnnnnnnnnnnnnnnnnnnnnnnnnnnnnnnnnnnnnnnnnnnnnnnnnnnnnnnnnnnnnnnnnnnnnnnnnnnnnnnnnnnnnnnnnnnnnnnnnnnnnnnnnnnnnnnnnnnnnnnnnnnnnnnnnnnnnnnnnnnnnnnnnnnnnnnnnnnnnnnnnnnnnnnnnnnnnnnnnnnnnnnnnnnnnnnnnnnnnnnnnnnnnnnnnnnnnnnnnnnnnnnnnnnnnnnnnnnnnnnnnnnnnnnnnnnnnnnnnnnnnnnnnnnnnnnnnnnnnnnnnnnnnnnnnnnnnnnnnnnnnnnnnnnnnnnnnnnnnnnnnnnnnnnnnnnnnnnnnnnnnnnnnnnnnnnnnnnnnnnnnnnnnnnnnnnnnnnnnnnnnnnnnnnnnnnnnnnnnnnnnnnnnnnnnnnnnnnnnnnnnnnnnnnnnnnnnnnnnnnnnnnnnnnnnnnnnnnnnnnnnnnnnnnnnnnnnnnnnnnnnnnnnnnnnnnnnnnnnnnnnnnnnnnnnnnnnnnnnnnnnnnnnnnnnnnnnnnnnnnnnnnnnnnnnnnnnnnnnnnnnnnnnnnnnnnnnnnnnnnnnnnnnnnnnnnnnnnnnnnnnnnnnnnnnnnnnnnnnnnnnnnnnnnnnnnnnnnnnnnnnnnnnnnnnnnnnnnnnnnnnnnnnnnnnnnnnnnnnnnnnnnnnnnnnnnnnnnnnnnnnnnnnnnnnnnnnnnnnnnnnnnnnnnnnnnnnnnnnnnnnnnnnnnnnnnnnnnnnnnnnnnnnnnnnnnnnnnnnnnnnnnnnnnnnnnnnnnnnnnnnnnnnnnnnnnnnnnnnnnnnnnnnnnnnnnnnnnnnnnnnnnnnnnnnnnnnnnnnnnnnnnnnnnnnnnnnnnnnnnnnnnnnnnnnnnnnnnnnnnnnnnnnnnnnnnnnnnnnnnnnnnnnnnnnnnnnnnnnnnnnnnnnnnnnnnnnnnnnnnnnnnnnnnnnnnnnnnnnnnnnnnnnnnnnnnnnnnnnnnnnnnnnnnnnnnnnnnnnnnnnnnnnnnnnnnnnnnnnnnnnnnnnnnnnnnnnnnnnnnnnnnnnnnnnnnnnnnnnnnnnnnnnnnnnnnnnnnnnnnnnnnnnnnnnnnnnnnnnnnnnnnnnnnnnnnnnnnnnnnnnnnnnnnnnnnnnnnnnnnnnnnnnnnnnnnnnnnnnnnnnnnnnnnnnnnnnnnnnnnnnnnnnnnnnnnnnnnnnnnnnnnnnnnnnnnnnnnnnnnnnnnnnnnnnnnnnnnnnnnnnnnnnnnnnnnnnnnnnnnnnnnnnnnnnnnnnnnnnnnnnnnnnnnnnnnnnnnnnnnnnnnnnnnnnnnnnnnnnnnnnnnnnnnnnnnnnnnnnnnnnnnnnnnnnnnnnnnnnnnnnnnnnnnnnnnnnnnnnnnnnnnnnnnnnnnnnnnnnnnnnnnnnnnnnnnnnnnnnnnnnnnnnnnnnnnnnnnnnnnnnnnnnnnnnnnnnnnnnnnnnnnnnnnnnnnnnnnnnnnnnnnnnnnnnnnnnnnnnnnnnnnnnnnnnnnnnnnnnnnnnnnnnnnnnnnnnnnnnnnnnnnnnnnnnnnnnnnnnnnnnnnnnnnnnnnncccctttgcccccagaagatctggttctagtccggctctggccacacacgctcagcctgtgaaactcattttttttaaaattaaaatacggactgcttccatgaatttgtgtgtcatccttgcgcaggggccatgctgatcctctctgtatcattccaattgtggggtatgtgcgcgggaacgaccacaaagctcagttattttgagaactgccctgaaagttcagcttggccctgggttagtttcaacctgttggatccctaagatctggttttttcaaggatatagacttgttcatatgtgaatctggggatgcaatccagtttgaacctcttagtgtactgcactcttactgaagatcgaatatgaacccctaagtcagcccaatagctgacctatagggtctttactatttatcaattaagaaagggcatatcgagcatcctcggtatcaaggtactatgataaggtaagttttttaaccttaatcattttgtcctgagaggttcaccaatccagaactgtctcctttgtactttcccaattattttactagagttttttgtcattatttatttaatcatctatcttcccttctagtcaatatgctccatgagggtggggggcatattcattttccaccacaatatctcagcataatacctggaacgtagtgggcattccatacattgtttaatgctatgaattaacatgatggtccctgtacatttttgaaagcatttacagtctagaagcctgatcaaaaagcagacctgctgcagaatcagcttcttcatatacacgtcagtaacgtctgcagctacatcatatacatcacatatctcagcttcttcatatacaatagtcagtaatgtctgcagggcttttattttggcctgtgtgtctcactatatgataattttctagctacaagaaacagctatttgtagatgaatacttactattctctcttcctttccccaccctcagtgcccaaagaatacacttaaccctaagcactgcttttgatgtgactgtgacattcccagaaagatttgtaaatgtcaagaaacattgaggtaaagtggcatagggtgatgatatcttcgtgaactcagttctgctggagaatcactattaggaacatactttttattaaatacttagcagtgattatacacgtcattgtagaatactgggggcaaaggagaggggaaacctatagaaaataatcacccttgattgtgtccagtcttttttctaggcatatagtttatagtatgtttcatacataccttatcatacaagctatttcctgacgttcaaatttaacaacatatattattattttgtcatcaaatgttttactacaatgtaacattttatatgactgctaaatgttttattttatggatgtactataatcatattattcaccacttattgttgggcatgagaatttttactcttagaaaattaatcacatataagcccaggcacagtggctcaccccagccagcactttgggaggtcaaggtgggcagatcatttgaggtcaggagttcgagaccagcctggccaacatggtgaaaaccacgtctgtactaaaaatacaaaaattagctggacatagtggcaggtgcctgtaatcccagctactccagaggccaaggcaggagaatcacttgaacctgggaggcggaggttgcagtgagctgagatggtaccactgcactccagcatgggtgacaagagcaagactccatctcaaaaagatggaggcaggtgtggtggctcaggcctgtaatcccaacactttgggaggccaaggagaggagataccttgaggccaggagtttgagaccagcctgggcaacacagcgagaccatgcatgtctctacaaaaaatttaaaaattggccaggcatggcagcatgcacctgtagtcccagccacaccaaaggccaaggtgggagaatcgcctgaacccaggagtttggggctgcagtgagttgagatggtgccactgcacaacagcctctccaaagcatgatacgcctattcttaaaaaaaaaaaaaaaaaaaaaaaaactactttaaaaaattactgtgctctacctctaatctgatgcaatgagctcacaccatttctccttcttttccttctcttttcttgctttttttttttttttaacgaatactattcccaattcacctaactaaaatttgatgttagtaaactacaacctacggggcacatataaactccacacactgaagcaatggctgtactcgtcaaagatgtatgcagttggtactcaaataatgtagttttttttttactagactctttttaaaatttaactttaatttttgctaaagtaatgtttgtatttggaatataaaataattctatgaggcttataacaacaaactatcgtccttggccctactcctcttcatagggagccagactgaattttaaaaggcatatcttccaaaatttctctctccatttcttaagaaacatgcttatactaccattttcagtttttttttttcttttgaaacagagtctccctctgtcgcctaggctgcagtgcagtggcgtgatctcccctcgctgcaacctccgcctcctgggttcaagcgattctcgtgcctcagcctcccgagtagctggaattacaggtgcctaccaccatgcccagctaatctttgtattttcagtagagacggggtttcgccatcttggccaggctggtctcgaactcctgacctcaggtgattcgcccaaagtgctggggctataggcgtgagccacctgcccggctattttcagttttggatagtatgttttgacatacactctgtttcctctttgagacacccgctctagagccctctattccactccaagccgcctggatgctctcttggcctgcttacagattccactctgtttaggaagaaggacggcacgtttatccaattattcttcctggacacgaatactcctctccccagagatcagtaactgcccacaatcttgttaggaagccccacagcacctaagggtacgaatgtccccaaagagtagacgattctctccctactcacgtctccactagtgcaaggctggctttcttacccttagaggaatacagaaatgacatcgtctgcaggccaacgtctaaacaaccaggagtgggtttttccacccaaccgcagtgcacgcaaagcccctaagccgactgtgagaccgggcggagcctggcgctgcaggaagaggcgacagccacagccctactgacgagcccgaggggtgaactccccggcgggaggcccgaaccctcaaacaccgggaagcggaggtgggggccggctgggggaccggtccaccggctcccacctcggcgtacagggattccaggtcccggcgagcgctggcctagcggtttccacagcgacaggccgggcgcgctccccgcgcgtgcgcagctcctcgcccgcccccgggtgggcggagcaaggaacagctgggcggggacgaccgccccacgccgcgcgggaacccttgggggccggggctgcaggcagctgggaaccgcggacgctaggcgcgcgcacccagcactcggtcccagccgataaatctggggcagcgcgcggtaggagctgcgggcggccaggccccttcctgcgtccgcacctggccccgcgcgcccctctcgggcgtccggcttccggcgtcctggcggctcgggtggcggcggttcgggcggccgcctggctgctcctcggggcggcgaccgggctcacgcgcgggcccgccgcggccttcaccgccgcgcgctctgacgccggtaaggggggcggggcttggggggccagagcgtgggagcggtcccggctcccgggcctctcggcgggttgcggggatgtggggacccggcgcgggacctagatcagtagggcgagccggaggaggtcagacactagagccgtgtgccctccttccctcccgtgcgctttgctctgcggcggatcccgggtctccgggagagtcgggctcgggccctgcggttcccaggctggactggccgccctgttactaaagttctgagaaggaaagtcagccgtcaagcgtcttgggatgctcttgagctgcacgaagcttctgatcaccaaggggccaggcaaggccttagcgccctgtgaggcctgagaatccccaaactgaatataggactccgtggcaaactgctagttgttcgtgcaagtagtagttggcaaactgcttgtactactgagacgggcaagtgcgggaataattacaataaagggtaaggtttgatgggaggaaagcacaaaccctacaagtttctccatctgtaaaatgaggatgtttctgtcatccttggtatcatttagatccgtttagtatctgtcaatcagtgcagttctgcttgtgtgtttacatattgggttttcaagtttatctaaacaaaggattatgaggccaagaagatttttttttttgagatggagtctcannnnnnnnnnnnnnnnnnnnnntctcactctgttgccaggctggagtgcaatggcgcgatctcggctcactgcaacctccgcctttcccaagttcaagcaattcttctgcttcagcctcccaagtagctgggattattacaggtgcccgccaccatgcccagctaattttttgtatttttagtagagacggggtttcgccgtattggtcaagctggtcttgaactcctgacctcaggtggtccaccctcctcagcctcccaaagtgccaggattacaggtgtgaaccaccatgctcggccagaagaatttttaaacagttggatttggtaatctgtagaggcttccaacgttagcattttataattgaaaaggggtcaaaattagcggggcgtgatggcgtgcccctgtagtcccagctactcagggggctaaggcaggagaatcgcttgaactagggaggcggaggttgcagtgagccgagatcgcgccattgcactccagcctgggtgacagagggagactctgtctcaaaaaaaaaaaaaaaaaggaaaaagaagtcaatttccagagccagttcaccactaccaaagtaatagttaagaggaaaaatgttgaaggtaaattcacattcaacaaattcgttttaaaaatggtacttttgcctttaaaatcatgacattctagtatttgctgtactatttgtaaattagcctttctccggtcccaatgatcaactgctgtctggtgtacataccagtagaatttaagcctgttcataatttttcttctaatttaatttatagttggatagcagtcctcacttcccaccctacccccattaaaattaaacaggatgaagaaagatctggatttgtgctgggcacagtggctcacacctgaaattctaacacattgggaggctgaggtggaaggattgcttgaggccaagagttcaagaccagcctggaaaacatagcaagaccctgtctctgcaaaaaaatttaaaagtagccaggtgtggtggcgtgggcctataatcctagctacttgggaggccgatgtgggaggattgcttgagctcagaagttcaaggctgcagtgagctgtgatcatgccactgcattccagcttgtgtgacagagtaaggccctgtctctttttttttttttttttttgagacggagtcttgctctcttgccaggctagtgcagtggcgcaatctcggcttattgcaaccttcacctcccaggttcaagcgattctcctgcctcagcctcccaagtagcgggaactacaggtgcacaccacgacgcccggctaattttttgtattttagtaaagacggggtttcaccatgttggccaggttggtcttaaactgttgaccttgtgatctgcctgcctccccctcccaaagtgctgggattacaggcatgagtcactgcacccaggctatttgttcttttttttaagaggcagagccttgctcggctgggcgctgtggcccatgcctgtaatcccagcattttggaaggccagggtgggcagatcaccaggtcaggagatcgagaccagcctggccaacgtggtgaaactccatctctactaaaaatacaagaattagccgggcgtagtggcgcgtgcctgtagtcccagctactctggaggctgaggcaggagaattgcttgaacctgggaggcagaggttgcagtgagccaagatcgtgcaactgcagtgcagcctggcaacagagtgagactccgtctcaaaaaataaataaataaataaataaaaataaaaaaagaacaaataaaaatctggattggtacaagatacatatggaatttggggatttgtttattcaggaaaagatcatatgcttctccaaagcaaatacaatttcttttttgagggctggagatttttcagtgaaatgtaactagacaaattctcgaagagctgtaacactaaaatttcattcaattttagtgttgaaagtggaagtatcttaggctttaaaaatcaggcaaacctttcttctaatcggtcacgtagttagttgtatgacccagggccatttactaatgctttagaagttcaagtttcctcctgcaaacaaatggcagtgattttgcttattttgctatagatcgtgaaagttaaaacacatatgaaagcaccaagtagaggatctagcatgttagatattatttaaccagttatttttttctattcttttttcattccttcaaatagtttcaccttcacatcatttttcttaatgcatcttttcagaaatacatctaatggattcagcaatattcaatgataataacaggattatgtaaataatatatagttttctgtatgtgtttggggtttgtttgtttgttttgagacaaggtctggctttgtcacccaggctggagtgcagtggtgcagtctctgctcactgcagcctccctctgcctcctggcctcaagccatgctcccacctcagcctcctaagtagctaatttttgtatttttcttaatggagatggagtcttgctatgttgtccaggcttgtgtgtgttttttaaatgttcttcccacagatttacagcttttgaaatgggacaaagttccatagcaaatgcctggcagagttgctggtcaatagtaactgaattttcagttttaagatgcttacattgagtaatagttttctttttttgtgtttagagacaaggtctctctctgtcacccaggcttgagtgcagtggtataatcatagctcactgaagcccccatcccctgggttcaagcaatcctcccacctcaagtgcgagctggcacacctggctcagagtaacagcttgagtgtctggaatctggatgaagtcagtatactgagatttgtgcttattctaagtttacagtggaacccgttgaacctttacgtgcctccagctttgctttttgttttttttttaaaccttccagcatctccacaaggcataaatgtaccattttcctggttttgtaggcatggatgttagaatatagaagttgccagtatgtatctatctgatacacagtttcagtgaacaaggattaaaatggagatttcctggctctttagccatcctgttcctttttggtatcttgggatcacctgaataaagtaatattaataaaaaacacttacatagaacacttaatatgtattcttactactgttctaagtgcttctacttacattaaattcttacgacagctagtagagagataaactatcttgcccaaagttaacacagctgttaagttacagactgggatttgaaatcaggcaatctaactccagagtcactgttcttaaccacagtgctatattggaagtagatttatatatatatttcaaattgcttaaattttaaaaggttttgtttttaggttggttagattttctaggcaagtaaagcctactaaaataactcttttataattatttaaatattattttattcagtgcttttgtttttaaaaaaaaatcgtttggttcttataggcataagggccatgtgttctgaaattattttgaggcaagaagttttgaaagatggtttccacaggtaagttgcctgttgatttctatttctattaaaataatgtgtcatataattgagagcaaaaaattgatggttgaaatttgtataaattgaaaaatcaggccagatgcggtggctctcatctgtaatcccaacactttgggaggccgaggcaggcggatcacaaggtcaggagtttgataccagcctggccaacatagtgaaacgctgtctctactaaaaatacaaaaattagttgggcatgatggtacacacacctatagtcccagctacttcagaggctgaggcaggagaatcacttgaacccgggaggtggagattgtggtgagccgagatcatgccactgcactccagcctgggcaacagagtgagactctgtctcaaaaaaagaaaaaagaaaaatcacttgcttcctcaaagttactcagtgatggcatatgtggttcacactttgaaataatgattaactgagtggagcaaagaagaaaacaagtatgtattgtttaccacgtacagttgtcccttggtatctgaggggattggttcctcctggacctcccctgaggacaccaaagtcctcagatgctcaagttccctatatcaaatggcatagtacttgtatagaacctacacacaccctctcatatacagaggttgttatatatatacaactagtgcctatatatacaatattccatttaatcttcacagtggcatgagatagatgattttttcttatttttcagatgagggaggtagagctcaaacaatttaaataatttggtagaaattagggtgatagagctctgactctagcttagtactattatacttcaaagccatctcaagtactatgatacactgctctaaatcactatgtcttactacagttgattctaaatgaccaagctgtttccaaaaaagaaattatcttcaaaagatgaatatttgcccatattgaagatctttaaaagtctggtaaaaaggtgtggaaactgttccttaagaaaacttgcccaaactgaagcttcgcaaggtgattattttgaaatgattctcagatacttaatatgtaaattctgattcatttatttttttttaatttttttatgctgggcacggtggctcatgcctgtaatcccagcactttgggaggtcgaggaccccggatcacgaggtcacgagttcgagaccagcgtggcaaacacggtgaaaccccatctctactaaaaatacaaaacattagccaggcgtggtggtgggcgcctgtaatcccagctactcaggaagctgaggcagtagaatcgcttgaacccgggaggcagaggttgcagtgagccgagattatgccaccgcacttcagcctggcaacagagcgaggcaaaactccgtctgaagaaaaaaaaaagggggggaagggtatagttatttcaccatgaagtatatttgtgttaggttttttgtagatagctttttatgagttgaggacttaatcttaagtttctagtttcctgagagttttctttcatgattgggtgttaaattttgtcagataccttttcttcctctgttttgagaggatcatacaatttttatattttattctcttaatatgatgaagtacattgatgtttccagtagtgaacgtactccttggtcatgcgatattatcttcttgaaatatatctggatatgttttgctaataacttgcttagtatttttacttgtatgttcatgaaggctactggcccatgactctgttgtgatgccttattctggtttcactgtctgggtattcttggccttataaaatagtttgggaaacattttcttctctagtttctgcttgtgtagcattggtattatttattcctttaatgtttaatagaatttaacaatgaagctctgtttttgtgtgtgtgtgctacatttaggattgttcttgatgctcttgataatttcttgatgaattggatgaattgacccttttatctttgtgtaatgtctttctttatgactgacaatattccttgtcccgaagtcaccttattctaatattaatatagccatcccatatttattattaatatttgcatatcttttttatccttttacttttatcgtctttatcttcagtgtgtttcctgtagatagcatatagttcagggtggccaatttttttctttccaaatcccaagaccttgtgaaaggagttgctgttttatccatctgtcagtctctgcattctaattggagtgattagaccgtttatttttaatgtaaatattaatatggttggtctggtttaaatctgtctagctacttttttatctatttgtttttctctttgttgcatctagtcttctccttcttttcttgccttattttgggtaaattgagtatttattttttatttttttattattatactttaagttctagggtacatgtgcacaatgtgcaggtttgttacatatgtatatgtgtgccatgttggtgtgctgcacccattaactcgtcatttagcattaggttaaattgagtacttattaagcattctattttatctcaatttttggatgattagctatacctctctgtttttaatttgttgctttagggtttacaacctgcaatcgttacctatcacagtctaccttcaaataattttattccatgtcacagatactgttttatcaggatagcttcatctccttctcttttctatgctgttgttatcacatattttactttattttttacttgtgttatgaaccccacaatatattgttactggtttttctttaagcagtcacttttcacattatttattttaattgtgataaaatacccataacataaaatttacaattttaacttttttttttttggtatggggtctcgctctgttgccaggctggagtgcatggcgcgatctcggcgcactgcaacttccgattccctggttcaagtgattcttctgcctcagcctcccgattacaggcgcctgccaccacacccagctaattttcgtattttcagtagagatgggatttcaccatgttggccaggctagtttccatctcctgacctcgtgatccgcctgcttcggcctcccgaagtgtggggattacaggcgtgagccaccgcgcccggcctaattttaacgatttgtaagtgtgcaattcagtggcatcaagtacattcacgttattgtgctaccatcaccaccatccatttatggaactcttcgttttgtacaactgaaactccttgcctattgagcaataactactcattcctcctcctcccagctcctggcaaccagcatgcttgtctctgtgaatttgactcctctgggtacctcatataagtggaatcatataatgtttgtgaagcttatttcacatagcatgatgttctcacagttccttcatgttttagggtatgtgagaatttcccttctttttaaagctgagtaatattccattgtatgtttgtaccacattttgcttatttgttcattgttgatgggcactttggttgctcctgccttttggctgttgcaaataatgccgttgtgaacaggatttacggttgtctcttaaatgcctgcttcatattcccagaagtggaattgctggatcatgtgataattctattgtaattttttgagaaattgtcatagagttttctgtagtggccacatcattttacattcccaccagtgatgctcaagggctccaatttgtctagcaatcatatttgaaagcaattaaaacatgagaaagaagtcttttatattcccccacatacttatcatttctgatctcttctttcttatagatttatgtttctatctagtatcatttactttctgtcatttcttgcagtgacaaattctcttagtttgtgtttgtctgaatctttattttgcctttatttttgaaggattttcctcctggatataaaattctagatcgacagcctcttttcttttagtaatttaaataagttgctccattatcttctagcttattcttatctttgttaatctctccatcattattgatagcttttaagattgttttccattgactggataataatgtgccttgatgtgattttctttgtatttatcctgcttagggttggttggcttcttggatttgtagacttataattttatgaaattcagaaagtgttcagccattatatcttcattttttttctgttacattctcttctcttttttaggaactccaaatatatgtatactagactacttgatattgtttaaaggccatggaggcggttccttttttctccctggtcttttttcctctctgtgcttcagtgtgggtagtttctgttgctgtgtctccaagtcactgatcttttcttcttcagcatctaatggcttttaattacatctgggtaagtttttatttcggaaattatattcttcatctcttaaagttgcatttagttttttaaaaaatatcttctctctctctctcttttttttttcttgagacagggtcttgtctctgtcctccaagctggaatataatggcgctatcagagctcactgcagcctcgacctcctgggctcaaaagattctcctaccacaccctcccttgtagttgggactataggcacacatcaccatgtctggctaatttttttatttttttagagacaggggtctctccatattgcttaggctggtctcaaactcctggcttcaaatgatcctcctgcatcatttgaatcccagcctcccaatgtgctgggattacaggcatgagccaccatccccggcctattttttcttttttctttttttttagatggggatttgctctgtcacccaggctggagtacaggggcatgatcttggttcattgcaccctccacctcccaggctcaaaagattctcctgcctcagcctcctgagtagctagaccacaggcatgtgccaccatgcccggctaaattttgtatttttggtagagactaggtctcactgtgttacccaggctggtctcgaattcctgagctcaggcagtccacctgcctcagccttccaaagtgctaggattataggcatgaggcaccatgcctgccctctggcctgtttttttctgtgtaaatatccagttgtttcagtgccatttgttgaaaagactatcctttccccattaaattacgttggtacctttattgaaaattgtgtgaatgttattggattccattccttttcattgatctttgtctatttttacaataatgctatagtggcttatgacatgaattatgaaagatctaatggatgattctgacatgttataaatatttcatttgaccttataatctacttttggaaaatgaattttgaaatacagtgttttcactaataggaatacagtgttatgttatctcatttaacagttgaatgaagagatttactttcaatgtacttgtcttacagagaccttttaatcaaagtgaagtttggggaaagcattgaggacttgcacacctgccgtctcttaattaaacaggacattcctgcaggactttatgtggatccgtatgagttggcttcattacgagagagaaacataacagaggtacagttattaggggattttttgggagagaaattaatttaggggtgctgtagtttggattaaggaaaaatagtaggttttcttttcattttgttaaagtgtataaagtgacatttttagagatagactgggcatagtctttgacaagtgagtgactcttgtcaggaataagccaactaaactgagctagttaaatgctttttaaggtggttcatagttcagtgactaagaaaattatctgggtgtatgtgtatgtcttgagaaaattaatgattaataaatagtgcctcaacagtaactttgttaatgagaatgacatataccccaacatctgggtaagtttgatatgtgaggagaagaaactaatatttaatagatgtctatatgccagatatcttcattttcttttaaaaagaaagatcgtgtcctgcaccctttacataaattaatctttataacaaccctggaggtggaatctccattttatatatagggaaactgagggctgggtgcagcgtcttacgcttgtaatcccagcactttgggaggccaaggcaggcagattgcctgagcttgggaattcgaaaccagcctgggcaacatggcgaaaccctgtttctacaaaaatacaaaaattagccaggtgtggtggtgggcgcctgtaatcccagctacttgggaggctgaggccggagaatcacttgaacctgggaggcggaggttgcagtgagccgagatcgcatcattgcactccagcctgggtgacagaatgagactttgtctcaaagaaaaaagaaactgaggcgcaaagaggccaagtaacttatccaaaatcacatagataattggaagagccaaaaaatggatccaagattgtctagttgtaatgttgttgcccttgttggacctgaatcttaccccgtagttagaaaagtttccccaactttggtaagaattccctgggggcacttttgtacagagtattgccttccagggaaatcctgattcagtaggcctagattgggccccaaaatctggtttgaagaacccagatgatttctttttttttttttttttaattattgtgggtacgcagtaggtatatgtaacctaggtgatttctgttaagaaattttgggagacactgtcttagttgataagattataatctacttacgaatttttaaaactgtaaaatagatgcatctatagttattcatgatggcagtttatttctaatcgtggtttaggccagtttctttatccatttattttattttaattgtttttgaataagtaattacattctcatgggttcattgagtagatataaaaaggtatgcaatgataacattctgcctgtgtcaaccactaatcagcaagtgtgttctcagttttttgtgtatgtatgacagtttacatacacatacaattatggaaggacctcatttttttttaatttaatgtttttttttttttttttgagacagagtctctgttgcctaggctggagtgcggtggcacaatcttggctcactgaaacctctgcctcccaggttcaagttctcctgcctcagcctcccgagtagctaggattacaggtgcatgccaccatgcctggctaatttttgtatttttagtagaggtggggtttcacaatgttggcctggctgatctcgaactcctgacctcaggttatctgcccaccttggcctcccaaagtgctgggattacaggcatgagccaccggccagaaggatctcatttcttttcttcaatgaattatgaattctaaatgaggctattcaaatttaaaataatagatttcaaatttcaacacagtttttggcttgtaaggatatgggttggaatcatatttaaatctacttaataaaatcacttaccgtgttctaagaaaatcaaagttttttggatgggggttacccaaaaattcatatctttggatggggatgagatttggatgtttgaaggttgactgttagaagaaaagggtacaggtagagagtgccattatagattgattaacaagtttatcttgatcttgattttctgctttctaatcttctaatccataattataagccttgtaagtgtatttacttctttattttggaaacttctagaaaaatagatgttacatttgtgacgtttaaatatatggaatttgatgcctgacatattccttctgcctagttgagattatggcccaattcctcgtacagagaaactttgttatgctaagtgttattatataataagtgtaactgggtagaaggaatttatatgtagggactgattgatgcttgtatacctggattaatgtcttgactctgctccaggaaataaaatttttggctgcaacaaatggaactgtgggcccagattaaatgagtggtgtgccagcaaaatgctttgtaaggagtttgtgatggtttgtgaataatttgaaaataaatgcaagccttaagtaggttcaccaaggataaggcagatcaaataaacctcatttcacttttttaggtagggttattaaacatattttttcatcagaagtctcttagattctttgaaagcagtataatattagattgaaacgtataaaattgctgttttgtgggtcaaaatggaaacagtttttgaaaccataagttttactcaaagtatgtagtattaaggcttctgcttctggtcaagtggagaacaggtaacaaatttagtctcttacttgaaacaagcaagaaatagacaaaatatatgaaataatgaaaaaagtcattgaatatcaggcaatgaagggcagagatatccgagagaagggaagtaagtaaggtgagccctactgtcatccagcttatttccttgagaatattttcaggcttaatgcagggaggagaaactcaagcagagcctagtggactttttgagttgaggagataaagttgagatgctgggcaggccaaggtaactagaattcacgggacagtgtaccagaggggagagaacgtcatagaggcagaactgcagaaataacagaaggttcctttcaagtatgtagctgagtatttatcagtgtgtatatgttaggaaactacctgatgccagggaaagagccatctgacaaaatgagcggtaacagtgtctggtactcacacagggacaggagtagtacctcgtcccagcaaccagactgagaaaagccttataatttcttgaacaatggaaaaacagagaacttttactcagtagcagggaatacttagccacaaactgaacattgctttagtcctgcataacaaatcttaaaaacaaaaccttaaaaaaatatcaaactttttctaagtaacttatctgcatcccaaacaaagctcaagaatatgtatagggatatagacatatccagcaagatcaaattagcaatttcttgactgtaataataaattagcagctaggcaaggatggggggaaaaatgacctataatgaggaggtgaatcaatcagttaaaaccaatccagaattgacccagatgttagaattaacatcatctctactaaaaatacaaaaaattagccaggcatggtggcgtgtgtctatagtctcagctacttgggaggctgaggtggaaggattgcttgagcctagatggttgagacttcagtgagccatgatcatgccactgcactccagccagggtgacagagtgagaccttgtcttaaaaagagaaaataagaggctaggtaaaaaaaagaataggcagctcatgcctattatcccagctctttgggaggatgaggcaggagaatcacttgagcccaggagtttgaggctgcagtgcaccctgattgtgccactgcactccagcctgggtgacagagtgagagtccgtctcaaaaaataaaatagtagtacatataaagcatagtgagataaggctgccaaaaaactaatgcaagttttgcctaaagaaggtaatattgctcctgtactctatgagtacttcaaatgcagctaatatgatgaatgatttggaaaccatgtcatgagaacccaggagaactgtgaacatttcccttgtcaggagaagacttcatggcggcggctatggttgccttctgataattgaaggatccctagtggaataaggaacgaatttattgcagacattgtaagcaagaacaactggtaaatgttataggttagtacatacagtttctactcatgaaaaagaaataaccttataacagtagatagatcgagatgacttatagtaatgagcttccttccagtcactgaaggtattcaagcagtggcggtatacctgaaaaatacctttgttgggacagtggtttaattttattacttccaaagtccctcatgactcatgagatgatataattccttgacttttgccaatgagttctgttcctgctgtgactaactgaaaaggaacaacatgtaaagaaaacatagcacttggtgtcactgtcagaggaaagttaggatgcttgatgtgatgggaaggagttaatgcataccagggttttgcatggacaatctaaagagaagttgtgcgtgtgtgtacatccatacatatacacataggtcgcgtatataatgcctgtgtgtgtatgtggatatatgtgagtgtgtgtacataaatatgtatgtatatgtggatatatgtgtaataaataaatatacatgttataacttaggtctaatttctgccacatgtacattttcacttttggtgtagaatactatacttttctataaaatagtttttaccatattattttaagcaatcatttactattttttccattaactgtttataccgtctctagaaagagtgctgacctttgctttgacttcctgaccgcagtgctcttactcactgccatctcacttgcttctctgaagaacaggaaattgtcagaatgataccaatcattttaactcaatacaggtttaaccttttgtcacagtttgtgtacttattgaataatgctatattcacaaaatttctctgtcttaggtacctattttgtcacctaagcaaagactaataagaaaatattacaggaataatttttattatggggaaatttggtaccctagaatataatttccccagtttttttttagtaagcagacttttattaagcataaattggtcttgtgtttttctccttaaaattgaggatggaaggggaatggaaattgcttataaaaggggcaaatttgacactgctgtgtatctgtatatagtcttctggttttaactttttaaaaatcttcctcattcatttcttcttgattaatatttattttctttttgaacaggcagtgatggtttcagaaaattttgatatagaggcccctaactatttgtccaaggagtctgaagttctcatttatgccagacgagattcacagtgcattgactgttttcaagcctttttgcctgtgcactgccgctatcatcggccgcacagtgaagatggagaagcctcgattgtggtcaataacccagatttgttgatgttttgtgaccaaggtgagggctgcaagtgttttctaagggttgaaacatcagaataaaggtatggtggcaagtcctccttctgctaggctggctggcaaggccctatgtcttgacctaggtggtagttacaagggtatttatttgccttataataattcactaaactatgtatttgagtagatttttatgtgtgtgctttaatttacaataaaaaagttaaaaagaaacatgcatctgccatccctgtccttgactgcgctgccccaactgtcatctccttccctctaagacgaacccaccatcctgactgttaaatacttccttatgtttctttatatgtttatcatccagatgggcattccaagacactataccaagactaaggtcttgtccatttataaaaatctattatttccattaagtctcttaatgtacaggtttctctctatccctttcctttcttcaacactgatctgttgaaagaacctgggccatttgacctgtagttggtcatagctggggttttgctaattggactcatgttcctcatacttctttatttactggaaattggcagctggctccagaagaatgatcagattccggtttgattcctttgacaaaactataggtcagtgctgtgttctcttctcagtagccatttaatattagtaggcatgtactatgtgtttctttttgcagccattggtccacattacccctctgttgctttttgtttcttgttatcagtattgcaggactctggcttttgatgttttgtttctacttgcatgtattttgatgtttgggaagatattttatcacctagttttgttgcagattttgtctgtgagttnnnnnnnnnnnnnnnnnnnnnnnnnnnnnnnnnnnnnnnnnnnnnnnnnnnnnnnnnnnnnnnnnnnnnnnnnnnnnnnnnnnnnnnnnnnnnnnnnnnnnnnnnnnnnnnnnnnnnnnnnnnnnnnnnnnnnnnnnnnnnnnnnnnnnnnnnnnnnnnnnnnnnnnnnnnnnnnnnnnnnnnnnnnnnnnnnnnnnnnnnnnnnnnnnnnnnnnnnnnnnnnnnnnnnnnnnnnnnnnnnnnnnnnnnnnnnnnnnnnnnnnnnnnnnnnnnnnnnnnnnnnnnnnnnnnnnnnnnnnnnnnnnnnnnnnnnnnnnnnnnnnnnnnnnnnnnnnnnnnnnnnnnnnnnnnnnnnnnnnnnnnnnnnnnnnnnnnnnnnnnnnnnnnnnnnnnnnnnnnnnnnnnnnnnnnnnnnnnnnnnnnnnnnnnnnnnnnnnnnnnnnnnnnnnnnnnnnnnnnnnnnnnnnnnnnnnnnnnnnnnnnnnnnnnnnnnnnnnnnnnnnnnnnnnnnnnnnnnnnnnnnnnnnnnnnnnnnnnnnnnnnnnnnnnnnnnnnnnnnnnnnnnnnnnnnnnnnnnnnnnnnnnnnnnnnnnnnnnnnnnnnnnnnnnnnnnnnnnnnnnnnnnnnnnnnnnnnnnnnnnnnnnnnnnnnnnnnnnnnnnnnnnnnnnnnnnnnnnnnnnnnnnnnnnnnnnnnnnnnnnnnnnnnnnnnnnnnnnnnnnnnnnnnnnnnnnnnnnnnnnnnnnnnnnnnnnnnnnnnnnnnnnnnnnnnnnnnnnnnnnnnnnnnnnnnnnnnnnnnnnnnnnnnnnnnnnnnnnnnnnnnnnnnnnnnnnnnnnnnnnnnnnnnnnnnnnnnnnnnnnnnnnnnnnnnnnnnnnnnnnnnnnnnnnnnnnnnnnnnnnnnnnnnnnnnnnnnnnnnnnnnnnnnnnnnnnnnnnnnnnnnnnnnnnnnnnnnnnnnnnnnnnnnnnnnnnnnnnnnnnnnnnnnnnnnnnnnnnnnnnnnnnnnnnnnnnnnnnnnnnnnnnnnnnnnnnnnnnnnnnnnnnnnnnnnnnnnnnnnnnnnnnnnnnnnnnnnnnnnnnnnnnnnnnnnnnnnnnnnnnnnnnnnnnnnnnnnnnnnnnnnnnnnnntcactatgttggccagtactagtctcgaactcctgacctcgtgatccacccgcctcggcctcccaaagtgctgggattacaggcgtgagccacagcacctggccaagcacattttctttagtttacgaagcccctttcagtttttggttctttgtgtcttcaaatttgggttgatttagaatgtttataaaagttagtagcactggggccaggtgcagtgtatcacacctgtaatcccagcactttgggaggccgaggcaggcggatcagttgaggtcaggagttcgaaaccagcctagacaacatggtgaaaccctgtctctactaaaaatataaaaattagccaggtgtggtggtatgcacctgcaatcccagctactcgggaggctgaggcacgggaatcacttgaacctgggaggcggaggtttcagtgagctgagatcgcgccactgcagtccagcctgggagacagagcaagactgtctcaaaaaaaaaaaaaaaagttagtagcgctgttactaaaaaccgacagatgggaagtttttaatactacatttgttaccgtcatacctttcatgacgagaaaattaaaaatgttcagttatattacctttgttcatccaaccttgttttctgtttctattaaaggtacctcttagcataaataaagtttgaaaaagttcctctcctgagagaannnnnnnnnnnnnnnnnnnnnnnnnnnnnnnnnnnnnnnnnnnnnnnnnnnnnnnnnnnnnnnnnnnnnnnnnnnnnnnnnnnnnnnnnnnnnnnnnnnnnnnnnnnnnnnnnnnnnnnnnnnnnnnnnnnnnnnnnnnnnnnnnnnnnnnnnnnnnnnnnnnnnnnnnnnnnnnnnnnnnnnnnnnnnnnnnnnnnnnnnnnnnnnnnnnnnnnnnnnnnnnnnnnnnnnnnnnnnnnnnnnnnnnnnnnnnnnnnnnnnnnnnnnnnnnnnnnnnnnnnnnnnnnnnnnnnnnnnnnnnnnnnnnnnnnnnnnnnnnnnnnnnnnnnnnnnnnnnnnnnnnnnnnnnnnnnnnnnnnnnnnnnnnnnnnnnnnnnnnnnnnnnnnnnnnnnnnnnnnnnnnnnnnnnnnnnnnnnnnnnnnnnnnnnnnnnnnnntctgtctcaaaaaaaaaaaaaaaaaaaaaaaaggaagtcatgttcaacttttgcaatacttttgtgattttctaatttcttaggcattcacataaaaaaggatgctaaaataacagaatgtgatagatgggtccagatcatatacataatgtattaaaatgtttgacaacttctgtctattgaggtttaatacaagcctagctttcagtccaaatacaggttttctgacatcattttctaccacttttctcagagttcccgattttgaaatgctgggctcactcagaagtggcagccccttgtgctttggagaatgaggatatctgccaatggaacaagatgaagtataaatcagtaagctaatgttttatgttgttttttagatcatgtgcctcatttaaagctctttctgtaatgttcctgccacatttaagagattagcatttttttttttttttaggcggagtctcgctctgtcacccaggctggagtgcagtggcacaatctcggctcactgcagcctccgcctaccaggttcaagtgattctcctgcctcagcctcccaagtagctgggattctaggtgcccgccaccacacccagctaatttttgtagttttggtagaggcagggtttcaccctgttggccaggctggtctcaaactcctgactttaggtgatccgcctatcttggcctcccagagtgctgggattacaggcatgagccaccgtgcccagctgggattagcattttctaatatagaaagctgttttttcttacagcaaagggttactacaaagcactgctgttttttgttggggaactttcattgaacatacagttgggaagatggatgactctgcaatcttatgcagtgtagagttgtttttgagtaggttgccattgccatatggtacctgaaaatttttctcaaactctaaaatacatctggagacctgcatttgattgattatgtcaatgaagagtatgcttagtgtttatgatttattgatttagcaaattagtgtgtattgctacaagataagtagtgacccttttaaaacattttgaattcagttgtccttatttatttatttatttattttgagacagagtctcgctctgttgcccaggctggagtgcagtggtgcaatcttggctcactgcaacctccgcctccctgttcaatcagttctcctgtctcagcctcccgagtagctgggactataggcgcctgccaccatgcccggctaatttttgtatttttagtagagacggggtttcaccttgttggtcaggctggtctcaaactcctgacttcaggtgatccacccccgtcagcctcccaaagtgctgggattacaggcgtgagccaccacacctgacttcagttgcctttaaaattctgtaacttgccataagaggtcataataatttaacactttaaatatagcttttaactatatgtatatattatttatatatatatatatatatatatatatatatatatatatattttattttattttatttttttttttattttatttttttttttgagacggagtctcgctctgttgcccaggctggagtgcagtggcacgatctcggctcaccacaacctccgcctcccgggttcaagtcattctcctgcctcagcctcctgagtagctgggactataggcacgtgccaccatgcctggataatttttgtatttttagtagagacagggtttcactgtgttggccaggctggtctcaaactcctgacctcatgatccgcctgcctcagcctcccaaagtgctgggattacaggcatgagccactgcacccggccaactttatatatatttcatcttcatatataccagaaaaataggtggccattactaaggtggtattccatcccaaggattgttgaagatgtcatttttttgaatgacggttttcagatagcactttgttgcagattgggttggttacttgtattttttggggtgtgaaatcataattcaggtatttacaaaaagaaaaagtattcccaagttacgtacattttaatgttttttaaaacttatttttaaagtataaactttcccagtgtttttcattgaactttatcttcaaaaccaaatagaaaatagaaactgagttgaatgtaggagcttttccattgctagtcatagtaaaggccacatccagctgtacaatatgggaataacaaggctttaaaagctatctggggagagaaaggcaaatgggaatgaaagaataatttagttttttgttgttttaatgtttttcctctaagtcttcaatttagagagaattctgtattctaatttgaaacatggtaagaggaagtaaatgtttatattgattacagaggtgacactgggatatagcttttcttaaaataatatactttatgtaaaaagcagaaaaatcagaactaatgagatttaacaaattattgtgggaattgagtctgattctgtaacattaaatgaaatgttagattcaaaagtcattcaaaccaataatattacatgtagtgtagcactggctgaaatatatttaaaagaaaaaggaaataaaaatatccaattaaaaatcaaagaaatagtggtctcaccttatgacatttattttattttactatttttatttatttatttatttatttgagacagagtcttcctctgtctcccaggctggagtacagtggcacgatctcagctcactgcaaacctccgcctcccgggttcaagtgattgttctgtcttagcctccctagtagctgggactacaggcacctgccaccacacctggctaatttttgtatttttagtagagatggtttagtagagatgttggccaggctggttttgaactcctgacctcaagcgatctgcccgccttggcctcccgaagtgctgggattacaggcatgagctaccacaccgggcccatgacatgcattttcaatgtctaacttctctctctctctccataggtatataagaatgtgattctacaagttccagtgggactgactgtacatacctctctagtatgttctgtgactctgctcattacaatcctgtgctctacattgatccttgtagcagttttcaaatatggccatttttccctataagttttatgtagttaaatgcttcctagaaacctaaataagatctattaatttctgacgagaggtgttcttctagaattaattacttttatcttttgtcttcatttgtggccaaaattatgtttactagaggaaatttgggatcattctcagctaattccaaaatgtagtgctctattgcatggatccttggtaatcctcaagcatcagatgccataaggggaaacttaattctgctaaattaatgtttattttgtgagaagtgactttatcttcatttggggtagaaaaattatttctttatgtagtagagacaaattattctcattttgcaagtactttcaatttaagctacaaattgagaaaaccgttataaataagaataaaataggccaggcacagtggctcacacctgtaatcccagcactttgggaggccgaggtgggcggatcaccagaggtcaagagtttgagaccagcttggtgaaaccctgtctctactaaaaatacaaaagttagctggggctggtggtgggcatctgtagtcccagctaattggaagggtgaggcgggaggatcgcttgaacctgggaggcggaggttccagagagccaagatcgcaccactgcactccagcctgggcgacagaacgagaccctgtctccaaaggaaaaacaaaaaagaagaataaaataatttggatgaaaatcatgtttatttaaatagtaatgtcatgagactattaaagatgtgccagagtttcaatgaaaatcattaaagtaggacagctaagaaattaatattaatatcaaaattattgataatcttaaattattgattattccttaacgcactccattctccttttacattttatcatgtttcttttgaatatatgaattggcaaaggacttgatgaaactgagtactaagatttggtacagagtatgtcaggaagacaactcagattgccattttaaataaagttgtacatgaacaataattggaatcatcaggtaatttttttaaacaaaggttcttcatttactgttatgattggaaaaaaattagaaaataaagtaagtgccataggctaattaaaaaataaaaccttggccgggcgcggtggcttacgcctataatcccagcactttgggaggccgagacgggcagatcacgaggtcaggagattgagaccatcctggctaacacggtgaaaccccatctctactaaaaatacaaaaaaatgagccgggtatggtggtgcatacctgtagtcccagctactcgggaggctgaggcaggagaatggcatgaacccggaaggcagagcttgcagtgagccgagatcacgccactgcactccagcctgggcgacagagtgagactctgtctcaaaaaaaaaaaaaaaaaaaaaaaaaaagtaaataaaaccttagggcaagcatgttccaaaacagaagacatcaaaccagggtgtgttggcattatttattttatgtagagtattgagatgtgataaacctttgtatatgccatcactgctccatttcctaaagtattttggtgttttcatgggactacatcttgtataatttgacatgtatgacctgactagtcctaacagttctttttaaacgtgtatttgagacttaaatattggaaaaggtaacccagtgccataaagcagaaacagtgacctttaaaatgactaaaatttcaacccagtatagtttcatacctatttcatgctttctcgtaagaaagaatttcatgttttagaaacatttctttcactatgggattaataatatgacactgaaatggaattatatatgtcagctacaattcaggcattgttttgggatatggttagattgacaggcaacgttttggaatatggttagacggggagggaacacggtactgtttaacatcttaagagtatgtgggggtatgtgtatacagaatgtttttgtttttgctcatcacaaccaggtttcatcagtatttaaaatatttaagattgtggcttggaatgtggttcagccatttactcacttatacaaatattcagaagtgtaataaaaatgtgaatgaagaaaactttgatataactcttcttgcttagataaatggttgcagatgacatcacttttagtataacagaacatttctggttttgtttgtattatcttgtaaacatggccaacatggtgaaaccccatctctactaaaaatacaaaaaattagccgggagtggtggcatgcggctgtaatcccagctactcgggaggccgaggcaggagaatcacttgaacccgggaggcagaggttgcagtgagccgagatcgtaccactgcaccccagcctgggcgacagagtgagactccgtcacaaaaaaaaaaaaaaaagggaaagaaaaagaaagaaatataccttttaaggagttcctttagtgtgtctctgttggtagcttgtttatgtttgatgatatatttatttcatcctcactcatctgatggataatttaggtagttgtacacttttttttttttttttttttttgaaacagagtcttgctctgtcgtccaggctggagtgcattgttgtgatccctgctcactgcaacctctgcttcctgggttcaagtgattctcctgcctcagcctaccaagtagctgggactacaggcgcacaccaccacaccctgctattttttatatttttagcagagacagggttttgccgttgttggccaggctggtctcgaactcctgatctcaggtgatctgcccacctcagcctcctaaagtgctgggattacaggtgtgagccactgtgcccagccggtagctgtacacttctaagcttggttattttctcttggtactttgaaaatataccattattgactggcacccgttttgctgttgtgaaatctgctatgaatgtaatagttgtttgtacagaatgtcttttctctctggttgctttatctctggtattctgcggtttcattttcatgtgtttgaaatttctttacttatcctgcttggtattcagtttgcttcctgaatctgaagattcctgtctttaatcaattctggaaatttttcagccattatctcatcattatctgcctctcttggtttttctcttttctctcctggaattctcattaggagtatggtagagaccttaacaatctatccccatgtctcttaagcttgctttcatttttcctgtctctaggctgttctcagtaatttcttttggtctgtcttccagtttactaattttctcttcaattgtgtgtaatctgctatttaaccaaacattggctttggtttcagttattctttgtttctagaaattctacttaattcttttgttgttgttgtttttgttttgagacggagttttgctcttgttgcccaggctggagtgcaatggcatgttcttggcttactgcaacctccacctcccaggttcaagtgattctcctgcctcagcctcctgagtaggtgggactacaggtgcccaccaccacgcctggctaatttttgcatttttagtagagactggggtttcaccatgttggccaggctggtctcgaactcctgacctcgggtgatctgcccacctcggcctcccaaactgctgggattacaggtgtgagccaccgcgcctggcctacttatttcattttcaaagctgtttggtcgttaaaaaaaaaaagcatcttgtttcttgctcgtgttttctagctcctgtcttactttctttaatcatttaaataggcgtactgtatattctgtagccatcaattccagcagctaaagtctgtgtgggtttcattatgttctttgtagtttctattgactcactcatcgctgcttatttcctcaggtgtattgtatttcgggtgctcatgtttggcttcggaaatcctgtttatctgtgaaatcctttgagaccgaggttgagggtacacctgtgcagtcaggatttgtatttgtttcttccaggccccccagaactccagcctgggaccactttcttgacaaatttgaactttaaaaccttagtgagggaaaattctaaagggttattaattctaaagggaaaattttcttctgccctgcaagcccactgcaggccaaagtaaacaaatgtcctgtgtgtctccctgggctagcatagggttttttttccccccagtctgttcttggagggtatagcgccttgaatttccagtcctatgcaggatcacagtcctgacttcttgtataggcccaagtccttgtctttagtttcctgtgcacctattaaaactctagagatttctgagataagtaggtgccctcaacacaaccatggcttcactgccctgcttaccactctggtgtcctgccccttcttcaggttgagtgtgaaatttggaagactgtcagaaacattctattttcattcttgcaagttatgcctttgaaacgatgtcttatttatccagtgtttctgtgtgtttaataatcagagcatttttcaggttatctcttactgtgccatgttgctccttgattcctttctctcctgtacccactgcatcaattgagttttttgctctacattgatagagaagcacaattcctctttctttccactgccttcctactttatttcccttctattcttgcatctctatactccattatccacattgcagtctagtgatcttaaagtgtaagccaggtaacatcgctttcctgcttaaaaaagccttttaatggttttttgtaatatagactttttaccatggcattcaggatctttcatgacctgaatcttgtctgctgtagtgttttcttaatagtaccgccttcttgttctaggccccagctacacaggccttcttaactgaccgtagcaagcccttttctttcttctcctgcctgtattgcttttctctgggtgcttcttattgctgtctctttctgttcttgccttaagtgtcacctccttaacgaggccttctccgaccaccctatccaaagtaacctcgccaagttttttcttataccaggtgtgactactttaattactgcgtcctcatataagctccacaaaggcttggtgaatcgtgttcacccttgcatttcttttgtgttttttgttttgtttttgaggcatgacgactctgtcacgctgaagtgcagtggcccgatcttggctcactgcagcctcctcctcctgggttcaagcgattctcctgccttagtctcccgagtagctgggactacagatgcgtgccaccatgcccagctaatttttgtatttttagtagaaacggggtttcatcgtgttggccaggctggtctcgaactcccgacctcaggtgatccgcctgcctcagcctcccaaagtgctgggattacaggcgtgagccaccgcacctgaaccacccttgtatttctgatgcttaacagtgtctagtccatatcagacactcaaatatttgtagaataagtgaaacattgatgaactcctccgtggataaaatagggaagtcttaatttgcaaggaggtgatacttaatttagcagcaaaattttagttaagaatttgtaagcaaaaaagcaaaatggataacggatgaattcccagaaacaaatgtcgcggagcagatgtgtataacagcaatcgtctgtcagcgtcttccgtcggcagaaacctgcttggagacaatgctgaattaaatgagggactggctgctcctctcaatacaaagactacccaaggaataaaagcaacgtctatcaccgaactactactcccagcggcccccgcgcgggcctgcccatgggaggtggcgctcgtctccgccccggggagctccggcttcggggcgggaggggttctgggttctggccccgccccgccccgctccccgccgtcttcctcccccagggttgtggccacgcgcagcggcggcggttgttccgcttcccctccggcccgggccgtcgccattgccgaaggctccctcccctcccctccctggcgtgcgcaggactccgccgccgctgggcctagcggtagcagcggctgctccagcgcggcgtctcttcccgccccgcttccccttccctcccctcccctccccgcaccgcgcgctagcccggggcggctccgcagcccgccgggagctctgaccgaggcgcctcgctggggcggggaccttgccttgcccggggtaagtgcacacaggccggccggcgcgggacgcaggccgggtctcttcctcctccttccttctccgtggcctggcgggcgggagcggcccgggacggccgacctgccccgcgcggggccggggagccgccacctgcgtgctgggagccgcagctcctggggcggtggctcattgtctgctccccagggccgttttcttcgctggctttagccagaaatgggaagctcgctgggctgcggaggtctgactcttcctggacccagccctgctctgaacctcgcggcaccacggtctctgccgactctcggtcttccctcccctcgcgtttcaccctcttcctttgctccgttttcttaatgctggaccagactctccggttttgttccttgatttttcctctcactgattctcagcccctgcttgctcgctctctgttcacccgtttcactgctcaggaatattgtcgcgagtagcttgactgttttctcagctccagcctgtaacctcttttccacattccacattggtaaaaacgtagagcgtcccgggcgcttgagggccaccgcttacgaacggatctttcggagcttctcctcgctcctgtttgagcttcagcctaggggtgaaatttgcttctttagataacttaggtgaagttaagattggtttttcaccatgtttggctctcttggaaacacacgcacgcacaaacacaaaacgttgccactcaaccttttaactaattctttaaagataagtcatccaagaacagaagcgtgtcatcgtcagtgggtgtgaggttgtacccatccttgtatcttaattttagtagtactctccctgggcagtgtgagcgtgatttgttgtcccttgataaataacgaactccggttgatatcattatctcacttctgcgttacaggcgatgtgtcctttctttgttttcttttttaacctttataaaaagacaaaatggttaggcctaaaattaaactacgaagagctgtgttttggatcaaggttgtgcacgtcacgttttttcccctgctgtgttcgactcttccgctcttataagtaggcaggatattgaaatgtacaagaatttgctctggggattttgtttttgtagggttgtccaatagaataacactcagtaaagttacattgggatgaaggcagtgaatagtaatttttaaagcaggttaaaacttgtcaactttgccagaaggtctgtggcttctgtaaagcccactcatgctcgtgtatatatgaagagcctttttcatgttctgttaggagtatggatttcaggcaactttttcactgtgtcatcctcggctattaaatctttcgagctacttattagccaagcacattgattgacacttattacggaaagtgaacctgtaatagatgtaggtcttaaaccaactttccgatttggtaacaggttgacctaaattcagtgtattttgtgttttcactaagtagcccattgttacctttccctccagcaaggctctgaaaaaagtggctccaatactcagcttcaatactgtcatcatttcttaaatagtagtatcagttgtccttaacttaatggatgttttattggcctgagggattaaggtgtagaaaggttggagttttgttggagtttgaaacttggtctgtagatgttggcttctctgccagtttcttctaatcagcagatatttttatgaaggaagagttcctgggtatttcacttcccttagggccttggtttatggtttactctcattcagagagagatactattctggactccgtgctatttaatactaaccttgcaaacccaaattcaaaattaagtttatagttcgagtatacaggcgatagggctctctgatctttatgatagacaggttcccaagtagatgcggttaacaattaatatttcttttttttttttttttttgagacggagtttcagttgcccaggctggagtgcaatggtgcgatcaccgcaacctccgcctcctgggttcaagcgattctcctgtctcagcctgctgagtagctgggattacaggcacgcgccaccacgcgcggctaattttgtatttttagtagagatggggtttcaccgtgttggttaggctggtctcgaactcccgacctcaggtcatctgcccgcctcagcctcccaaaatgctgggataggcgtgagccacggcacaccaccaacagtttctatttcaattatactttttaagagagactagaacttgttcaggtagctaaagataaactttcaattatacttttctaatatttaagaacttcaagtagccaaggataaaatgagtaggaattgttagattcttccttttatccatcaaaatcgattattattataataatatttgagtatatttcttttggctttctgacttttacacttttggttaaaatttgaaactgggtcttcttcgccgggcgcggtggctcacgcctgtaatcccagcactttggaaggccgaggcgggcggatcacgaggtcaggagatcaagaccatcctggctaacacggtgaaaccccgtctctactaaaaatacaacaaaaaattagccgggcttggtggcaggcgcctgtagtcccagctactcgggaggctgaggccggagaatggcgtgatgaacccgggaggcggagcttgcagtgagtcgagatcgcgccactgcactcccgcctgggctacagagcgagactccgtctcattaaaaaagaaaaagaaaaagaaactgggtcaacttcaagactttaagtcgtaaaggtttccatcagtttggtataagagttgagtttccagactaatcagagggagggtgttaattgcaaattgtgtgtccaagctcttcctagtatcctttttgtgccttaacagagcagaataggaaaggaaaaaaatccctcattgcccccaaaaaataaaatactggttgttttcttctgtgatcagagttgagtttcatcacttcttcccttctagggtcacctgcctggttaagggtagtcagtctgaacattcattcaggatttcagtgttccagcctactatctctgagtttctttagtacttactccatgtatcccatgtggttaggagctagagtcctgcgtttgaattcttgctgttctactttaccctgggcaagatatacattcttttcaagacttgcttttctcacctgtaagatggggataataataataataccaatttcacagggatatttagatcaaatgagggaatgcaggtaaaggattctgtaattataggtcttaataaacgttagttaatagtctgttcttacatgctgtagagtcgatactcctaaacttagaattaaaactgccttctaggccgggtgcggtggctcacacctgtaatcacaacacattaggaggctgaggtgggccgatcacttgaggtcaggagttcaagaccagcctggccaacatggtgaaacctatattctctactattctttagtagagaatttagtattctctactaaaaataaaaatattagctgggcgtggtggcgggcgcctgtaatcccagctactcaggaggctgaggcaggagaactgcttgaacccaggaggcagaggctgcagtgagctgagattgcgccactgcacttcagcctgggtgacagagtgagactccgtctcaaaaacaaacaaacaaacaaacaaaaaactgccttctaaaagaacgaagtttctgagaccgtaactaaaaataaaaattacttttggatgaataaaatataatttttcaggagaaaaaatatgtaatagtttcaccactgaaataaaacatagggtttttgaacacaaatttctcagatttaaaaatatgcatatttcctgtataaaagttgaaaagtgggcagtggctggtggtgcctgtagtcctagctacttgggaggctgaggatcctttgagtccaggaatttgaggtcagccaggacaatacagggggaccccatctcttaaatcagacaaaaataaaagtagaaaaaaatattaaataagaaatttggaaagtggtaaaaacttttaagacaaaattaccttagtctcagctggcagaaccattgtaacaaactggaacagtggttttgttccttattttaaatttaaattctaaaagcagtacatatttattataaaaggttcaaacaagtcaattaaatatttaaagagtgaaaattctttgggagactgaggcaggaggatcacctgagctcaagagttggaggtatagtgagctatgattgcaccattgcattccagcctgggtgacagagcaagaccctgtcttataaaattcttaaaaagtgaaaattactttctctttttagtcccattccttagaagtacctacccgctgttaatagttttacttactgagttagaaataagtaccttttgtgtgtcggatactttttatgttgattttaaaataaaaaatctgatcattaagtattgttttccatatcatgacatatagtggcacctctactttttaagtcattagatattatgctgtatggtagtactttaattatttgtgatcatttatgttatttctaactttgagcaactaaaactagagccttaatgaacttatacgtatgtctttgtgcacatgcatatgtagataagtatttccattaaaacgacttgtaagtgtgcatttaaatttcttttttcttttttttttgaattgcattccaaaaagacttgtaatgtatatttccttattgagttgtagaagctcttcacatgtaatagatattaatctattgccttctgtttaagatcttcctcattccacctttacaaaaaacattcttatgtgttttcttctggtacttttaataattattgtgtttcaatctttttttttttttgtgacagagtctcactctgtcactcaggctggagtgcagtgttggatctcagctcactgcaacttccgcctcccgggttcaagtgattcccctgcctcagcctcccgagtagctgggattacaggcaccataccatcgcacccaactgatttttttttttttttttttttgtagagacggggttttgctatgttggccaggctggtctcaaactcctgacctcaggtgatctgcctgccttggcttcccgaagtgttgggattacaggcgtgagccaccgtgcccagcccattgtgtttcaatcttaatctttctggaattttttcatgcctggtggggataaaagagttttaaaatagttttgctacagaaataaaatacaggtataaaaatatttggccgggtgcagtggcttacgcctgtaatcccagcactttgggaggcctaggtgggtggatcacctgatgtcagcagttggaaacagcctaaccaacgtggtgaaaccttgtgtctactgaaaacacaaaaaattagctgggtgtggtggtgcacacctgtagttccagctactccggaggctgaggcaggagaattgtctgagcccgggaggcggaggttgcaatgacctgagatcaagccactgcactccagcctgggcaacagaacgagactccatctctaagtaaaaaaaaaaaaagaagaagtagtaactagatttttctgttcattggtatttttattatcttactggacttcagtaaacgtctttattttgttttccaggttcattgttttatctgagaataatagtaacttcagtcacttttctatggttacaatatttaaccttttttttttttctttttctttcttttttaaagacggggtttcaccgtattagccaggatggtctcgatctcctgacctcgtgatccgcctgcctcagcctcccaaagtgttggacaggcatgagccaccgtgcccagcccttaaccctgttttaggtctttattacattggcctgaagttccaagacttggttaaacaagagacgtgtcgttgtcttgaaatgactctggtattaatatttttacagttagggatgatggcagctgttggatttagagaaagattattattttattctgtttctgctttacaaaaaatagg

SEQ ID NO: 127 - DNA, 3288 bp, Homo sapiens
cccacagcaaggaggtagcccagccccgcgttcggctgctctcgaggaggccggagcccccggagacgatgcgccccgcgcagccgcctgcgcctgcgggagccggctgcccttgagatggagttgctgcctctttggctctgcctgggttttcacttcctgaccgtgggctggaggaacagaagcggaacagccacagcagcctcccaaggagtctgcaagttggcataagggccatgtgttctgaaattattttgaggcaagaagttttgaaagatggtttccacagagaccttttaatcaaagtgaagtttggggaaagcattgaggacttgcacacctgccgtctcttaattaaacaggacattcctgcaggactttatgtggatccgtatgagttggcttcattacgagagagaaacataacagaggcagtgatggtttcagaaaattttgatatagaggcccctaactatttgtccaaggagtctgaagttctcatttatgccagacgagattcacagtgcattgactgttttcaagcctttttgcctgtgcactgccgctatcatcggccgcacagtgaagatggagaagcctcgattgtggtcaataacccagatttgttgatgttttgtgaccaagagttcccgattttgaaatgctgggctcactcagaagtggcagccccttgtgctttggagaatgaggatatctgccaatggaacaagatgaagtataaatcagtaagtatataagaatgtgattctacaagttccagtgggactgactgtacatacctctctagtatgttctgtgactctgctcattacaatcctgtgctctacattgatccttgtagcagttttcaaatatggccatttttccctataagttttatgtagttaaatgcttcctagaaacctaaataagatctattaatttctgacgagaggtgttcttctagaattaattacttttatcttttgtcttcatttgtggccaaaattatgtttactagaggaaatttgggatcattctcagctaattccaaaatgtagtgctctattgcatggatccttggtaatcctcaagcatcagatgccataaggggaaacttaattctgctaaattaatgtttattttgtgagaagtgactttatcttcatttggggtagaaaaattatttctttatgtagtagagacaaattattctcattttgcaagtactttcaatttaagctacaaattgagaaaaccgttataaataagaataaaataggccaggcacagtggctcacacctgtaatcccagcactttgggaggccgaggtgggcggatcaccagaggtcaagagtttgagaccagcttggtgaaaccctgtctctactaaaaatacaaaagttagctggggctggtggtgggcatctgtagtcccagctaattggaagggtgaggcgggaggatcgcttgaacctgggaggcggaggttccagagagccaagatcgcaccactgcactccagcctgggcgacagaacgagaccctgtctccaaaggaaaaacaaaaaagaagaataaaataatttggatgaaaatcatgtttatttaaatagtaatgtcatgagactattaaagatgtgccagagtttcaatgaaaatcattaaagtaggacagctaagaaattaatattaatatcaaaattattgataatcttaaattattgattattccttaacgcactccattctccttttacattttatcatgtttcttttgaatatatgaattggcaaaggacttgatgaaactgagtactaagatttggtacagagtatgtcaggaagacaactcagattgccattttaaataaagttgtacatgaacaataattggaatcatcaggtaatttttttaaacaaaggttcttcatttactgttatgattggaaaaaaattagaaaataaagtaagtgccataggctaattaaaaaataaaaccttggccgggcgcggtggcttacgcctataatcccagcactttgggaggccgagacgggcagatcacgaggtcaggagattgagaccatcctggctaacacggtgaaaccccatctctactaaaaatacaaaaaaatgagccgggtatggtggtgcatacctgtagtcccagctactcgggaggctgaggcaggagaatggcatgaacccggaaggcagagcttgcagtgagccgagatcacgccactgcactccagcctgggcgacagagtgagactctgtctcaaaaaaaaaaaaaaaaaaaaaaaaaaagtaaataaaaccttagggcaagcatgttccaaaacagaagacatcaaaccagggtgtgttggcattatttattttatgtagagtattgagatgtgataaacctttgtatatgccatcactgctccatttcctaaagtattttggtgttttcatgggactacatcttgtataatttgacatgtatgacctgactagtcctaacagttctttttaaacgtgtatttgagacttaaatattggaaaaggtaacccagtgccataaagcagaaacagtgacctttaaaatgactaaaatttcaacccagtatagtttcatacctatttcatgctttctcgtaagaaagaatttcatgttttagaaacatttctttcactatgggattaataatatgacactgaaatggaattatatatgtcagctacaattcaggcattgttttgggatatggttagattgacaggcaacgttttggaatatggttagacggggagggaacacggtactgtttaacatcttaagagtatgtgggggtatgtgtatacagaatgtttttgtttttgctcatcacaaccaggtttcatcagtatttaaaatatttaagattgtggcttggaatgtggttcagccatttactcacttatacaaatattcagaagtgtaataaaaatgtgaatgaagaaaactttgatataactcttcttgcttagataaatggttgcagatgacatcacttttagtataacagaacatttctggttttgtttgtattatcttgtaaacatggccaacatggtgaaaccccatctctactaaaaatacaaaaaattagccgggagtggtggcatgcggctgtaatcccagctactcgggaggccgaggcaggagaatcacttgaacccgggaggcagaggttgcagtgagccgagatcgtaccactgcaccccagcctgggcgacagagtgagactccgtcac

SEQ ID NO: 128 - protein, 171 aa, Homo sapiens
MCSEIILRQEVLKDGFHRDLLIKVKFGESIEDLHTCRLLIKQDIPAGVDPYELASLRERNITEAVMVSENFDIEAPNYLSKESEVLIYARRDSQCIDCFQAFLPVHCRYHRPHSEDGEASIVVNNPDLLMFCDQEFPILKCWAHSEVAAPCALENEDICQWNKMKYKSVSI

SEQ ID NO: 129 - DNA, 1085 bp, Homo sapiens
ggctgcaggcagctgggaaccgcggacgctaggcgcgcgcacccagcactcggtcccagccgataaatctggggcagcgcgcggtaggagctgcgggcggccaggccccttcctgcgtccgcacctggccccgcgcgcccctctcgggcgtccggcttccggcgtcctggcggctcgggtggcggcggttcgggcggccgcctggctgctcctcggggcggcgaccgggctcacgcgcgggcccgccgcggccttcaccgccgcgcgctctgacgccggcataagggccatgtgttctgaaattattttgaggcaagaagttttgaaagatggtttccacaggaactccaaatatatgtatactagactacttgatattgtttaaaggccatggaggcggttccttttttctccctggtcttttttcctctctgtgcttcagtgtgggtagtttctgttgctgtgtctccaagtcactgatcttttcttcttcagcatctaatggcttttaattacatctggagaccttttaatcaaagtgaagtttggggaaagcattgaggacttgcacacctgccgtctcttaattaaacaggacattcctgcaggactttatgtggatccgtatgagttggcttcattacgagagagaaacataacagaggcagtgatggtttcagaaaattttgatatagaggcccctaactatttgtccaaggagtctgaagttctcatttatgccagacgagattcacagtgcattgactgttttcaagcctttttgcctgtgcactgccgctatcatcggccgcacagtgaagatggagaagcctcgattgtggtcaataacccagatttgttgatgttttgtgaccaaggtgagggctgcaagtgttttctaagggttgaaacatcagaataaaggtatggtggcaagtcctccttctgctaggctggctggcaaggccctatgtcttgacctaggtggtagttacaagggtatttatttgccttataataattcactaaactatgtatttgagtagatttttatgtgtgtgctttaatttacaataaaaaagtta

SEQ ID NO: 130 - protein, 83 aa, Homo sapiens
MVSENFDIEAPNYLSKESEVLIYARRDSQCIDCFQAFLPVHCRYHRPHSEDGEASIVVNNPDLLMFCDQGEGCKCFLRVETSE

SEQ ID NO: 131 - DNA, 1022 bp, Homo sapiens
ggctgcaggcagctgggaaccgcggacgctaggcgcgcgcacccagcactcggtcccagccgataaatctggggcagcgcgcggtaggagctgcgggcggccaggccccttcctgcgtccgcacctggccccgcgcgcccctctcgggcgtccggcttccggcgtcctggcggctcgggtggcggcggttcgggcggccgcctggctgctcctcggggcggcgaccgggctcacgcgcgggcccgccgcggccttcaccgccgcgcgctctgacgccggcataagggccatgtgttctgaaattattttgaggcaagaagttttgaaagatggtttccacagagaccttttaatcaaagtgaagtttggggaaagcattgaggacttgcacacctgccgtctcttaattaaacaggacattcctgcaggactttatgtggatccgtatgagttggcttcattacgagagagaaacataacagaggagaagacttcatggcggcggctatggttgccttctgataattgaaggatccctagtggaataaggaacgaatttattgcagacattgtaagcaagaacaactggtaaatgttataggcagtgatggtttcagaaaattttgatatagaggcccctaactatttgtccaaggagtctgaagttctcatttatgccagacgagattcacagtgcattgactgttttcaagcctttttgcctgtgcactgccgctatcatcggccgcacagtgaagatggagaagcctcgattgtggtcaataacccagatttgttgatgttttgtgaccaaggtgagggctgcaagtgttttctaagggttgaaacatcagaataaaggtatggtggcaagtcctccttctgctaggctggctggcaaggccctatgtcttgacctaggtggtagttacaagggtatttatttgccttataataattcactaaactatgtatttgagtagatttttatgtgtgtgctttaatttacaataaaaaagtta

SEQ ID NO: 132 - protein, 171 aa, Homo sapiens
AAGSWEPRTLGARTQHSVPADKSGARRSCGRPGPFLRPHLAPRAPLGRPASGVLAARVAAVRAAAWLLLGAATGLTRGPAAAFTAARSDAGIRAMCSEIILRQEVLKDGFHRDLLIKVKFGESIEDLHTCRLLIKQDIPAGVDPYELASLRERNITEEKTSWRRLWLPSDN

SEQ ID NO: 133 - DNA, 5125 bp, Homo sapiens
gccgagcagcccgctctccatgtgacttcagtttccgtccgttccttccgctggtgctaaaataatctgatgccccacagcaaggaggtagcccagccccgcgttcggctgctctcgaggaggccggagcccccggagacgatgcgccccgcgcagccgcctgcgcctgcgggagccgtgagtatttcccgcgtgggggcgtccccggggcacagccggggcccttctccaggtgggcgagctcgagcgagggctgcccttgagatggagttgctgcctctttggctctgcctgggttttcacttcctgaccgtgggctggaggaacagaagcggaacagccacagcagcctcccaaggagtctgcaagttggtgggtggagccgctgactgccgagggcagagcctcgcttcggtgcccagcagcctcccgccccacgcccggatgctcaccctggatgccaaccctctcaagaccctgtggaatcactccctccagccttaccctctcctggagagcctcagcctgcacagctgccacctggagcgcatcagccgcggcgccttccaggagcaaggtcacctgcgcagcctggtcctgggggacaactgcctctcagagaactacgaagagacggcagccgccctccacgccctgccgggcctgcggaggctggacttgtcaggaaacgccctgacggaggacatggcagccctcatgctccagaacctctcctcgctgcggtccgtgtccctggcggggaacaccatcatgcggctggacgactccgtcttcgagggcctggagcgtctccgggagctggatctgcagaggaactacatcttcgagatcgagggcggcgctttcgacggcctggctgagctgaggcacctcaacctggccttcaacaacctcccctgcatcgtggacttcgggctcacgcggctgcgggtcctcaacgtcagctacaacgtcctggagtggttcctcgcgaccgggggagaggctgccttcgagctggagacgctggacctgtctcacaaccagctgctgttcttcccgctgctgccccagtacagcaagttgcggaccctcctgctgcgcgacaacaacatgggcttctaccgggacctgtacaacacctcgtcgccgagggagatggtggcccagttcctcctcgtggacggcaacgtgaccaacatcaccaccgtcagcctctgggaagaattctcctccagcgacctcgcagatctccgcttcctggacatgagccagaaccagttccagtacctgccagacggcttcctgaggaaaatgccttccctctcccacctgaacctccaccagaattgcctgatgacgcttcacattcgggagcacgagccccccggagcgctcaccgagctggacctgagccacaaccagctgtcggagctgcacctggctccggggctggccagctgcctgggcagcctgcgcttgttcaacctgagctccaaccagctcctgggcgtcccccctggcctcttcgccaatgctaggaacatcactacacttgacatgagccacaatcagatctcactttgtcccctgccagctgcctcggaccgggtgggcccccctagctgtgtggatttcaggaatatggcatctttaaggagcctgtctctggagggctgtggcctgggggcattgccagactgcccattccaagggacctccctgacctacttagacctctcaagcaactggggggttctgaatgggagcctcgccccactccaggatgttgcccccatgttacaggtcctgtctctcaggaacatgggcctccactccagctttatggcgttggacttctctgggtttgggaatctcagggacttagatctgtcggggaattgcttgaccaccttcccaaggtttgggggcagcctggccctggagaccctggatctccgtagaaactcgctcacagcccttccccagaaggctgtgtctgagcagctctcgagaggtctgcggaccatctacctcagtcagaatccatatgactgctgtggggtggatggctggggggccctgcagcatgggcagacggtggccgactgggccatggtcacctgcaacctctcctccaagatcatccgcgtgacggagctgcccggaggtgtgcctcgggactgcaagtgggagcggctggacctgggcctgctctacctcgtgctcatcctccccagctgcctcaccctgctggtggcctgcactgtcatcgtcctcacttttaagaagcctctgcttcaggacattcctgcaggactttatgtggatccgtatgagttggcttcattacgagagagaaacataacagaggcagtgatggtttcagaaaattttgatatagaggcccctaactatttgtccaaggagtctgaagttctcatttatgccagacgagattcacagtgcattgactgttttcaagcctttttgcctgtgcactgccgctatcatcggccgcacagtgaagatggagaagcctcgattgtggtcaataacccagatttgttgatgttttgtgaccaaggtatataagaatgtgattctacaagttccagtgggactgactgtacatacctctctagtatgttctgtgactctgctcattacaatcctgtgctctacattgatccttgtagcagttttcaaatatggccatttttccctataagttttatgtagttaaatgcttcctagaaacctaaataagatctattaatttctgacgagaggtgttcttctagaattaattacttttatcttttgtcttcatttgtggccaaaattatgtttactagaggaaatttgggatcattctcagctaattccaaaatgtagtgctctattgcatggatccttggtaatcctcaagcatcagatgccataaggggaaacttaattctgctaaattaatgtttattttgtgagaagtgactttatcttcatttggggtagaaaaattatttctttatgtagtagagacaaattattctcattttgcaagtactttcaatttaagctacaaattgagaaaaccgttataaataagaataaaataggccaggcacagtggctcacacctgtaatcccagcactttgggaggccgaggtgggcggatcaccagaggtcaagagtttgagaccagcttggtgaaaccctgtctctactaaaaatacaaaagttagctggggctggtggtgggcatctgtagtcccagctaattggaagggtgaggcgggaggatcgcttgaacctgggaggcggaggttccagagagccaagatcgcaccactgcactccagcctgggcgacagaacgagaccctgtctccaaaggaaaaacaaaaaagaagaataaaataatttggatgaaaatcatgtttatttaaatagtaatgtcatgagactattaaagatgtgccagagtttcaatgaaaatcattaaagtaggacagctaagaaattaatattaatatcaaaattattgataatcttaaattattgattattccttaacgcactccattctccttttacattttatcatgtttcttttgaatatatgaattggcaaaggacttgatgaaactgagtactaagatttggtacagagtatgtcaggaagacaactcagattgccattttaaataaagttgtacatgaacaataattggaatcatcaggtaatttttttaaacaaaggttcttcatttactgttatgattggaaaaaaattagaaaataaagtaagtgccataggctaattaaaaaataaaaccttggccgggcgcggtggcttacgcctataatcccagcactttgggaggccgagacgggcagatcacgaggtcaggagattgagaccatcctggctaacacggtgaaaccccatctctactaaaaatacaaaaaaatgagccgggtatggtggtgcatacctgtagtcccagctactcgggaggctgaggcaggagaatggcatgaacccggaaggcagagcttgcagtgagccgagatcacgccactgcactccagcctgggcgacagagtgagactctgtctcaaaaaaaaaaaaaaaaaaaaaaaaaaagtaaataaaaccttagggcaagcatgttccaaaacagaagacatcaaaccagggtgtgttggcattatttattttatgtagagtattgagatgtgataaacctttgtatatgccatcactgctccatttcctaaagtattttggtgttttcatgggactacatcttgtataatttgacatgtatgacctgactagtcctaacagttctttttaaacgtgtatttgagacttaaatattggaaaaggtaacccagtgccataaagcagaaacagtgacctttaaaatgactaaaatttcaacccagtatagtttcatacctatttcatgctttctcgtaagaaagaatttcatgttttagaaacatttctttcactatgggattaataatatgacactgaaatggaattatatatgtcagctacaattcaggcattgttttgggatatggttagattgacaggcaacgttttggaatatggttagacggggagggaacacggtactgtttaacatcttaagagtatgtgggggtatgtgtatacagaatgtttttgtttttgctcatcacaaccaggtttcatcagtatttaaaatatttaagattgtggcttggaatgtggttcagccatttactcacttatacaaatattcagaagtgtaataaaaatgtgaatgaagaaaactttgatataactcttcttgcttagataaatggttgcagatgacatcacttttagtataacagaacatttctggttttgtttgtattatcttgtaaacatggccaacatggtgaaaccccatctctactaaaaatacaaaaaattagccgggagtggtggcatgcggctgtaatcccagctactcgggaggccgaggcaggagaatcacttgaacccgggaggcagaggttgcagtgagccgagatcgtaccactgcaccccagcctgggcgacagagtgagactccgtcac

SEQ ID NO: 134 - protein, 837 aa, Homo sapiens
MPHSKEVAQPRVRLLSRRPEPPETMRPAQPPAPAGAVSISRVGDGHSRGPSPGGRARARAALEMELLPLWLCLGFHFLTVGWRNRSGTATAASQGVCKLVGGAADCRGQSLASVPSSLPPHARMLTLDANPLKTLWNHSLQPYPLLESLSLHSCHLERISRGAFQEQGHLRSLVLGDNCLSENYEETAAALHALPGLRRLDLSGNALTEDMAALMLQNLSSLRSVSLAGNTIMRLDDSVFEGLERLRELDLQRNYIFEIEGGAFDGLAELRHLNLAFNNLPCIVDFGLTRLRVLNVSYNVLEWFLATGGEAAFELETLDLSHNQLLFFPLLPQYSKLRTLLLRDNNMGFYRDLYNTSSPREMVAQFLLVDGNVTNITTVSLWEEFSSSDLADLRFLDMSQNQFQYLPDGFLRKMPSLSHLNLHQNCLMTLHIREHEPPGALTELDLSHNQLSELHLAPGLASCLGSLRLFNLSSNQLLGVPPGLFANARNITTLDMSHNQISLCPLPAASDRVGPPSCVDFRNMASLRSLSLEGCGLGALPDCPFQGTSLTYLDLSSNWGVLNGSLAPLQDVAPMLQVLSLRNMGLHSSFMALDFSGFGNLRDLDLSGNCLTTFPRFGGSLALETLDLRRNSLTALPQKAVSEQLSRGLRTIYLSQNPYDCCGVDGWGALQHGQTVADWAMVTCNLSSKIIRVTELPGGVPRDCKWERLDLGLLYLVLILPSCLTLLVACTVIVLTFKKPLLQDIPAGVDPYELASLRERNITEAVMVSENFDIEAPNYLSKESEVLIYARRDSQCIDCFQAFLPVHCRYHRPHSEDGEASIVVNNPDLLMFCDQGI

SEQ ID NO: 135 - DNA, 3337 bp, Homo sapiens
ggctgcaggcagctgggaaccgcggacgctaggcgcgcgcacccagcactcggtcccagccgataaatctggggcagcgcgcggtaggagctgcgggcggccaggccccttcctgcgtccgcacctggccccgcgcgcccctctcgggcgtccggcttccggcgtcctggcggctcgggtggcggcggttcgggcggccgcctggctgctcctcggggcggcgaccgggctcacgcgcgggcccgccgcggccttcaccgccgcgcgctctgacgccggcataagggccatgtgttctgaaattattttgaggcaagaagttttgaaagatggtttccacagagaccttttaatcaaagtgaagtttggggaaagcattgaggacttgcacacctgccgtctcttaattaaacaggacattcctgcaggactttatgtggatccgtatgagttggcttcattacgagagagaaacataacagaggcagtgatggtttcagaaaattttgatatagaggcccctaactatttgtccaaggagtctgaagttctcatttatgccagacgagattcacagtgcattgactgttttcaagcctttttgcctgtgcactgccgctatcatcggccgcacagtgaagatggagaagcctcgattgtggtcaataacccagatttgttgatgttttgtgaccaagagttcccgattttgaaatgctgggctcactcagaagtggcagccccttgtgctttggagaatgaggatatctgccaatggaacaagatgaagtataaatcagtatataagaatgtgattctacaagttccagtgggactgactgtacatacctctctagtatgttctgtgactctgctcattacaatcctgtgctctacattgatccttgtagcagttttcaaatatggccatttttccctataagttttatgtagttaaatgcttcctagaaacctaaataagatctattaatttctgacgagaggtgttcttctagaattaattacttttatcttttgtcttcatttgtggccaaaattatgtttactagaggaaatttgggatcattctcagctaattccaaaatgtagtgctctattgcatggatccttggtaatcctcaagcatcagatgccataaggggaaacttaattctgctaaattaatgtttattttgtgagaagtgactttatcttcatttggggtagaaaaattatttctttatgtagtagagacaaattattctcattttgcaagtactttcaatttaagctacaaattgagaaaaccgttataaataagaataaaataggccaggcacagtggctcacacctgtaatcccagcactttgggaggccgaggtgggcggatcaccagaggtcaagagtttgagaccagcttggtgaaaccctgtctctactaaaaatacaaaagttagctggggctggtggtgggcatctgtagtcccagctaattggaagggtgaggcgggaggatcgcttgaacctgggaggcggaggttccagagagccaagatcgcaccactgcactccagcctgggcgacagaacgagaccctgtctccaaaggaaaaacaaaaaagaagaataaaataatttggatgaaaatcatgtttatttaaatagtaatgtcatgagactattaaagatgtgccagagtttcaatgaaaatcattaaagtaggacagctaagaaattaatattaatatcaaaattattgataatcttaaattattgattattccttaacgcactccattctccttttacattttatcatgtttcttttgaatatatgaattggcaaaggacttgatgaaactgagtactaagatttggtacagagtatgtcaggaagacaactcagattgccattttaaataaagttgtacatgaacaataattggaatcatcaggtaatttttttaaacaaaggttcttcatttactgttatgattggaaaaaaattagaaaataaagtaagtgccataggctaattaaaaaataaaaccttggccgggcgcggtggcttacgcctataatcccagcactttgggaggccgagacgggcagatcacgaggtcaggagattgagaccatcctggctaacacggtgaaaccccatctctactaaaaatacaaaaaaatgagccgggtatggtggtgcatacctgtagtcccagctactcgggaggctgaggcaggagaatggcatgaacccggaaggcagagcttgcagtgagccgagatcacgccactgcactccagcctgggcgacagagtgagactctgtctcaaaaaaaaaaaaaaaaaaaaaaaaaaagtaaataaaaccttagggcaagcatgttccaaaacagaagacatcaaaccagggtgtgttggcattatttattttatgtagagtattgagatgtgataaacctttgtatatgccatcactgctccatttcctaaagtattttggtgttttcatgggactacatcttgtataatttgacatgtatgacctgactagtcctaacagttctttttaaacgtgtatttgagacttaaatattggaaaaggtaacccagtgccataaagcagaaacagtgacctttaaaatgactaaaatttcaacccagtatagtttcatacctatttcatgctttctcgtaagaaagaatttcatgttttagaaacatttctttcactatgggattaataatatgacactgaaatggaattatatatgtcagctacaattcaggcattgttttgggatatggttagattgacaggcaacgttttggaatatggttagacggggagggaacacggtactgtttaacatcttaagagtatgtgggggtatgtgtatacagaatgtttttgtttttgctcatcacaaccaggtttcatcagtatttaaaatatttaagattgtggcttggaatgtggttcagccatttactcacttatacaaatattcagaagtgtaataaaaatgtgaatgaagaaaactttgatataactcttcttgcttagataaatggttgcagatgacatcacttttagtataacagaacatttctggttttgtttgtattatcttgtaaacatggccaacatggtgaaaccccatctctactaaaaatacaaaaaattagccgggagtggtggcatgcggctgtaatcccagctactcgggaggccgaggcaggagaatcacttgaacccgggaggcagaggttgcagtgagccgagatcgtaccactgcaccccagcctgggcgacagagtgagactccgtcac

SEQ ID NO: 136 - protein, 215 aa, Homo sapiens
MCSEIILRQEVLKDGFHRDLLIKVKFGESIEDLHTCRLLIKQDIPAGVDPYELASLRERNITEAVMVSENFDIEAPNYLSKESEVLIYARRDSQCIDCFQAFLPVHCRYHRPHSEDGEASIVVNNPDLLMFCDQEFPILKCWAHSEVAAPCALENEDICQWNKMKYKSVYKNVILQVPVGLTVHTSLVCSVTLLITILCSTLILVAVFKYGHFSL

SEQ ID NO: 137 - DNA, 3207 bp, Homo sapiens
atggtcctcacccacgaggtgggcgcgaggagcaggctggtactggataggctcaatgtggccacaaagcctggccttggaaggcttggtggggtcccccgcccactaaacgtgaagtccgaacattcccttacatcgacaaagccttttcacacacactgtcccattcagtctcgacacaaccctgtgaggccatcaaggcaagtgctgtcctccgtggtcaccaccagagtgaaggagccaggcttgggcccaggcctccttccccagcccagggtcccttcctctacacaggtcccacctgctccttcttatcgagaagggcggtggcaggtagccactccctcagaagtgaccagagggaacaaacttgtgatactgaagggaaatcagatgctaatgcgttatgcggttgagcgcctatcagcagagattatgtgggtctctcctatagaaagggaagccagttggcttattcgtggccctaaggaagtgagggctgagcagggaggtgctcaaagcgggctcctcacactggctgtctggagtcgctgtgggaagggcccaggggaagaagggttgctggggcctctgaatccccccccgatggaggcagagcctcatccattcccagagagtctctcgccacgagccccggtacagcgcaggctgaccagagaaccggagaaccgggtgattcagttcttcgatacgcagggctggctcttccagagagactggagtcacagcagcagggctgcccttgagatggagttgctgcctctttggctctgcctgggttttcacttcctgaccgtgggctggaggaacagaagcggaacagccacagcagcctcccaaggagtctgcaagttggtgggtggagccgctgactgccgagggcagagcctcgcttcggtgcccagcagcctcccgccccacgcccggatgctcaccctggatgccaaccctctcaagaccctgtggaatcactccctccagccttaccctctcctggagagcctcagcctgcacagctgccacctggagcgcatcagccgcggcgccttccaggagcaaggtcacctgcgcagcctggtcctgggggacaactgcctctcagagaactacgaagagacggcagccgccctccacgccctgccgggcctgcggaggctggacttgtcaggaaacgccctgacggaggacatggcagccctcatgctccagaacctctcctcgctgcggtccgtgtccctggcggggaacaccatcatgcggctggacgactccgtcttcgagggcctggagcgtctccgggagctggatctgcagaggaactacatcttcgagatcgagggcggcgctttcgacggcctggctgagctgaggcacctcaacctggccttcaacaacctcccctgcatcgtggacttcgggctcacgcggctgcgggtcctcaacgtcagctacaacgtcctggagtggttcctcgcgaccgggggagaggctgccttcgagctggagacgctggacctgtctcacaaccagctgctgttcttcccgctgctgccccagtacagcaagttgcggaccctcctgctgcgcgacaacaacatgggcttctaccgggacctgtacaacacctcgtcgccgagggagatggtggcccagttcctcctcgtggacggcaacgtgaccaacatcaccaccgtcagcctctgggaagaattctcctccagcgacctcgcagatctccgcttcctggacatgagccagaaccagttccagtacctgccagacggcttcctgaggaaaatgccttccctctcccacctgaacctccaccagaattgcctgatgacgcttcacattcgggagcacgagccccccggagcgctcaccgagctggacctgagccacaaccagctgtcggagctgcacctggctccggggctggccagctgcctgggcagcctgcgcttgttcaacctgagctccaaccagctcctgggcgtcccccctggcctcttcgccaatgctaggaacatcactacacttgacatgagccacaatcagatctcactttgtcccctgccagctgcctcggaccgggtgggcccccctagctgtgtggatttcaggaatatggcatctttaaggagcctgtctctggagggctgtggcctgggggcattgccagactgcccattccaagggacctccctgacctacttagacctctcaagcaactggggggttctgaatgggagcctcgccccactccaggatgttgcccccatgttacaggtcctgtctctcaggaacatgggcctccactccagctttatggcgttggacttctctgggtttgggaatctcagggacttagatctgtcggggaattgcttgaccaccttcccaaggtttgggggcagcctggccctggagaccctggatctccgtagaaactcgctcacagcccttccccagaaggctgtgtctgagcagctctcgagaggtctgcggaccatctacctcagtcagaatccatatgactgctgtggggtggatggctggggggccctgcagcatgggcagacggtggccgactgggccatggtcacctgcaacctctcctccaagatcatccgcgtgacggagctgcccggaggtgtgcctcgggactgcaagtgggagcggctggacctgggcctgctctacctcgtgctcatcctccccagctgcctcaccctgctggtggcctgcactgtcatcgtcctcacttttaagaagcctctgcttcaggtgccctggcttcatacccggagtctctggcagacagacatgactcttccatggagaaaccaagagaataataactggccccgagtttatccagtcagtaagccgactgccagagacagtcctcgttctgaagggaacaaattctgtcccctttccctgcttctcccactccgacctggacccataggagaacctactggcgagggaaggacccacaaagcctgttaccagagttcttcgtgtggtaagcaaatcccttcagctgaatgccctggagaggaagcccagtgcttcctgttgtcttaccaacgctgtaaaatgcaagttagaaataaagcaaaaagggggaaaggggaaaaaaatgggaagctctcctggctagatcggaacgccagcctt

SEQ ID NO: 138 - protein, 1069 aa, Homo sapiens [sequence omitted]

SEQ ID NO: 139 - DNA, 3338 bp, Homo sapiens
cccacagcaaggaggtagcccagccccgcgttcggctgctctcgaggaggccggagcccccggagacgatgcgccccgcgcagccgcctgcgcctgcgggagccggctgcccttgagatggagttgctgcctctttggctctgcctgggttttcacttcctgaccgtgggctggaggaacagaagcggaacagccacagcagcctcccaaggagtctgcaagttggcataagggccatgtgttctgaaattattttgaggcaagaagttttgaaagatggtttccacagagaccttttaatcaaagtgaagtttggggaaagcattgaggacttgcacacctgccgtctcttaattaaacaggacattcctgcaggactttatgtggatccgtatgagttggcttcattacgagagagaaacataacagaggcagtgatggtttcagaaaattttgatatagaggcccctaactatttgtccaaggagtctgaagttctcatttatgccagacgagattcacagtgcattgactgttttcaagcctttttgcctgtgcactgccgctatcatcggccgcacagtgaagatggagaagcctcgattgtggtcaataacccagatttgttgatgttttgtgaccaagctggctccagaagaatgatcagattccggtttgattcctttgacaaaactatagagttcccgattttgaaatgctgggctcactcagaagtggcagccccttgtgctttggagaatgaggatatctgccaatggaacaagatgaagtataaatcagtatataagaatgtgattctacaagttccagtgggactgactgtacatacctctctagtatgttctgtgactctgctcattacaatcctgtgctctacattgatccttgtagcagttttcaaatatggccatttttccctataagttttatgtagttaaatgcttcctagaaacctaaataagatctattaatttctgacgagaggtgttcttctagaattaattacttttatcttttgtcttcatttgtggccaaaattatgtttactagaggaaatttgggatcattctcagctaattccaaaatgtagtgctctattgcatggatccttggtaatcctcaagcatcagatgccataaggggaaacttaattctgctaaattaatgtttattttgtgagaagtgactttatcttcatttggggtagaaaaattatttctttatgtagtagagacaaattattctcattttgcaagtactttcaatttaagctacaaattgagaaaaccgttataaataagaataaaataggccaggcacagtggctcacacctgtaatcccagcactttgggaggccgaggtgggcggatcaccagaggtcaagagtttgagaccagcttggtgaaaccctgtctctactaaaaatacaaaagttagctggggctggtggtgggcatctgtagtcccagctaattggaagggtgaggcgggaggatcgcttgaacctgggaggcggaggttccagagagccaagatcgcaccactgcactccagcctgggcgacagaacgagaccctgtctccaaaggaaaaacaaaaaagaagaataaaataatttggatgaaaatcatgtttatttaaatagtaatgtcatgagactattaaagatgtgccagagtttcaatgaaaatcattaaagtaggacagctaagaaattaatattaatatcaaaattattgataatcttaaattattgattattccttaacgcactccattctccttttacattttatcatgtttcttttgaatatatgaattggcaaaggacttgatgaaactgagtactaagatttggtacagagtatgtcaggaagacaactcagattgccattttaaataaagttgtacatgaacaataattggaatcatcaggtaatttttttaaacaaaggttcttcatttactgttatgattggaaaaaaattagaaaataaagtaagtgccataggctaattaaaaaataaaaccttggccgggcgcggtggcttacgcctataatcccagcactttgggaggccgagacgggcagatcacgaggtcaggagattgagaccatcctggctaacacggtgaaaccccatctctactaaaaatacaaaaaaatgagccgggtatggtggtgcatacctgtagtcccagctactcgggaggctgaggcaggagaatggcatgaacccggaaggcagagcttgcagtgagccgagatcacgccactgcactccagcctgggcgacagagtgagactctgtctcaaaaaaaaaaaaaaaaaaaaaaaaaaagtaaataaaaccttagggcaagcatgttccaaaacagaagacatcaaaccagggtgtgttggcattatttattttatgtagagtattgagatgtgataaacctttgtatatgccatcactgctccatttcctaaagtattttggtgttttcatgggactacatcttgtataatttgacatgtatgacctgactagtcctaacagttctttttaaacgtgtatttgagacttaaatattggaaaaggtaacccagtgccataaagcagaaacagtgacctttaaaatgactaaaatttcaacccagtatagtttcatacctatttcatgctttctcgtaagaaagaatttcatgttttagaaacatttctttcactatgggattaataatatgacactgaaatggaattatatatgtcagctacaattcaggcattgttttgggatatggttagattgacaggcaacgttttggaatatggttagacggggagggaacacggtactgtttaacatcttaagagtatgtgggggtatgtgtatacagaatgtttttgtttttgctcatcacaaccaggtttcatcagtatttaaaatatttaagattgtggcttggaatgtggttcagccatttactcacttatacaaatattcagaagtgtaataaaaatgtgaatgaagaaaactttgatataactcttcttgcttagataaatggttgcagatgacatcacttttagtataacagaacatttctggttttgtttgtattatcttgtaaacatggccaacatggtgaaaccccatctctactaaaaatacaaaaaattagccgggagtggtggcatgcggctgtaatcccagctactcgggaggccgaggcaggagaatcacttgaacccgggaggcagaggttgcagtgagccgagatcgtaccactgcaccccagcctgggcgacagagtgagactccgtcac

SEQ ID NO: 140 - protein, 233 aa, Homo sapiens
MCSEIILRQEVLKDGFHRDLLIKVKFGESIEDLHTCRLLIKQDIPAGVDPYELASLRERNITEAVMVSENFDIEAPNYLSKESEVLIYARRDSQCIDCFQAFLPVHCRYHRPHSEDGEASIVVNNPDLLMFCDQAGSRRMIRFRFDSFDKTIEFPILKCWAHSEVAAPCALENEDICQWNKMKYKSVYKNVILQVPVGLTVHTSLVCSVTLLITILCSTLILVAVFKYGHFSL

SEQ ID NO: 141 - DNA, 3284 bp, Homo sapiens
cccacagcaaggaggtagcccagccccgcgttcggctgctctcgaggaggccggagcccccggagacgatgcgccccgcgcagccgcctgcgcctgcgggagccggctgcccttgagatggagttgctgcctctttggctctgcctgggttttcacttcctgaccgtgggctggaggaacagaagcggaacagccacagcagcctcccaaggagtctgcaagttggcataagggccatgtgttctgaaattattttgaggcaagaagttttgaaagatggtttccacagagaccttttaatcaaagtgaagtttggggaaagcattgaggacttgcacacctgccgtctcttaattaaacaggacattcctgcaggactttatgtggatccgtatgagttggcttcattacgagagagaaacataacagaggcagtgatggtttcagaaaattttgatatagaggcccctaactatttgtccaaggagtctgaagttctcatttatgccagacgagattcacagtgcattgactgttttcaagcctttttgcctgtgcactgccgctatcatcggccgcacagtgaagatggagaagcctcgattgtggtcaataacccagatttgttgatgttttgtgaccaagagttcccgattttgaaatgctgggctcactcagaagtggcagccccttgtgctttggagaatgaggatatctgccaatggaacaagatgaagtataaatcagtatataagaatgtgattctacaagttccagtgggactgactgtacatacctctctagtatgttctgtgactctgctcattacaatcctgtgctctacattgatccttgtagcagttttcaaatatggccatttttccctataagttttatgtagttaaatgcttcctagaaacctaaataagatctattaatttctgacgagaggtgttcttctagaattaattacttttatcttttgtcttcatttgtggccaaaattatgtttactagaggaaatttgggatcattctcagctaattccaaaatgtagtgctctattgcatggatccttggtaatcctcaagcatcagatgccataaggggaaacttaattctgctaaattaatgtttattttgtgagaagtgactttatcttcatttggggtagaaaaattatttctttatgtagtagagacaaattattctcattttgcaagtactttcaatttaagctacaaattgagaaaaccgttataaataagaataaaataggccaggcacagtggctcacacctgtaatcccagcactttgggaggccgaggtgggcggatcaccagaggtcaagagtttgagaccagcttggtgaaaccctgtctctactaaaaatacaaaagttagctggggctggtggtgggcatctgtagtcccagctaattggaagggtgaggcgggaggatcgcttgaacctgggaggcggaggttccagagagccaagatcgcaccactgcactccagcctgggcgacagaacgagaccctgtctccaaaggaaaaacaaaaaagaagaataaaataatttggatgaaaatcatgtttatttaaatagtaatgtcatgagactattaaagatgtgccagagtttcaatgaaaatcattaaagtaggacagctaagaaattaatattaatatcaaaattattgataatcttaaattattgattattccttaacgcactccattctccttttacattttatcatgtttcttttgaatatatgaattggcaaaggacttgatgaaactgagtactaagatttggtacagagtatgtcaggaagacaactcagattgccattttaaataaagttgtacatgaacaataattggaatcatcaggtaatttttttaaacaaaggttcttcatttactgttatgattggaaaaaaattagaaaataaagtaagtgccataggctaattaaaaaataaaaccttggccgggcgcggtggcttacgcctataatcccagcactttgggaggccgagacgggcagatcacgaggtcaggagattgagaccatcctggctaacacggtgaaaccccatctctactaaaaatacaaaaaaatgagccgggtatggtggtgcatacctgtagtcccagctactcgggaggctgaggcaggagaatggcatgaacccggaaggcagagcttgcagtgagccgagatcacgccactgcactccagcctgggcgacagagtgagactctgtctcaaaaaaaaaaaaaaaaaaaaaaaaaaagtaaataaaaccttagggcaagcatgttccaaaacagaagacatcaaaccagggtgtgttggcattatttattttatgtagagtattgagatgtgataaacctttgtatatgccatcactgctccatttcctaaagtattttggtgttttcatgggactacatcttgtataatttgacatgtatgacctgactagtcctaacagttctttttaaacgtgtatttgagacttaaatattggaaaaggtaacccagtgccataaagcagaaacagtgacctttaaaatgactaaaatttcaacccagtatagtttcatacctatttcatgctttctcgtaagaaagaatttcatgttttagaaacatttctttcactatgggattaataatatgacactgaaatggaattatatatgtcagctacaattcaggcattgttttgggatatggttagattgacaggcaacgttttggaatatggttagacggggagggaacacggtactgtttaacatcttaagagtatgtgggggtatgtgtatacagaatgtttttgtttttgctcatcacaaccaggtttcatcagtatttaaaatatttaagattgtggcttggaatgtggttcagccatttactcacttatacaaatattcagaagtgtaataaaaatgtgaatgaagaaaactttgatataactcttcttgcttagataaatggttgcagatgacatcacttttagtataacagaacatttctggttttgtttgtattatcttgtaaacatggccaacatggtgaaaccccatctctactaaaaatacaaaaaattagccgggagtggtggcatgcggctgtaatcccagctactcgggaggccgaggcaggagaatcacttgaacccgggaggcagaggttgcagtgagccgagatcgtaccactgcaccccagcctgggcgacagagtgagactccgtcac

SEQ ID NO: 142 - protein, 215 aa, Homo sapiens; identical to SEQ ID NO: 136

SEQ ID NO: 143 - DNA, 79630 bp, Mus musculus
  misc_feature (1)...(79630): n = A, C, G or T/U
cctaactgacaaagtggggagagtaaggtgtgcgcaaacaggacaagttgggtaagttgtggagacttggggacatcttcctccttgtcctgctgagctctctagcctgtgcctttgctcttcttgccagacttctgtttgttaaggggagaaaaacatctcatgctgggaaagactgtaaggatatcaggcttctttcttttctgtttttggggaaatgtttggtttgcattttaaaattgatgagggttggagagttggtgctcatataagatttcttgggaacaaaattttgactggtgttttgttgtaaacctttcttcatcctaaagttattcttctcaacttcttctcctttcttttcctcccttctccttcttctcctcctcctccttcttcctcctccttctcctcttcttcctcttctcctccttttccttcttctaactcttcttcattctcttgctcttcttcctcctccttcccctcctgtcctccactctctattttgatggatgactgagaaaactctctggtgtatttagaattaacacaacgtttgacaaattatttaaaacttgaatcttataaaggacttactggatccttcacttaagtttgtagttgaaagtgccaatatcatatctcaaagagggagatctaaattcctcttaggttactaacaaaataattaaataagtgatagacctctctgtgtgtctgcaatcctataattacatacgtaacctgttgttccatcaaaaataatatccacggtgtttattatacgtgcgcgcttacagatagttctactttatacgtcatgatttagcaatgaggtggtggaaaatgctgacctgctggtggctcaaggcccattccttctgaaacatctatggttccctctgcctgagtaatgttccgaagttcagagttctgttgcatgttggttactgtttggggaagatttgactcaagtagatctttagcttctggctcttaaagcaccatttgggaatttagagcagaaatgattacttttagagcatgtttttgtccacaaaggtagaacagtttcagaggatttagaaatgccgggttagaagggtattattgcaaagaggcaatgagagttagctcgtcttgacccattcacagtttcacagtagatcttgggtaaagcgctgttccccaattttctcctttataatgtgttaataataagcaatcatacatactgatgaggtctagagtgttgagttaaagcatgccagttattaggctagcctggcattcattccttattgccttcctccccggcttctgtgcatttcttcaatagcattccgacttccctcctagaaaccaggatttatccagttccgcaaacttgctagccaaggcatgatgcaaggttgtcaaagaaaaggcttcatgaatggatagcaaagaagaactggttggggccttagatgtagaaggttctggagtatatacgatagaaaaggccatctgaatgtaggctggtttcatggaaacagtgccatttctttcttttctttttttttttttcagtttatgtactctgttttattagatattttctttatttacatttcaaatgctatcctgaaacttcccttataccctcccccacaccaccttgctcccctacccacccactcccatttcttggccctggcgttcccctgtactgggagggagggttgctagtttgttttaggggtggtggtgggaaggggtcgtagggctgagacagcatctaggagcaaggcaaaatatggcaaaggttcaagtgctggaaagtgtggagctatccttggagcattgagaacatctatgagaagtgtgtgtgtgtgtgtgtgtgtgtgtgtgtgtgtgtgatggaggtaagctttctgctgaaagtgcaagcaccctgagaggggtggggttgccagtgaaggagagattgtgaagcagattgatatgggcatggtaagttgacctgacaccagtgccaagtagtggctttgggaaatgattcatttctggggtctccacagcttgtccaacacgctctcctcctgcagcccgggtgggctaggctagatgctcagcaggacctggcaatgtgaacatctgcagtgatgtcttctagctctgatctagtggcctggtaccctgggccattatttttcattaacaaaggccactttgaaatcttttacaggggtgtgattgtttagaaccttgtcttgttctcgtaatagacctgacatatgcaggaagacctttaacactctgttagtaaaaatcatctatccctatgacatatatgtaagtaaagggtcacatttgagttcttgtgcattctctcaatgacattgtggcagagagctgggtactggtgtggcagctgaccacctgcctgacctcaggcaagatgctgagccattatgaccctgtgttaaaaatttgtggaatgattttcagggtcttttacccttagatggtcatatattcattcatctcctactagtttgggaacagtctgttatccacagatggctattttacacatctagctattatttttgataatttaacagttagcaagtgttctgagtattcaactcgtggcatcttctcagaaggaaaccttctgagaatttctaccccacagagccttgcttttattattgaggagacagagccacaggtacattaaaatgcttgcccgcaattcatagtgaacaagtggtaggcatagacttggtataacatcagatcctcaagctttaaccattaggctacacagtcttatgagaaactggctcttcttcctccttccccttcctctcctccttcctccccactttgttcgctttcttattctctgtttcctcttcctttcttagtagggttttgctgtgcaacttatgctagcttcatatgtgtagccctcttgtcctaccttcctgagtcctcaaatccaatgcccaccatgccaagcttcattgttctagtgtgtggtggtaagaaagaactagcccatggaaagaggatcactggagccagggctgcattggtaaaatttgtctgaagaggacaggatagaaacaggaatcatcatatttgcctatgacataagtctcattgtaggcaaacatctgtctttttatcttgtttgaacataactcactgtagtatctggatttaaaatacacattcaaaaaatgtcacttggtgtcaattgtttgactatctgatttgaaaaaggacctaggagaccactggtgtgttactgaatttttggtgtggaagcacaatcctcttttttttatcctctagtgtacttggttctagatcacccccaaaccttcacaagagcaatttggaagtagcatgccccatctggggaacaacataaactattcatttgtcagaatccccctgccatgtctatttgtcaattggtgagttcgcaaatggagtgagagaaatactgagtttgaataaatattaaaaggcctttgaatcaggttattgaggccatggcctcctttctccctctcttctgctcccagatttgcaacaaatatgtgctttcccctaaatgctgttgcctcgaagtactgcattatcaattatcatttgatggcacaaatcaacagagctaatcattcatcaactgtcacccattgtccccacttcccgagctctgcttttacaggtgtccacaaccacacccagcagggcagtagcagagagccgagcagccaacacacagcctccttttcatagttgggtcttgttctctcagactttctctacaagtctctttttagcttaattaaaggttataaatggtacttcatcatactatactgacttttgcttcaacaatgatctcaacactatataatatacacacttcgacctgagagttgaggcacacacatcttcatgaggattattagcttgttgcagataaaagacggagacactcaggtgacgactgtttttctaaggtcacattggcatccagagaagcttgtctaatggggtttgtttttatggtttcctctcacacagttggtctgtgtaaagtctgcccttggctttagcaagccagctatggactttgacacttagcctgtctctggaaaaccgtggaagacaatgagtcctttctcccaaaccacccattaccactttggattagcctgtttccctgaggtgccttagatgatcctaatatggaaaaaggttcaaaggcaaatgacttgttcttgctgtcctgagcagagatgaccgtcctctatgcatttttttcccaagagaaaacaatgtaaaggtcacgagttagaacaaggtggtcatttccatgacaagaacaaggtgactttatctgcacctttcccgatgacatctgaaattccacaggctctagaaaatatttataatatttcacacgattctctctaatagagagaaaatgggattttagaaaaatgccacatctatgaaaaacgatctcccaaaaggaaattgtgctacttgattaggaagaaaaattaaaggatttggattttagtctcttttggttggctaccattgccacctccaaaagatcacagagttccttggactgttctacagagtattatggtattaatacagctttcctgatgagttcccaactggggctcttccaagtgggctggtaccgtttctctcagcacttagaagtaggccaataggccctgttggaggaaagttccacccaagctcctagctaaataaataaatgaacaaaattaaatcagacctcttctgggatgcttacagagggtgctttttagcctgccgcttccttcctgtgaccactcactgttccagccctgatttatgctgtgctcctgttaactccctgctgcaaagccaatgtttcctgaatgctgtacttacctcttgggagtagtaacccgtgtaagttccttgaggacacagtgaaagcagtgataggaggaaaactcacagctctgagtgcctccaaaaagaaactgaagagagcttacactagcagcttgacagcacacctgaaagttctagaacaaagagaagcaaataaatccaagagaagcagacaacaggaaagaatcaaaccaaatagaaacaaaaagaactatacaaagaatcaacaaatccaggagctggttctttgagaaaatcagcaagatagataaacccttagccagactaaccagagggcacagagacagtatccaaattaataaaatcagaaatgaaaagggagacataacaacagagtatatcttaaaataactattctgcttgttgaatatcaacagttgaaaatattaaaatcatgttctacagaaaaagaagttaccttattcattctttttgttttgttttgttttttgttttgttgttttttgtttttgagacagggtttctctgtgctgtcctggctgtcctggaactcactctgtagaccaggctggtcttgaactcagaaatccacctgcctctgcctcccaagtgctgggattacaggcgtgcaccaccactgcccggccacccttattcattcttgatgacctgaaagtataatgactccacttctgatttgaatcaacaatcagttgccaaactaacactgttcttttggcataaggactgtctatctttgatccaaagtatatcataaaatatattttctgtaatgagcatctgtagaggatttttaatctatcaacacggctattctgatctcatctgaagaccttctaggtctctgtgatctggacggaatgcagacacgcccttagtacacacctttaatccttctggctggctggaacccttttgtgcacacctttaatcccaaacatgaagtctaattgagggatagacaaaatgagagttagagagggattgggtggaatgagtcagagacaggatacacccaactctcaggaggaaagctgtttaagagcaatgcaaggaaagtaaatttgattaaattcagtagaaatatcaaaatccaaagttcatgatatgaaagattttacaatttcagataaacatttttttacaaaagatattagtaccttaaatatccctgaaacaataaactaaaatatcataataatgagattatgggcagaacattttctaatttgtaaatccaaaatctgaaacgtctttctctgaatcagaatatcactatatagcctaggttggtctctaacttatggtcttcccagcctcggtctcttacctcctgggattatagatatgtgccacgatgcctggctgaaaataggaaaattttgaagtatttatatgatgaacaaaaaatttcagatgcattttggatttctggttttctgattaaggatgccataaaatctatacaagtgttgctaaatctgacaacctggaaagtagaaagccttcggcttccagacgtttagacaagagatccccaactcttccgtacttcaaaagacatttctcatacacagtagatcttacatcttcatttttagcaaaaacagactaaaatgttgcatgccactttgatcttgtgtgtgtgtgtgtgtgtgtgtattcccttattccattctcattcctttttcttaatgtgtcattttaagttaaagactcatctttcttcagcactataagttttttctctcatttttgatttttttctctattcacaaactaggcataacaccaatgattgtagaaacattaaaagcagataagaagctaaaaatagagatgttatagtacctagtacactcaggcttttttttttctgtgtactttaatataataaacaataaagatttaaatgttgaaagcagtaatggagaggggggaaaaaagggaacattgaaaatgatcacacccagactggaaagatggctcagtggttaagggcactgactgctcttctagaggtcctgacctcaattcccagcaaccacatggtagctcacaaccatctgtaatgggatcggatgccctcttctggtgtgtctgaagacagctaccatgtactcatatacataaaacttaatctttaaaaaacaaaaaaagaaaagaaagaaagaaagaaagagagagagagagagagagagagagagagagagagagaaagaaagaaagaaagaaagaaagaaagaaagaaagaatgaaaaatgatcagatccacatctatagtagctgagccttggagatatggcccagaggaagtcagggtgatggaaaggaagatgctgaggaaggatgaaggaattagggttagaggcatggaggtatcatccctttaagcgggtaccatggaagatagactcccccagtctcttcatcctggtgtttagttctggactcacttttggtattctctgcatatggcgtagactgctcaaaaagcagggtgatggtttcctctttctgcttccatgaattgaatcgataccaaactcgcctgcagcgcgtgaggggtgcttcctacatgtgtaatgttttttgttgggctggttggtccctatttctaccagtcactatgagaaaaacaatgaagtggtgtaccgtgctggggtttgtctacgctgtttgcttcagaactggacagttgtgggaccatgcatgctatgacgtgtttacttcacagaaagacacatgtgctatgactgtgtttgtcaaccttagatggtagaggctgtgtcttcactttggaaatgacatagcctacacatagagaataaggtttctaacttcatacagtggttaattcagaatttaaatccaagatttcttctttccaatctcggaactcaacagaatgccatgtatactattattcttaaaaagtaaatacacttatttttttgtcagtttccagggtgtagtaacttcagatctagtgtgggcaactggagacaggaatccatgggtaaatctatctccttattatcactgcccagatctctctcagcattctttatgatcccagggcagtaacacaattgtctcttgggaccttttggttaaacacccatcaccctttgcctgaagcactacagtggatctcaaagtatttgtaaaagaccttttaacatttgttcttcagatacttacagcctattcttatttgattaaagacatttacatagatttttttccttcaatttcaaattatcaaaatatatttaatttatttctatatgtttccttttagtttcattattccatgaagatggaaacctactctttctagactagactggtctacagaacagttttttttttttttttttagacttcctggaattttttttctctatagacttaaacattatacttttaaaattattattactaggtatttatttcatttacatttccaatgctattccaaaagtcccccacatcctctcacacccactcccccaaccacccactctcacctcttggccctggcgttctcctgtactgaggcatataaggtctgcacaaccaatgggcctctctttccactgatggccggccaggccatcttctgatacatatgcagctagagacacgagctggggggggggggtactgggtagttcctattgttgttccacctatagggttgcagatccccccccagctccctggggacttcctccagctactccattgggggccctgtgacccatccaatagctgactgtgagcatccacttctgtgtttgctaggccccagcatagtctcacaagacacagctatatcagggtcctttcagcaaaatcttgctagtgtatgcaatggtgtcagcgtttggaggctgattatgggatggatctccgggtacgcagtctctagatggtccatccttttgtctcagctccaaactctgtctctgtagctccttccatgggtgccttgctcccaattacaagaaggggcaaagtatccacacattggtctttgttcttccggagcttcatgtgtttcgcaaattgtatcttatatcttgggtattctaagtatctgggctaatatccacttatcagtgagtacatatcatgtgagttcttttgtgattgagttacctcactcaggatgatgccctccaggtccaaccatttggctaggaatttcataaattcattctttttaatagctgagtagtattccattgtgtaaatataccacattttctgtatcttttcctctgttgaggggcatctgggttctttccagcttctggctattataaataaggctgctatgaacatagtggagcatgtgtccttcttaccagttggggcatcttctggatatatgcccaggagaggtattgctggatcctccggtaggactatgtccaattttttgagggaccaccagactgatttccagagaggttgtacaagcttgcaatcccaccaacaatggaggagtgttcatctttctccacatcctcgtcaacatctgctgtcacctaaattttttatcttagccattctgactggtgtgaggtggaatctcagggttgttttgatttgcatttccctgatgattaaggatgctgaacattttttcaggtgcttctcagccattcagtattcctcaggtgagaattctttgtttagctctgagccccatattttaatggggttatttgatcttctggagtccaccttcttgagttctttatatatatcggatattagtcccctatcagatttaggaaaggtaaagatcctttcccaatctgttggtggcctttttgtcttattgaccatgtcttttgtcttacagaagctttgcaattttatgaggtcccatttttcgattctcaatcttacagcacaagccattgctgttctattcagttattttttcccctgtgcccatatcttcaaggcttttccccactttctcctctataagtttcagtgtctctggttttatgtggagttccttaacccacttagatttgaccttagtacaaggagataggaatggatcaatttgcattcttctacatgataaccgccagttgtgccagcaccatttgttgaaaatgctgtcttttttccactggatggttttagctcccttgtcaaagatcaagtgaccataggtgtgtgggttcatttctgggtcttcaattctattccattggtctacttgtctgtcgctataccagtaccatgcagtttttatcacaattgctcagtggacagctttaggtcaggcatagtgattccaccagaggttcttttatccttgagaagagtttttgctatcctaggttttttgttattccacatgaatttgcagattaccttgtctaattcgttgaagaattgagttggaattttgatgtggattgcattgaatctgtagattgcttttggcaagatagccagttttactatattgatcctgcctatccatgagcatgggagatcttttcatcttctgagatcttctttaatttctttcttcaaagacttgaagttcttatcatacagatctttcacttccttagttagagtcatgccaaggtattttatattatttgtggctattgaaaagggtgttgtttccctaatttctttcttagcctgtttatcctttgtgtagagaaaggccattgacttgtttgagttaattttatagacagcaaagccctctacagaacagtttaaaagacattttcactactggcttctttaaaagactgcaaggcatccagacagtttgtgcaaacaaataagtagtgcaaacaaaaaaaaaaagtcactcattcttccttttagccaaccctacccctaaaggctttttttcatttcatttcaaataaagccagatccttaccctttattaggaagccttaagccacttcatatagctttgcttttatacctaccatctttcttttttttttgaaattataattgttagcattctatctgaactctaccctgcagttacctggcaacagccaggtatgctcctccccacagttacctagcaacagccaggcaggccttacccactattaaaggggctgcttgccccctcctccctctcttactcttgcttccctcttgcttctctcttgccctcttgggctcttcccttcccccttcccttccctcttccacatcccaataagacatagctcctatctctttatcttttcctaaacatatcaatgatgtaaatacaccatttccccttccctacaaatccacacaaatccccacccacctcagtactctttcaaattcatggtgtttatttgctttaactgttgttacctgtgtgtttctaaaaacataaatacaacctgttcgttctgtataatgtttcctgtatgaatataattccagagcagacaattaggtttggacaatcaattggtgggctctcctgtggggaaaactcaatctcccactctcagcattacttactttcctgtttccatgcagtctgaggcctcccctgtctttctcccagtccacattagcatgactatggtgccatcctagttaagctaatgtttagtcagtcatactgtagaaactttatgggtgtagttttttgacaattctagaagacacaatctgactgcaaacccccttgtgcctctggctcttatttatcttcgggtaccttcttttacaatgatacctgtgcctgaggtgtccgagttgtgttgtagatgtatccattgggactgggctccacaacactgcagtttgattggctgaggttttcttcagtggtctccttttgttgtcaacagccattttcttgatgagaggcgagggagtaagactaacatgtgtctgtgggtataaggccaaatgtttagaatgtagtttgagattgtgcaggtttaataaagtagttgttgtaggttctccttcaaggtccatggcttcactagccctgggtacttaactaggttatcagtaacatttctagcatgatttcactctcattgagcaagtcttaagtccaattagagaactgttggctaccactaagttgtgcataccagtactgtacccttagggttattggacctggtggatgttgtgattcataggcataactgggtaggactgccttgcttgcttctctcgtttgaaagcctgcatggtgccttctggcagcatgaaggcaagtccccagagagaagggtttcaagtcagttcctgctcaggggcgttaatccctgtgtctaaagaatgtggtttccaccctcttccatgccaacctctgctcactaggtgtccccactgctaataaagagtgttcaggctttggggaaaagtgagtcacagtgactgagaatgtgataaacacttccatttgttctttcatctgtttgatcagtggttctcagtcactgagacagcgatcctcctccttcttaatgctgagaccctttaatagagttcctcatcttgtggtcaccccccaaccataaaattcctttatattagatcaagcatgggcaaacactttcatcgctgcctcttgggcagtgaggacctttcactgacctttcagaatgagcaacatgtgaggcttaaaaccaagtcccagaaaagatctgggcaacttaactttagtagcattacctgatgctcccctggccaccttagtgtgaagccgcttcatgcctcataagtgcttttgggttgtttgtttccttctgaaagaacaatactttggagagctcattccaaatgcctctgagattggggaacaaaatgaagatagtccattgtggttaccttgctcccattggggaagattatccattaggaagcttgattgccattgtccagtgcttaggtaaagaactgaggtaaagtctttactctcgccaaacagtttcctgtctggtgtggctttggcctttgatgattgctgtccagagaatattctgtatgggagcagctaggactctcgcctcatctcaccactgcacatgcctgtggcaacaatgccaaggtagcagctacaggcagaatgattcattgagctatagagagccatggcttctagaaaactgacctgccagtagttttggttttggcttgtttgtctgttgtctactctgatgatttctggactcttggaagatgattcttttgtcttttgttaattaattgtcaccccagtgacaaaccttcttatgctttaattttgagaaatgtatatttaatattaacattaagtatataaatattaatctatattaatattaatattaagtagaatatatcaagttatttttgtcaaattttggatgactctgaggtaggtggttcaaggaccttttttaaagttggctaaaggaacatctctgctctgtgatatttataattgttgaaaagtgggcagaattttaaagcattttccttctacaacagatgagtaccatagctagatttatctttggtttgatatcactagaaatatgttagtgcttcctatgatcctggttatgaagcaccgaagaaaactcatagaccagaagtaaacgagatgtgaatcctccctgctccaggacttcaccagaagagactgtctaagggagaagagtctcagagcaggtagagttcagatttcttgagctgaacattggtgagaggaccttaagggagaatgaaggtgactagatttcagagtgtttgaagagagagagttttagagagaaggggaggcgccttagattccttaggggatccctgggaaggatcagcatcacaggtgagcagaggcttttgctggaactaatgataggctaggatttagggttgttatggtgtaggtataaacatatctggtacaaagtcaaattgtggaaacttaattcccaggtttgtatgctaatgtggtggtgggtcctttaaggaagtaattgggattaggtgaagtcatgagggcagggcctcttaatggcattaatggcttcataaggagaggaagagattgtaccataaggcattgttctctggtcattatgaggaagcatgatgtctcttactttctttccttgtgctcctggcttgtgaggaatacattgtttttcattacatactagttagccttaatcatttagtgataacaaaatcaaagggaaatgaaaagagaacttggcactcatagaccagagatgttgcctaacccggtcatactagaaagcccacaatctatgagtccatggggttgagtcatttggaaagtcttcctgggtagtgggaaattactggtaccagtctcagtgctgctactgtgtaggccatcaaatcataatgtaacaacttcccaggaatccaactgtttccagtcacttacccttatctcagagctgaaaaatatttataagaattaaaaaaatcaatctacttccaattcagataatatctggcacccacaatatctggcacctcaaaaacagtagatcagttgtgtttaaaacaaaaggccactttgcctagctaccctggaggaatatttccacaactgcttaagtccaacaattgacttcagtgtccattttgaatataacaagccagacactgccagacagttgtctgtatggatatttgctttggctcctgagcagcagttcgtctttgatatctattattgcttaagcaaaaatatttagccttatttgataccccccccccattggattacagcaagcgaaactcagttattatccaactacatgctatttactgtgtaacagacagtgaaggttagtaggagaggtggcactgatcttctaaggcagatgaataagactcaaaagtcataggcgggagtacgggctgcagtgggaagcacaatctcagtggggttaaggttcagagtctttgaatcccagtgtggttgttggcaagagtgaagagggccacatcccattagcacagtggcagaggaggatgatcaaggacgttgtcagtatcagaggttagggtcttgcctgaacagtggctcttcagtccataacagagctctgcaggttgagcctggatatctcttctccctttgtaattttgacagcttttgccttgagtcccatggctgtgtgtctgattcactccttcccaaccccaagggtcagcctgacattttctgcatatctttgttagacatttccctgccaggacaagtttgacgtgaactgggcccagacgttcttttccactctgcctgtacagaaatgggaattttttcttataattattagattcttgaggactagaaaaatcttcaacttgaatatcagagtggggtgtcattatcattatgcaatcaacatttgactcttggagaaattcagactggaagaaagggtcagtcaacctttgtgaaaattgatgtcccaccaatgttcttggaacacttgggacgctgccagtggcaactgctatggatagtgtgattggatggagctgaaggaatgtggggagaatggaacttagtattatcatcacagggtcagaacaattcacttgattcacttacaggatgtaataattcctgcagtatccacaaccctagacatggtgtgcttagaattttattttcttccagtaattatgcactggaggaggttctagcttggctttattgttgttttgtttgtttgcttttgttttgtttttctttccaagagaaagggacagcaagaggacattaagaagcttgcaattctgtctcaggagttccagattgttctctgtatttctggacatgtctaagaaggtggagccaaggacgagtcagactgtggaaaatttcactgaaacttgatataatctatgtgatgctaattatgaaaagtgtggctgaccttgccttttataattatgctttgcaggggttgacatgcaaaatagggtgtggtgagtggatgagactgttttagataaacagctccgtgctaactggttctcagaagggagatggtgttgcttgaggagttagcctgactgtggtaaaagagtcaagagcattttacttgaccacagcccctgtttgctccctccctcccttcctccctctgtccctctctccgtcccttcctccatccatccctccctctctcctttcctcgttgttcccttccttcctttctttttcaatgtgcacatgaagttttaattattttctttcttactatatatatatatatttaatatatatattaaagtctaggcataataaggagaaaaagattaagacaatatttattaggtttgagactgaaattctaatagaaggttgacaagacaaatccaattaagccaaactgttcttgcaatgtgatgactcctaattattatttttggcctttacctagatgccatccacttaccacatcccacctcacttagccttccttagcctactttctgtgggctgttttctacttaatggaatttaggttctttctttctctgtctttttaaaataaaatatataagtaaaagtccaataaagtacaaaatgatcaagcagagcattatagacaaaaaaattccaaaaaaactcaaaaaaccaaaaaaaaaaaaaaaaaaacccaaccaaccaaccaaacatccaaaacaaaataaaacaaaacaaatgaaccctcaaaaaagtgccattgagtttcttttgtgccgaccatctactgctgagcatgtaacctgcccaagtatagcttatatatcctctgataatccgctgaagaaaattaaattttcctttgtgagctgctgtcaattggagataacttctgggttagggatggtgtctcatgtccacttcccctctcagcactggaactcccttgcaggccctgtttatgctgccacagtctctgtgagttcgtatgtgcaccaatgttttgtctgaacagcattgttttcttggtgtctcccatccctacagagtttcttaaccaccatattcccagtcttatgttgttaatccattggtttctctttcctatattctcatgccatttcccaaacctgcaaccgtctgacagtgacttcctgcagtcctattcacatagaaattccacgaaatgatgaagagtctctgcctgatggccttcctcattcatatgaattgtgtattggatgtaaaggaaaatgtgcacaccactctaaagagccttccttagtttcctgaaattaagaggacccacccacgcctgctaaacttctttagtgatgcagatcttgaaaaagggtggaaggaggtcaagtaaggggcagtttgatttcgagatgtccttgattcatacatggaatttagtcattaaggaggctgcccattgtaagcccactgtaaacatggaaatgccggctcttaggccagagttctttatgactatgtttcagttcctcagtttaatcatgagacctattgacagacttggctaaggaagataattcataaagaatgtggtaaggcctggaagggtacatttgcaaggtatatcactggctaaaagtgatatgtatgtataccactaatcttgttttattggcagatcccaatgctaaaatgatcatcatcgctgactatgaggagtagttccgggatttcttaatcttcatacatgcagttcaggcagagggtgcggtctgaggtacttatcctcttccttgggttgaatgaatctgaggcggttggcttggtaggctggtccaggtgagagaagcaaactgggggtgggcagcatcctcacgggagcctcatactttcatgttgacctgctcagcatctaagtgggctggctcaacagtgtcccagagtgggaagacaaacttggtgagagtgacaacaaatgggcatagttactattcagttacaagagaggcagccattaactgatgactttctgattggacaaacactctgtcttctggcaaactggaagcttcacaaacagactgacaaccagatttgtgtgccggatgacactaattacagagtgctgtgggccaggtttctgtcagatgagtcctggtggaaactgctgacaataagtcaaacgtgcacagagaagctgtgagtgggaggaggaatgggaattagaagggttgctgcaagacggatgctattgaaacagacgtttttggggtggtaagtagcatcttctaggctgtacctactgtacagcacatcttcaacacccacaacccttggggacttgagcaaaagtaaaagttactaattttaaagttttttattagttgcttttgctatacacaaaaatgtgtataaatgaatgtgtgtgtgaacatgtttgtggatgtgtgtgcatatgaattatgtgcatagaagaatatgtatgtatttatgagtgggggaggtatgtgtttatgagtgtgtgcatgtttgactatgactataagccgagaagccctatcttcttatcttcttctttttttaagtccagaaacttcttagcactaacttcaaaacaaaaccttgattttaactgtccaattcttatcagtcttgcatctgtctgagatgcttggcgcactgaaaccaagccagataagtatcttagaaggtggatgtggactgttgccggcccaggtttgtttctacacttgggggtatccaggcactgttgtgtataggccagactggaaggaatgaacttagctgagcgggtgggttacatgtgcaagggtgtgggagaaacagccttctcctatgacagttttctgtgaaacagctctcctttattgggggctacaaaagctatataaaacttggggagtgggtaggggtctttggagtgagtgcacatcattggctgatgctgagaagctgggaatgcttcatttgcatgaagaggaattctaggtgcttgctggacatgtccttataggaagggaagaagtttaacctgtaatctggccaccagccacatgactgctacctcaagggtggcagatgtggaggtcataaggctacatgtgttgggacacgcagcccagagcaaggaggaaacagccctactcttgccagtctcaggatgaaattttcagaatttggacatagctcgacctcactcttgctctggactggctcccctagtcacacggctttccatccccacatttctccctttttgctttataaaggggaggtacaattatagttatcagcctctatgttagggtcactttggtattgaaccagatctgattgacagtgatgtttgcaatgcttcttatctgttcttttggaaattggatgaggcagggaatccaggaggagtagggctccaattgccagtatgaggtcaaggaggagaagaagccagctatcaaagagtttgagtaccatggagtatgagtgttttggcacatagcatgaacctttgagcctttgtatattttgttctactagtcaagattcattgacatagaagcaacagactgacagccaacagactgacagccaacagctggcttactatatctcaaatatcctttcatttgacaatgtacagactaagaatgttgattgatataaacatagtctgaagtctgaatgcagatttactatgcatttgagaccttgtgcaataacttaacctctgaacttcagttcctttatgcgtaaagtggtgtgatatcagattctcagggtgatagatatctttgcaggtaaagtaagcaaagagcctgctgtgctgtctgtcatgtggtagcgtcacagtgaaatcaagctcccttgactctgctaacatcctttcctgctccattctctagccttaaggccatggactgtcaaatttgactcttaaaatcacaagcatttccctagttggcttcttatgtattatagaagaatgaagcaaagcttaaactacccagttctaatgaacttgtagaaagaccatatatcttatgctagatgttaccattgctattagtcagtcagagaagagattaaagctctttaatgttgaattttatttcatttgatttctgtgatatttaaccctctgggactgtaatggaatttaaaattgaactaaaaagccttccatccactgaagttttctattcacattttcaatccaattatcatttcatccatccatctatcatccatccatccatccatccatccatccatccatccatcttcattatccttcacccacctatgtaccaagggtttcctatggaagtatttagtccatctaattctgagaactaggaatctggaagtgaagaagaatacagatgaaattctttattcataaatcaggttttatagggcattgcttcttattaggaaaaggatgtggagtataataacataataacagtaaattatgcagtatattaaaagacaattactgtagagaaaataaagtaaaaaatagagatgaagtattgaagcaatttttaaaatatgctgatgtgaaacgattgcatttgaacatatcttttgagggaagagcttttcaagcaggaggggtcccatgtgccaatgccctaaggaggcaatcctggcatactttaggacaagcaggaaggcagtgtggctggtggggaagagactcaactgtggggtgttgaagaagtggtgatctggcttgcatgggtcatggggtcaagggtgtccttgtgtggacttgggcttgacctgcatgtctacagaactgcactcatgttgagaatagtctaacaatggcagaggcaaagtggacaccagctgggagattgtcttagttgctgttccactgctgggaagaggcataatgaccagggccacttataaaaggaagcatttaatggaggacttgcttccaatttcagaaggtgagtctgtgatcaagatggtgaggagaaaggggtcaggggtcaggcgtcaggcagcaggcagcaggcatggtgctggaacactggctgaggtctgacccacaatcacatggcagagaatgagaaagactgggtctgtcaagggctttttaaaccttaaagcccactctgtagaacacctccttcagtaaggccacccaccataccttctaatcctttccaaaattgttctaccaactaggggcctcgtaacaaaatatatgagcctcctagggccattatcaattgaagtcacctcagaggcaattgtaatgatgctttctgcacgagagtggtagcagtggagatgatgagggctggacagatctgggcatatttggagatggagtgattttccagtggattggatgtgggaagtgagagccaattcagagtcaaggatggctacaagttttgctgtgagcaggccctccctagtcaggtgtgttaggagttatgttccgacctctcttttagacagttcttggtttaagaggcatggtaggcacttgggtggagaaaccaggtgggacggaagctgaacattcagggagaagactggcccaaagttaggcacttgggagaagtgaatacatggcacagtgtttcaagcaggatgagacctctccctcagaactgagcaaaaatggaaaagagcctaaaatgatccctgggacattccaggttcgagaagttagatgtttatgagacacagaaaagaagattccagatagagaaaaacagatgagatgttgtctttcagggatggggtggtgcttgtctctgccaagttctactagagactcaagtgaggtaagaagggatgttccatagaatatggacataacgggttctgttgaccttctgagagagctagcgtgatagaggaatggcaaatgataccagaacgaagtggggcaggctgaaggcagaggccatcaaactgctggcaaacttcccccttcccccaatccagcaggtcctaatctctcagagtcctctcaatcacttttatttttattaaccttgtttctctttgttagcccccttggaatgagctgaggtgggattcccttctagatgagtttgtctctagcctctgctgagaccagggattgcaacgacttctttctctgtccaatgagagaaagattgtcataggtcaggtcctactgaacacagcagggcacatcaccctagaatgcaaggcagagattctgctaggagctaagttccttctgccatgtgctcaggccccttagtcaatgaggataaatgggacccacctccaaatatgcctggatctggacagtctaaggtgggatgtggggagctttcagctttttttccagcctcactttggcaaaggtttacattcctctcagttgtgacctcttcttggctggacctaggatggcgcaaatcagcagggtgaattcccatacatgccctgctgccatcatattgtgtcatctggctgcccacacaggctataggaagagaacaatgcccgtcagagtagctcatctgggcgacctggctcctgcgtggggtcatctgctgctacttgacacctccaggttatgattgcaaagttgtttttgtttgttttttgttttttaaactagcacatataaatagaagaggtgttagtttctaaattctggggttttgtctgtgtttgattgcggagtgttgtcatagctctcccctaagcctcttctgaggttgctaatgttctacggtgatctgctggtgtcttattttggagtcattcttatggttaagatacagagtaacaggattgaaaagtgaaccttgatgactgtgagcccaatgccccagaggatgtcaacccttcattgacccctccctactctgctccctcccaccagcattccttgtcacctcttcttttggaggccactcctcctgggccttttggcagctaagaaagggaactgggaacccatcaggcaattgtatttgtagtccgtcaagatgttcgcattgcagaactttgtttttcttgattcctttgactttacccttctgtgccttgctgtttttaacgtgaggctatattgctccaccttccatctgaattctagtgacctgcctgacatccctgagcccttaatcttgccaggctcctaggcttgccactgcctgatgtcttttttttttattaggtattttcctcatttacattttcaatgctatcccaaaggtcccccatacccaccccccacagtcccctacccacccactccccctttttggccctggcgttcccctgtactggggcatataaagtttgcaagtccaatgggcctctctttgcagtgatggccaactaggccatcttttgatacatatgcagctaaagacaagagctcccgggtactggttagttcatattgttgttccacctatagggttgcagttccttttagctccttgggtaatttctctagctcctccattaggggccatgtgacccatccaatagctgactgtgatcatccacttctgtgtttgctaggccccagcatagtctcacaagagagagctataactaggtcctttcagcgaaatcttgctagtgtatgcaatggtgtcagcatttggaagctgattatgggatggatccctgcatatggcagtcactagatggtccatcctttcatcacagctccaaattttgtctctgtaactccttctatgggtgttttgttcccatttctaagaaagggtaaagtgtccaaactttggtcttcgttcttcttgaatttcatgcgtttggcaagttgtatcttatatcttgggtatcctaagtttctgggctattatccacttatcagtgagtacatattgtgcgagttcctttgtgattgggttacttcactcaggatgataccctccaggtccatccatttgcctaggaatttcataaattcatttttttaatagctgagtagtattccattgtgtaaatgtaccacattttctgtatccattcctctgttgaggggcatctgggttctttccagcttctggctattataaacaaggctgctataaacatagtggagcatgtgttctttttaccggttgggacatcttctggatatatgcccaggagaggtattgcgggatcctctggtagtactatgtccaattttctgaggaactgccagactgatttccagagtggttgtacaagcttgcaatcccaccaacaatggaggagtgttcccctttctccacatccttgccagcatctgctgtcacctgagtttttgatcttagccattctgactgatgtgaggtggaatctcagggttgttttgacttgcatttccctgatgattaaggatgttgaacattttttcaggtgcttctctgccattcggtattcctcaggtgagaattctttgttcagctctgagccccatattttaatggggttatttgattttctggggtccaccttcttgagttctttatatatatcggatattaatcccctatccgatttgggataggtaaagatcctttcccaatctgttggtggcctttttgtcttattgacggtgtcttttgctttgcagaagctttgcaattttatgaggtcccatttatcgattcttgatcttacagcacaagccattgctgttctattcaggaatttttcccctgtacccatatcttcgaggcttttccctactttctcctctataagtttcagtgtctctggttttgtgtggagttccttaatccacttagatttgaccttagtacaaggagatagaaatggatcaattcgcattcttctacatgataacaaccagttgtgccagcaccatttgttaaaaatgctgattttttttccactgaatgtttttagctcccttgtcaaagatcaagtgaccataggtgtgtgggttcatctctgggtcttcaattctgttccattggtctacttgtctgtcactataccagtaccatgcagtttttataacaattgctctgtagtaaagctttaggccaggcatggtgattccatcagaggttcttttatccttgagtagagtttttgctatcctaggttttttgttattccagatgaatttgcagattgctctttctaattcgttgaagaattgagttggaattttgatggggattgcattgaatctgtagattgcttttggcaagatagccatttgtacaatgttgatcctgccaatccatgagcatgggagatctttccatcttctgagatcttctttaatttctttctttagagacttgaagttcttatcatatagatctttcacttccttagttagagtcacgccacaaggctgtccactctcgccctacctattcaacattgtacttgaagtcctagccagagcaattagacaacaaaaggagatcaaggggatacaaattggaaaggaagaagtccaaatatcactttttgcagatgatatgatagtatatataagtgaccctaaaaattccaccagagaactcctaagcctgataaacagcttcaatgaagtagctggatataaaattaactcaaacaagctaatggcctttctgtatacaaaggataaacaggctgagaaagaaattagggaaacaacacccttctcaatagtcacaaataatataaaataccttggcgtgactgcctgatgtcttaaccattgtattccatcaacttggtcctttaaaaatgaaatcttttgatttacttgctctaattattaacatattgattacaaccattgtcttagggttttactgctgtggacagacaccatgaccaaggcaactctcataaggacaacatttatttgggtctggtttacaggctcagaggttcagtccagtatcatcaaagtgggaacatggcagcctccaggcaggcacagtgcaggaggagctgagagttctacatcttcaaccgtaggctgtgaggcgaaaactgtcttctaggcactagaatgagtgtctttgtttctttgtttttgtttttgtttttgcttttgtttttgtttttgttttgttctgttttgttttgtttttgagctgcttgccccctcctcgctctcttgctctcttgttcttcttcttttttttttttaaaagatatttatttatttatttattatgagtaagtacactgtagctgtcttcagacacaccaaaagagggcatcagattccattatgggtggttgtgagccaccatgtagttgttgggatttgaaatcaggaccttcagaagagcagtcagtgctcttacccgctgctcacgcccacagtaacacacctactccaatgaggccacacctccaaatagtactattctctgggccaagcatattcaaaccatcacaaacattaattgcttccctgatcttctgtgcatgtacattttgcactgattatgtccatcgaccttcccactctttcctctcttctctttgcctctttccttgacacctatgtcaccttttctttttctgacgtacttcacttaaggaggtgctctccttcatttcctgcaaatggccagatttcttcctcatacatattgcatctacggtatttttatatatctactgaaaaaccccagaagcagattctgtgtcttatctgctcttcccggtgcttggcaagcatgggcacgcgtgtacctcttttatatgccaactttacttccttcaataaatgcattcagcaggggtagagatgggtgatatagagtcagcacagatttacacacccagccacagtttataagggttctctttatgtgccccagaaggcctttgttattttcttattagttggttgattgtaagtagtcattgattttttaaaaaaataatttcatgctgaaacgtattttatattgaagatattctctccatacgtcccactttcccctcccccccaccctgtcccttctcattagtacttcttgttgataatggttggcatgaggtggcatttcattatggttctgattttcatttccgtgatggcaaaagatatttagcagttcttcaatatgtttgttggccatttgtacagtttttgaaaggagtctattcaatcacttgcccatttttaattgcattatttcttgttaagtttttgaagtaatctgtatgtgctgagtgttaatgttctttctggttaagttagtaaagtgccgtccctctgcaggctgctccttcaccctggtgatggagttcttgcttgtgcagaggtctctaagtctggggcaaacccaattgtctggcctttattcctttgtctttgaaatccctgaaataaaatcactgcctttgctggctataaagtgggtttcttctgttttccatgagtatcttctgcatattaaggtttttggtttgtttggagttagtttttgtacagggtgagagggatagtattcagtgttctctatgtgaatatacagttttcccagcagaatttgctgtagctatcatctgacactcatttttgtcaatttcattaaaaattggttggctgagtatacttattctgggtcctttatcccattccatccctctatatgtctgccagggtgtttctactttgtttttcttgcttgtgctttcttgttaagagagtgacaatatagcttggcatattggtttgttacataaggttgacagtatttccagcttgacactgtaatgtagtctacactcttggtggctttgtcagtagcaattaagtaccaaccctacaagagttgacatgactcacttccctgtaggacttataagagttgaacaccctagtaatttatgcagctgtggtctagagtgtatgggtgtatcctttctggctacttacacagtgggaatggtagcctataaatcaatgggagttccatagacactgttgttactggtcaaagtgattctggactgtgctgaaggacttgaagctcttatcctctgattagacatggttgcagatccataaacttcatataaagatgtaaatgctggaatcatagctcttctactgtgccagtcacatacagccccgtaagcagggctcatctgataaggcttgtgtttgacatgtataatagacccacacagatggagcgtcagcaaagcttgtgcaattctcctctcctgttaaagtgggtgtgtcttttcaggagtgagactttgctgtgcctacctgagaaaaggttggtggctgggaggtcttgctgccccaccccctttctttaggttggagtgtcttttggggtttgaataagatgtttaaagctgaatatagttaatcttaagtgcaatgagaaggaagctcaggtggcaaggtgtgcaaggcgctgggtttgaactccattgcaacaaaagtaaaataaaacaaaataataaaataaaaaagcaacagcaacagaaaagaagaaaaagtaaaataatgatgatgataatatatttacaatagtaatagtaataataatagtaatggaacattaaaaaagaaggggaaaattatcttgactgagatgttgggactagtgaagagtgagagagacaggctgttacctttgctgagctcagcttctcttggggtcatcttaggctgggtgctctgcacttagccggagcttgcacttttgtacacacatacattggtccacacacacatacatcctgcattcttttcagcaaagtacctaccaagtgttaagcaggagtaatttgcagatgaaacaaacttgaaattcctcttaactgagtttcagggtagaagttagcactgaatgtgagctattacctgaactagattgtacagcatcttgcgtgtgtgtgtgtgtgtgtgtgtgtgtgtgtgtgtatgtatgtgtgtatgtatgtatgttcttattatgtttcatggtgtggaagtatatcagagctattccctggccactctgaagctaagggcaaaagatccacaaagttctatgttgacaaggtaggggcagtgactggtgaggccgctgtcttccatcccagaggaggtttctacttgtaagtagtcatgccccagggctgaggggcagattccttgacttgccaatcctagaggacggtatcactccctcccacagcgttaagacccacacccctatgttatagaccgctaagagtcactccctagaaccaaggcgttgcttagaagctcccacgtcctgcgatgaaaggtgatatccatgagatcctaaagggacttctgccctgtcttcctgcaacccaaacagggtccagctacaggacccttttcaaaatagttcgaagcttcagcaccctgacagttcacaagaagatgcagtaaacttctttaacattagcctgctctgtagaccacaggtctttctatctatagtggcaataagccagtaagatgccaacctttttggtatggagctgactaacagctttctctcttactgggagtctctctttaacccataccccctccccccaatggattttactggctcaggaaccgtggtgtgtggtagatgctggaacacactgtttcttgtacaaggatatccaacgctggttctgtctgacatgtaattctagctctctcccacgcctacacatttctacaggcagatatgctcttgatttcagttctatgttgcagaggaagaagctagttcttggtgcctctctcatataccatcatgccccactctggatggagatctattttaaaagtcttaagtccatggtgttgtccattcatctcttatagtcttaacttagtgcttccagattctaactcctttaaaaatattatatatagccaggcggtggtggcacacgcctttaatcccagcacttgggaggtagaggcaggtggatttctgagttcgaggccagactggtctacaaagtgagttccaggatagtcagggctatacagagaaaccctgtctccaaaaaccaatatatatatatatatatatatatatatatatatatatatatatatatatacctgaatatgtattctatttatgtgcaggtattattcagagaggccaaaagaagctgtcagattctttggagctgaaattaaaagtagttgtaagatgccatgtaggtgctgggaattgaacctgggtcctctgaaagaacagcaagtgctcttaaccaccgagccatctctccaccccacttccagctctctgtgtgatagaataaaaggacatggtattatttattaaaaggagtgacttcagtttttaatatgataatcattgagtctgtggactagaccccttggttctctattacccttaccaagttgttgctgagtcttaagaagggggatttagactggactttggtacagctctccccactgagagcaagccaaggttctgaagcaaaggttatacatagttgtaacacaaacagtttaaggcactactgtgagttccactcacaaacatccttcctattaactccagggagtggatagttctgtctaggatgttgggaataaagaggaattaagtttcatttgtgatctctaatacttagagatgcctaacaatgcccatcctgtggtggaggggaggagcagaggctacaacactacatatcctgtattcctctaagtcacacctcagctctctgaccacactgtaattagcattgcttcctcctcccttaccacactatgatcatgcttcacttgactttcacatattcctaggctcttagcttttcaatgctcttagtaacttgggatgtatttctcctggagtgctttaaggtgccgtgggttgctctgttgatacactctgttcatagtgagtgcacatctgaatgtcagctgaataggatgcagatattcctgttttctcttagttctttggacacctcagtacaatggggtgactgttcacagggctgtcatgcacatctggatgaggtttctgagtagaatgcagatattcctgtcttctcttagtcctttggaccctgcggtacaatggagtgactcttacttttaaaatggagttagacagctcccattcaatggatacaatgatcagggacatagctgctcctttctagaagtttattgtccagttaaaaggatcctcacataagtggtggtgccttgagaataaagaaaagggagattcacctttgagagaggatccgagaacgttctgcagtgacacgattcttggacaaaggaaagtgtttgtacccactctcttccccttgtcccctcttccttttccttcccattctcttcctcttcttcctttgccttgtggggctgagttgaatagggcacatgttacttgggtgaaggtgagaagggatgctagctggattcaggaagggatgtcgaagcttgtttggggagccacaggtggagcctttgttttgttcttagtaagttgagtgcagaaatggagggccactcaagaagtggaggacatgtccactgaagggaggagtcatctgtggcattcaaagcagtatttgcaggagatctgggatgtgtcacctggttgtcatacgtagcttcaccgttgttttcagtaaacttgtgaatggctgctgcgaatgcaggtgatgctgaagagaatattgcagtgtacattctgctcctttcattccaatgacatgtgaagttgcacggcatcttcgaacaagtgtctttatagataaaggtaggtctcacaactcagtgtctcagtgtcgagactgatgggaagctgagaatagaactaaggatgctaccagcatctccttttcttcctccctttccttccttttctctatcccacttatttatttgtcgtagacatttggtatccggaattgttcagtggccattagccacatgcagctactgaacacatgaactgtgagatgcttaattggatgccgagtgtgaatttccctctactttgctcatgactcatgtttccgggacattgctcccctaggagaggtggcaccgatttttttttttttttgagttttgaaaagtcttcctaaagaaagccagatgtggttggttcctgaggagacactcagctgccctcctttcctcctacactgatgttctcatagaagaccaagtcttacttttaaatttatttccactttgcaatcttattttctccagaattgtggaaacggtctctcttactctcttaagtaagcttaagttcacttggctactgagaatttaagaggactacatgacttacactcccctctgtaggttatgaacatggcactgagaatttaattttattaatttatttattgtgtcattcatccaacatctgcttgtcctcagcagtgggaaaactcacggtgctggcactgataggtccacacaaggctccctgactacttggaacttgtgctgtggtgagaagaaaggcaggatgtaaggactgggggctgggatgtgaactggctattttcccctttcttctcatgcagagctaccacagagcacagcctcaatggtgtaaattcctcagaccagtgtgttcttctttcaaagtggtcagtagctagcacgcacattagtcccttcatgccttcttcttaccacgctagtctgactcagaaatgagtatctgcaataaatacttgatagctttcctcatctgcagcttctttctccttcatacatttcgggtgtgactgtcatttcagccttgctgaaataccattgaaacacatacttggctttctccaaagctgtttctagcacttcttggcatgggatcagggtgctaggaggagtcgtatttcctgcactttcacccttcttttcagggagttagagaagcacggcctgcagctagtttccttagccgaggctcagcagacaagaaagcttaccttctagacgggatggtccctgtcccatgttaactcctggatcagacatttggcatctatcttccctgtcctcaagagctgaggacacgtccttctcttggctggctgaatgatgtttgctcaggttccagaatcaccagacagattcaaatcccagctgcaccactaaacaggccatgggaacttttctgctaagttatttattttttccaacctttaatttctctgtcttttaatactgcattgactttgcagctaacaaccatctatatagttccagtttcagggaatatgatgtccttttctggtttccatgggcactgaatgcacgtggtacatagacatacatgctaacaaaatacccatacacattaaatacaaattttaaaaaattatgtcttgcctaaatatttaataatgcaggacactgaatagcttcactgtttttcaaagttaatattttggtttcatagttctcaaatgctaagtatgccactctgtctaaatatgtagtataaaatggcagaagtgtgtttgggactgtcttagccagggtttctattcctgcacaaacatcatgaccaagaagcagttggggaggaaaaggtttattcagcttacatttccacattgctgttcatcaccaagaaagtcaggactggaactcaagcaggtcagaaagcaggagctgatgcagaggccatggagggatgttctttactggcttgcttcccctggcttgctcagcctgctctcttatggaacccaagactaccagcccagagatgtcaccacccacaaggggtctttcccccttgatcaataattgagaaaatgccttacagttgtatctcatggaggcatttcctcaactgaagctcctttctctgtgataactccagctgtgtcaagttgacacaaaactagctagtacagggaccattccattaattgttggagaccctgcctaatcccaagttaaatttaatttaatagttatttttttaaaatgacaagtcagcaactcaaacagaaattttaaaaatcaaagattctaacacagcagcaagtcaaaaatatacaaacttatttgatccttgcatagtggggaatgacagtaagaaaacattaaaggtctttgtttactgtgcttaactatcgtgtttctataagagaaaaacttggcacacacagtgaaaagacccattataattcacagcaaatcagcagtgctgaatctgagctgaagtgtggcaacgtccattggccttgagtcacatgacatcaggttctatgttacgtgcacttgtgaccagttcagaataaagggtgtagtggagtcctatgatgcaacatagacagaagtttccggaaacatcttagtctaattctatgctctacttttaattaatttttggtcattgggcattcaaaaaccctttgactctgaacgagtttggcacaaactttgtgttccattccatgacttccatggcaatgttgcacagtttaagaagctggaccttattatacttgttttgatccaggatacaacaatggtttaatggctttggtgccagagtactaataattctgaagattttagaagcatagaggatcattattaaccaacaatatcagccttaatatatgttatatggaggttttagcatcagatcttttggatcctatctaatcccatcctgcaacttagggatatacttttagtatttaatagttgatgaaaaagacatattcccaatttatgtggcctttcgcaacaaaactctggcccaatgatatccattttatccgatggtaccaacaacatttcagtcattgtatactggacaatctcattgtacaagtgaggcaaagaaagggttagttagtgataagaaatagcctgggtatgattcataacaaatggggtcattcaatttgacatgttgaaatatccagtagtcaagtcaacttaggataatgagtaagagatgctggttattgcttgagaagttatactgagctattacaatatagaaatcccagagaaatacacagcctgcttcgtgaaattgaaatattgaatcacacatgaaatatgttggacatacttaagctaaaattacatgaaatatttctatacttcactgagtaacctgtggttattctttggtactggggaccaaatccaggggcttgctagacaagcattctaccacctagctaaatccccaacctctgctttccttgctgttgctattgctaaacaccactgctctgcctttaggtatccacagtggtaacaagtgctaacaggagtgacttcctgtacagctgtctacacagagcgcttactcactctcttaggacatttcagatcagtgtcaaaggcagctctaagggaggattgcctcaggagtttgcccttgttcctgaccctgaactcctaaagcaaacactgattgtcccttgttcctttagttcattctcgaggccctcaagatattttactgaacctgcatacgtacggtgtgagatcatgataatcaaaaatgaagagtggtggtagtagtggggtgcaaattctgtctttaaatgtgggctaataggacagggaggatgtaggacagaagacagcatccgtccatcagaatcctcagtttgaagtggaggcaaagcattctctgtggcaggctctgaaatattctctctctctctctctctctctctctctctctcattcagaagtaaaactacttttctcaactatttaatctgcaaatggaatacccttacatattaaaattttcaggtgatgagatcaatgatattttccagaaatcatgtagaacacgacaaggaaatagccaatgtgaacaaatatgttagagctatgcaccacagagcatacctacccacagaaacgatttccaagggtttctaagggtcaaaaactccttcttaggagtttggaatggaaacactaaacacaaagctcctgtttgttgaatggagtttcctctcccctgtgacatatgctctgttatggtgtccaacctggactcagtgtgcagaggttaaaagggagttttgcttaagcctctcacagtagagaggaaatgagagcagggaggacggaacacgcgagtctgagaaacgtgccggtgcttttgcaaggctgttagctaacataactggcattgtttgactggtaagacattttgagtgaagacggcttagttatatagatgaacaaggagctctgggcgagtgagaagagatggaggatccaagaggtcatgtcaacatgctgtgactgagaaacacggtaatgaagaaccgtgcaggtgctgtggaggcggagggatacagagtaggtcgaggtggaaggtaaaaaacaaaggaaacatggtggtgtatgcctttaatcccagcacttgggaggcagaggcaggtggatttcttgagttcgaggccagcctggtctacagagtgagctacacagagaaaaccaaaaaccaaaaccaaccaaacaaacaaacaaaacaacggaaaagttcactccgagctcaggccgctcaggcccagcagttcctatgctcaaaatccagatctctgtgtcctgttcttccaacccttatatccttcccagttttaaagaaaagcataagcagatataaaaggaattgagcaacacactagaagatggaaatattttccatactcgtggattggaagaattagtattttgcaaaatggccattctaccaaaagcaatctacagattcaatgtaatccttatcaaaatcctaatgtcagtcttgggtcggggggggggggggaagtaatcttattcatgtacaagttcaaaatattccagataaccaaatcaaccgtgaacaaaaagaacaagacaggatatatcattgtgtagatcaataaagtataatatacaacccagatatgaagctatggagctataacaacccaagttttggcaaagataccaagtttgtgtatattgaaggaagtatggccttttaaacacattttgctgaaagaactaattatacctgaactccctttaaaagaaaactagatctctgtctctcaccgtgtacaatgatcaactccaaatagattaaagcacattaatgtgaagccagtaattctgtaaccacctgagaaaatacttaaaaatatagctataggggaagacaactagagtcgattaggaagtaatgccaacagtgagtgaaatgggaacccctgaatacaaaataaaactccatagaaccaaagaaaaattaattttgcgcagagacagcttacatagcgagagagaaatctttgttaattcaatatccgatacaggactagcatctagagtacacaaagaactcagaacactaagtgatagtaaatcaataatctaatcaataaatgggtcaatgaaacaaacacagttctccagtgatgaagtacaaatggttaatgaatgtatgagaaaagtttcaaaatcggccctctcagagactggtcaatcaaaactaagatgagaattcaactgctccagctctgaatgacagtccaaaaaaaaaaaaaaaaatcaacagatcagagaagcaagttcctagacaactttattgcagcattgttcacagtggttaaattagggagccaccctaagtctgagtcaacagaggaatgaataaacaagagggggtttgtataagtactttttcagccttcaagaagagcaaagtcatttccaggaaaaaatgcatttaactggaggttattatattaagggaatcaaatcattattaattttttatttgtgtgtgttagattttacatagatacataaaaagcaagtatgtgcatgtgtgtcatgaaagtagaagcaagactgtctaagataacaaaagagactgatcagagagggaaagagtgaggaaggggaagagagaactatgccagcgtacattacatatttgaattaaaatctctttatgaaacccagtaccatgtgcaatgaatgtgcatcaatgaaaatacagtttacaaactagacatatgctattataatcttcatgaaattaataaccatattttgtgtaaattgggatccaaataaaggccatacattaaattcacatttataatttggaatagatttgtggttcatggtttctgtctttacttaaatagcaacaagttacccatcattaaaataccagtttggtcaataagacaaaaaggccaccaacagattgggaaaggatctttaccaatcttaaatatgaaaggggactaatatccagtatatacaaagaactcaagaagctggactccagaaaatcaaataaccccatttaaaaatggggtacagagctaaacaaagaattctcaactgaggaataccaaatggctgagaagcacctgaaaaaatgtccaatatccttaatcatcagggaaatgcaaatcaaaacaaccctgagattccacctcacaccagtcacaatggctaagatcaaaaattcaggtggcagcagatgctggtgaggatgtggagaaagaggaacactcctccattgtttgtgggactgcaagcaggtacaaccactctggaaatcagcctgctggttcctcagaaaattggacatagtactataggaagatacagtaatacctctcctgggcatatagccagaagatgttccaactggtaataaggacacatactccactatgttcatagcagccttatttataatagccagaagctggaaagaacccagatgtccctcaacagaagaatggatacagaaaatgtggtacatttacacaatggagtactactcagttattaaaaacaatgaattcatgaaattcttaggcaaatggatggacctggaggatatcatcctgagtgaggtaacccaatcacaacacaacacacatgatattcacgcactgataagtggctattagcccccaaaattagaataccgaagatacaatttgtaaaacacatgaaactcaagaagaaggaagacaaaaatgtggatacttcgtccctccttagaattgggaacaaaatacccatggaaggagttacagagacaaagtttggagcagagcctgaaggaacaaccatccagagacttccccacttggggatccaccccataaacaactaccaaacccagtcactaggcagatgccaacaagagcctgctggcaggagcctgatataactgtctccttcgagactctgccagtgcctggcaaatacagaagtggatgctcacagtcatccattgtatggagcacagggtccccaatgaaggagccagagacatacccagggagctgaaggggactgaagccccataggaggaacagcaatatgaactaaccagtacccccagagctccttggaattataccaccaattaaagaaaacacatggtggaacttgttacttatgtagcagaggatggcctagtaggtcatgagaggagaggcccttggtcctatgaagtttctatgccccagtataggggaatgctaggaccaggaatgggagtgggtgggttggggagcagggggagcggggaagatataggggattttggaggggaaactatgaatggggataacatttcaaatgtaaataaagaaaatatataataaaaagaaaaataaataaataaaataccagtttgattgtagcatattgcatcatctagatttcgatgactgcattctcatgatattcttgaacatactcctttgaccttggatttcctgtagattggttatcacatacataatccagtcacactcagatttgtttttgacaggaatattctaggtgattcttgttggactgttcctcatcggtatgtttgctttcattgagattgaccaaatctattaatttcatttgggatttatagaatttaagttctattgtttttctcatttgttaattgatatatatcccataagaagtattttgcccttattcgctatgtaggcacaattctggagtttgtggctatgtttatgtatttgttttgcgttgtatgtctgccactttttaaacataataccatacttctgcatttccatctctaaaatgcctaggtatgtcagtacatatatgtgtatatctttatatttatctatatctttacatctaatctgtatatctatatatggcttgcagatgacattcctttgctcttggagttcagttggaattctagtttatatttaggatcatgatggtgacaaacaacttgttttaattcacaaggctaagggagaaaggagatggcacatgccaaataaactttcagaaggttttagtttggacagagaaaactggttgtctcagttaggtctattgctgtgaagagacaccttgaccaaggcaactcttaaagaggcaatcatttaattagggctggcttacaggttcagaggtttggtccattatcatcaaggcaggagaatggcagcataacagaattcgggagtccgcagacagcagaagggggctgtctcctgtgggcagacaggtggagactatcttccgcacttgccagagcctgagcataggaggactcaaagcccacctacacagggacacacttcctccaacaaggtcacacctctattagtgccactccctatgtccaagcattcaaaaacatgaatttatggaggtcaaacctattcaaaccaccatactaggtaaaattgttcaacatagtgtgtgtgtatgtgtgtgtggtggggtgtgtgggtgtgctggaccaaaagaaatatccagtgtagtaatgattatttactctgggttgaatactccctcaccaatatgtattgccctggtaagagaggcagaaactttaagagatagttaggttatgtcctcatgatcaaattaatcacagtgctgtgggtgaggttagttatgattagcttgccatacgcttgccctgtgctcactgccttgcagatgatggcttgcctttcttttgtattgtaacatagcatgatggcatggacagatattgctcctggcctctgaaaatcctgatctcaagtcaccaaacccaagtaaactctttttaattataatttacgcactctccggtactctactataatagcatggaatacatgatgatggggtaaattcttattaattataacttatgcactctcaggtattctactataatagcatggaatgagcaatgacagtgtcatgcgcatgcttgtgaggtggtttgtttcagcaggcactcttcctgttacatttgaacagtttacatgatttgtgttgactttggagttacggttacttttagtcagtaaatgttttttttattttcctaggcccccaaatatttctattacttaagaaagttcacatccatatgtagaaagaaagtttttttaaaagaaaaaaaaaagatgcataatattagtttaagccagcatgccaactctgttttggatccctttgcaagaagtctgcatgcgacacatttgagaaatgttgttttcccacgcaggcttctacatgttctacacgctggccactgccttgttaattggtggtttgatgttgtatctggaatcctatggtgagtgctagagcgaaactcagaataaagagctgcactagtggaggagcccttggccttccttcttgccctgacaccatctcaaattgtgacacagaaggggctctcctactgtacatttcactggtgttttatgagagtgggtgaacagagaatcttaggccagacctgtatgttaccaaacatgcacacccagggtgggttgggtgaggggagggggggaggggnnnnnnnnnnnnnnnnnnnnnnnnnnnnnnnnnnnnnnnnnnnnnnnnnnnnnnnnnnnnnnnnnnnnnnnnnnnnnnnnnnnnnnnnnnnnnnnnnnnnnnnnnnnnnnnnnnnnnnnnnnnnnnnnnnnnnntagagatagagagagagagagagagagagcacgcaatcaatgagtagcatacatacacaaatatgctcaaatgtgaaacagctgtctccaactttaacatggtgtttcagagctagcaagatggttcagcagttaagaacaccaactgctcttccagaggtcctgagttcaattcctagcaatcacatgttggatcacaaccatctgtcatgggatccgataccctcttctcgtgtgtgtctgaagacagctgcagtgtactcatataaataaaaataaataaataaatccttaaaaaataaaataaactggtgtttcaattggtaagaaaaacaagtgcttagataccagtgatcataaggggacctggctggttttaattttgatgagtattggagatttcaaaacagaaaaatcataaggaaaggatgggtgggagggcagaaattgaaagtaaaagggaaagaaggaaggaaggatgaaaggaaggaaagaagaaaggagaggagaaagaagaaaagaagagaaataaaaggtttatttttggggtttatcccagatctagatttacttggttcacagcagggactagacactcaggatcgataggctttcttgatgctttgcacacgcagcgaggctcagaatcaccgcccttgctgccaagccttgatcactatcagagcaaccacacatcccacagactcttctacttgcagctacaggcctgtgttttcttcttccttctaatatcatttacatttcaggatgagggaaactccccagccctgcgcccaaatctacaccccccccctcacataggggtgagtacttctgaaagcagacaggtacaacagtactagtctttttcttagtagccaaagcaatctcctggttccccatctgaggaaggttagatgtctctctggagagatttgaggagtttgaagttaaaacaggttattacagcaggcgtcacctgctgtgagctaagaactttacttcctctgtctttttctttggatttatgaagtcatttggctcatatcatcacttaggaggaaacaaggcaaagttaaataatgttcaccaagccatatggaaatgctggaactcgcttttctaagtgaatggtcttgattctagaatttgggcttcagcgtgtcccctttggaaaaccttgaaaatgtgcatcctgagcctaccgagcctaactgaaaagaatttgtggagattgggaccctgaccttgtaatttcacttcaatcttgagtattttgtatgaactatagttatgtatcattgtagcttttaatgaagttttcaagggtccctaacgggcaccctgtgttgagaaccggatgacaatcttctgttccctcctcaaataatttgaaacctggtaatcctgtagaaacttctattcctcttctttcctcctctagcttgtgtcagttttgaagtagcttgtttttacgaatgtcacatatccttgtgacaggtcttaaaggcataagagtaagatgaacgatggccttcaaaagacgaggcatcctaatttgtggaaaccaggcataggttactctgcttgggaggcaggatttttgtaggtgtaattaaagcttagagagatcacctgatacccagcaggtctaatgtgatcacaagatcctcataagacagaagcaagaggatgagatctgtgaagaatagaggtcaggattgagggacgggaggaggggaggggcggtgcggaggtttgaagatgctattctgcaggctagcagtgcaggcattcaggaagatatgaaaaggcaaggaaagtgattctcccctagggccttcagagggagcctcgcccggcccattcagtcctgtaactctgcctttgaggcccatccagacttctgactctcagaaggacaagacagtaaacatgagctgtaatcggttaaaccagctatggaaagctatactgttttagtagaaagcatccaggagccttgggttccttgtcttctattaggattaggtctgggttgttaagataaagtatcacacatctgtcaactcagctggtgctttggagaaagatgtatgaattatagcgccaggggccaggtctggatggctgacctcttcccatttgtaagtataacccccaccacaagctccatccttccacacagctgagttcaggtcataccttcaaaggagagccaaagtctcagttctttaagctcagcttgtgctgttttgctgcctgcattatgttagccctaatgcgaatgatcttctctggtaccttatcatagacatttgtcaaaatcagaagtgactacaccctagcatgggtataattgtaaaagcctttgtgggaaaatagaaaggaaacaagtttcctggtgcagagactcagagatccactgtttactcgaatccccaagctgcctctgcgccagccagaactgaacattgcccatgacacccacgggcttcagactttgcttatcagctctattaattccctttcatgactccatgactggcttttgctgcttgaggttagacctacatcaagatgcccaatagcacattgctttaaggaaccgttatatgatagtagctaatgcaaatataattgccagagatgacagccattcatgaggcactgatataatgtatgttatatttagttccaatagctcacccttattctaagttgtaacattaagccacaaagatatctgggtgaaatatttttcactggaattgaacaaacattcttccaaatgtgttagtttgtttactgctttctgataataggaacacccatccttgattgaacttcctttaatacagtaattgacagtccaatttgtggctttttccccctgagaaaatactttaatgttaagaggatttgagcaagaatcttctagaccagacttttttttcaattttttattagatattttctttatttacatttcaaatgctatcccgaaagttccctataccctcccccccgaaccctgctcccctacccacccactcccacttcttggccctggtgttcccctgtactggggcatataaagtttgcaaaaccaaggggcctctcttccaaatgatgattgactaggccatcttctgctatatatgcagctagagacacaagctctgggggtactggttagttcatattgttgttccaactatacggttgcagaccccttcagctccttgggtactttctctagctcctccattgggggccctgtgttctatcctatagatgactgtgagcatccacttctgtgtttgccaggcactggcctagcctcataagagacagctataccagggtcccttcagcaaaatcttgctgtcatatgcaatagtgtctgtgtttggtggctgattatgggatggattcccgggtggggtagtctctggatggtccatcctttcatcttagctccaatctttgtctctgtaactcctttcatgggtattttgttccctattctaaggaggaatgaagtatccacactttggtcttctttcttcttgattttcttgtgttttgcagattgtatcttgggtattccgtgtttctgggctaacatccacttatcagtgagtgcatatcaagtgacttcttttgtgattgggttacctcactcaggatgatatcctccagatacatccatttgcccaagaatttcatgaattcattgtctttaatagctgagtagtactccattgtgtaaatgtaccacattttctgtatccattcctctgttgagggacatctgggttctttccagcttctggctattataaataaggctgctatgaacatagtggagtatgtgtccttattacaagttggaacatcttctgggtatatgcccacgagaggaattgctggatcttctggtagtactatgtccaattttctgaggaaccagcagactgatttccagagtggttgtaccatcttgcaatcccagcagcaatggaggagttagaccagactttcttagttgggaaataaagcatgatttttctctccaggggacattatcaatatgtgaaggtattttttggttgtcacaacttaggaagtatgctggtcacatctagtatgtacagaccaggaatatctctcaacatataataattcattagggaggagagcacccctctgccacaacaaagaacgagccagtctgaaacatcaagaatgttgctggtgagaaattctgtcctatactaatgttttgcaatctttagtgtgcatgagagtcacccagggatctggttcaaatgaggacaaggaatgttagggctagggagggacacaagagactactcctctgacaacactctatgtggtgcaggccctgttaaagtaaggacttcactgtaagtactagtgttttatgattcttactctataaggttgtggcttgtctgtctcacgtcatgactagaactagtacgggcagagtaaagttttgtagtgaatatttttgacagcttggctaggtggacaaaggaaggagggtgtaagtgggtatgcagacagacaaaagccccagtttccctacagccacccctcaaagaacctcagaggcacttttctaaagaaaatgaaaaaaaatttttttctcccaggaaactcaggaatatgtcaaaacccatccctggaggatggcagccataaatgggcttccaacaaaaatccactggaggatgagagcttgcttgtatggctttgtttctgaggctgtcactctgagaattgggtgcggaaggctgaacagagatgatgtgagaacacaggatgccatgcaggcgggtaaagagtcctcatgaatggcaagcctatggggaaaagatttcaagatgctctctttagatgtgccatgaatggcaagcctatggggaaaagatttcaagatgctctctttagatgtgccaaggacatcagaaagctcctgtagggcttccaaagttctctgaagtgtcaattcctccatcagcagtgctgctctacaaacaaatgctcaccacactggtggttcgggtgtggtagtggtagttcgttgctcttgtttgtttgtttgtttgttttaaagtaaattagttttggggttactagatgtctgtgactctgccataaaccagaaagggttgctttcttttctgtgttcacagtgagtagagtagcataatcatacttgggaagccacactgccagggtaacatttccaaggctgatgaaggttccataactttactgggacctgcaagggattcagagctgctctaaggcaaggttaactgaaagtgagatttatgttgtctctagaatatgttacagaagcccttgaggggaaaccctcttcttggatgttttcaatagaaacttggctttttaattatggggtgatttaaggatccttcttaactgaattacctaccttacagttcctaccatgctgttcaatgtgttctggcatctattacctgactttaaatgacctttgtagatttttttaaatttaattttatttttttcctcttttttttttattagatgttttctttatttacatttcaaatgctatcccgaaagttccctataccctcccccggaaccctgctcccctaaccacccactcccacttcttggccctggtgttcccctgtactggggcgtataaagtttgcaaaaccaaggggcctctcttcccaatgataattgactaggccatcttctgctatatatgcagctagagacacaagctctgggggtactggttagttcatattgttgttccacctatagggttgcagaccccttcatctccttgggtactttctctagctcctccactgggggccctgtgttccatcctatagatgactgtgagcatccacttctgtgtttgctaggccccggcctagtctcacaagggacagctataccagggtcccttcagcaaaatcttgctgtcatatgcaatagtgtctgggtttggtggctgattatgggatggattcccaggtggagtagtctctggatggtcttagctccaaattttgtctctgtaactccttccatgggtgttttgttccctattctaaggaggaatgaagtatccacactttggtcttccttcttcttgattttttttttttgtgttttgcaaattgtatcttggatattctaagtttctgggctaatatccacttatcactgagtgcatatcaagtgacttcttttgtgattgggttacctcactcaggatgatattttcttgttccactatttgcccaagaatttcatgaattcattgtttttaatagctgagtagtactccattgtgtaaatgtatcacattttctgtatccattcctctgttgagggacatctgggttctttccagcttctggctattataaataaggctgctatgaacatagtggagcatgtgtccttattacaagttggaacttcttctgggtatatgcccaggagaggtattgctggatcttccagtagtattagtgcagtttttgttttttaagttctttaacctttgacagatgtgtaatgttatgtaaccacaattacagtatatcataatgatatttagcaaatgtaaaacatacatctatttatttatcccttttttcttctgatgtcatggcaaccactggcctctttattatactcataggcttaccttttccaaataattctattggtagactaacagagtctatagtttttcacactggctgctttcaattaatcagatgcatttatgtccatgtcttcttttttatctctctctctcttttcaaaaattaaaattttaaatgccacactaagaaggtaagttaataactcataaaaatagttataccaaaataatgcaaataaaatcacttaaaattacaaattgttgacttgtgggactttgtctataaccttttttagaatatggctgactgcacatatcttacaccagagaaaatataaccttgaattgggaagactgccatcaaaggttaggcttttaagactgtgtagcagatgccaaacttgtgggaatccagctgacatagatttggacagctagaccaataaaattattcatttaaaattaatgactgctttttatttgttacttgttggttggttggttggtttgtaacggggtctttctgtgtagtcctggctgttctggagccttgctatgtgaaccatgcttaccttgaattcacagatatgcacctgcctctgcctcctgagtgctgagattaaaggagtgcatcaccactgcccctatgacaatgttttaaaaactgaaatatctgggaccattccacaggccttcttttttgttgttgttgatgttttttcgagaagcaggatcttggctcggaagatgactccatgtataaagagctggccaggcaaatatgagaagtttgaatcccccgaactcacataaagaagggtgttgtagcaggcatgtataatctcagtattcccacagagacataggaggcagagagacagaacaagttccaaacacaagccatctccctccctagagtccctagtccccatactcttgccttcatcttctccacctgtaatcacagaacaagtcccagctgtgaaagggagggaggaattacaaaggaaaagacttcatggaggaagtggtagagacagagggaaggaccttctagtaggagacaatgatagaaatatactcattattctgtttaagtctcttctttgtgtcatgcattctttaagttcagaggaactgcaactttgtactttatctcacaaagggtcatataccaaggactggcaaccaaagctatcctctgacactggaaggcttagttcctcttatcacggaatgatctggcattgtcagcacatacttcatttcttatgcaaaatgaaagacaccaaggtggttcccaagtgttggcagctttgaacaaatcaggtaatagacattcatgtgcaggtatccaagtggataaaagttcccaatgtatttgagtaaatgtctgggagtatcatacagggagaagctgccactctgccttccgaagcagctgcctggcaatgagagattcgtgttgcttcacagattgtattttgcactgttagcattttggattgacgtattttaaataagtgctagcataacattgttgttctcatttgtaaacccccattgagcgccccccctttttaaacatgtttatttgtgatctgtactttctatgataaaatgaatggtcagatattactcagtttttagttcagtttcttttcttttattgaatccaaaattcctttaaatattttagagacaaaaatctttgtcggattttttttgcaagtgtttttcccctgcatcatacggtccattcttttagtagtttttatgtcctgttaatgacatctaacccacacacctctttcttccgtggattgttctcttggtatttgtattcttgggactgtttaaaggagacacatatagtttataattaaagggggaatacattaacaccagattagtgattgagagctcagtagttcaaatgataatccacatgcttcagcgacaaagcagcagggtctgttcagtctaggaaggtgtgaccttcagagtgagaaggtcatctggggaggctctgggcaagtttgtactgaaagaatggagatgctggagttgaacaccacaggtgacagctacagcaatgacacaagtgctcgggaagaacaaagcttgggcttgctagcaagcttcctttttttcactccaacctagaaatagatccatacactgtacatgggctgtttatgaatgttaactaggtgcaaaatgtcctgagaagtacagtctttgcttgccatggttgaactctgaagtgagagttacatcctgagacacaagtgaccaagacaagagtaacttctgtccttgtctctactagatcacaaatctgcttagttttgcttgtttctttgtatgtcctttagtttgttactatgctgtgtatggaatctaggatctcaactgcagataaacaaggactctatgactgtgtttgttcatattttgagataggatctcactaagtttggcaagctagtcgctaattcactctgtagccaaactcagctttgaagggcttttctctttgtttttgtgctggctagttattttgtcaacttgacacaagcatagacatatcgggaaggggaaatctcagttgatgaattacctcatcagattggcttgtatgtatgaggcattttttttttaatttttaatttttaaaaatttttttattattatttttttttagttaacgattgatgttgtagggcccggcccactgtgataggtaccaccggtgggcaggtggtcctgagttgtataaaaaagcaggctgagcaagacatagaaagcaaagcagtaagtttctccctgatgcctgcctctgttctccttgggtccattgctctgcctcaaggagtcaataatcaactgttactgagatatataagctaagtaatacattccttcccaagtggctttgggccctgcagtttattatagtaatagaaaacaaaccagcataatttgggctctttggttttcattattactgttggttgttttttgtggggtggggctgaggttgaatttatagccttatgtatgctaagatgtgctctaccactgacctataccctctggtcctacctgccttgtttgtttgttttatattctgttctgagaaaggatcttgctgctacgttgcattagactgcccttgaattgacaactcttcctgcttcagcctcctacatagctgagattgtaagcctgagctaaaaagctaaggcaagttgatttaccggatatgtctgtacgtaacaatgcatttgctatccactacgtgttgaatttgcctgaaaacagaagtaagtggggaaaagttgtgtaagtattgtgtgtgtgggtaagacttggtagccatggaaattatattcagaacaccgagacctgaacatttaaggtgttggatagagctgtttgtacttccactgaacttttctaaaggctaagcatcctacaatgtgacaagcatctttaacttactttatcactattgacccaggcagagaagagtgtattgtctttatttttcctaagaattggcacaattgagtaatctaaacataattatttattcggtatttggaaacattggtatttgatcctaagatcagattaggtagctgttggaacttgttgtgtaattctctgttactctccaaatattttactgtgttcctttgtgtgtgtgggtgtctgtgtgggggtgtgacactgtgcatgtgtgagctgaaggacaacctgcaggagtcatttcttttcattcaccttgtgggtaccaggaataaactcaggtcatcaacctaggccatgaggccattcacttgctgaatcttctctccagccccttcttccccttccagtagataatgaaaaggcattcttcttaacttgaagtaaccttgtacccacagacaagtctttatcccaatttatctctcttttcttccttctataaagcctttagtagattctatgctgctcgcaactgctatgggtcatcttcggcatagtccacaaataagtgaaatcatactatgtttttctttttgtgtctatcctgcttcttgaatcctgaaatcttatgtgttcactcatgttgttgtaaatgatatttttttttctagctgagtagtattcgaggtgtatagatacatacacatgtttcatttgttattttatttttctatttggatatgtatgcactacagtatgtttagataaatacaaaatgctcatagaggcccaggagagtcagatgccctggaactggaatgataggtggctatgagctgcctgatgtggcttttgagacctgaactgtggtcctctgtgagagcagcaagcatgatgagctgctgagccatctcttctgccccatttttatccattcatgtgctgcaggttacttaggttggtttcatgtctgagctactgtgaacagagcagcagtccacatgagtgaacatgtttctttgacatatttatttttattttatcttattatttatacttactttatttcacttcctttgaatgttcacatagcatggggttactggatcatatagccacatggctttctatgatgttcacactaatttacattcctgtcaatagtacataagggttcaccttaggtcactctgtcaggatgctgcccttgccctgggtcatcattcacttcattgctttacaatgacatctttgactacatacccttctaggatagagccttgtccaaattttaagtgggccagcatcataattctcaaataacctgtgacctacctgttagtacaaaatacatagttcttcagcgttgctgttttcatctctctgggatcagtatgaattgtgtctattacctagtaggtatcctgagcacctgagatgctattgtgcaacacaggcagtggttaggctagtgttccatattctttgagccataggtgctgacctacagtagtttttgtttctctgttcttatagcttcagtacatctatgactcaatcctgacacctgtggcaatctctttcttgaggcactgcacattaggaactttgaggcatcaggaaatgcacattacctctttggaacttccagtgcacaattaaatatcaccattatctttttttttaatgtcttctaacttgtttgtatgttctgaaagagagctcatgtgacccacagagcaggtagcacacagctcaggctcggaacctggtaggtgggaggcaagaaacacaagggtgtgtttcttggctttaactgcacggtgacacaatgtgaaactcaactgcttgacttcatgctggaatgacaagcacacaagcttagtgtcaaagcaacaggaggaggcagagttagatatagaggcattcggcagctgcttttccctttcgactctggaaccattcattgcacgtcctgtagagaagacagttgggttgcacttgactttgagcacagggttaaggtaaggataatttatgaaaaattcttcaaagcagtttacattgcggaggtaaagtgttgatatgggatgatggatgatctagaaatttcaaagccacatacgcctgcatcacattcttgaatgaggccaatagcaaagagaacttcaagaagtaactgagcttgtgtgtatgtgtgtgaattagaagttacaaatgtgtcctgaaatatgaatcactaagacacaaatacttttttggttatggctcaagaaaaacttatagtttatcttctgccttataataatatttttttatattgaaatcagctgtttgtgattctacgaagaaaactgttaaatcccttagtcttggctgagtttcttctcctctttctattcacagggtaagcctgtggtttgtgtggctgtaacacatgtgttttacaatagagcattgtctcttcagtactagagtttaaaaacatatctctttttgatgctaagtaaatgtgagtgacagtgtgtgtgtgtgtgtgtgtgtgtgtgtgtgtgcaggtgtgtgtgtgttgccaacaaaagtgacctaatgggatataagtagggtggaggttttttgttatttgtttgtttggttggttagttggttattttgtttgtttattttcctccttctcagccaaatgaataatatttgctgttactattaatgatagttctctttgtgtaggagaagaatctggattttagaatgaaccatatctggaggtcagtgattgaacttgcagatagaagtgaagatcaagaggaaggttctttttattttctgcccctttgattaccactggctgcttgctaagttcaatgctatgagtgaggaaggaaacccagtgtttcttaaagaaggtgcttgctttggggggtttagagctcatcagactctgctattgggctggaaacaagttacattggcaggtatctctacaccaggaaacagaagacagatgttttttataacaaaaagccaagagatgtatgtgaggataaaggcatttttcctctccaacatgaaagtgaagtgaaattattgctattttaatcactgggagtgactgtgtgtgttgggtccttttgccagacaaatatgattgacatatctttattttgccaagtctttttaaaaatagcagcatctgaattgtcaagttgttctagaaaaaagggacagtggcactataactgaattaggaaggactaatttctttcccctctgtgatcatctgatacccatttaaaaaattttgtggctccttatttattacaggacagcccagtaacacgggtgaatgcaaaggcccacttgctcttgtcatgggggcaagtcaggaagactgtataacctagaattatacattcaggaaggcttgggttttaaaatttcatgtgaattattactcatttacttgtatgttaagtatattcatcaattccaaagcttgactgcaactataatatattctttatgttcctctttgggcatatatatatatatatatatatatacatatatatatatatatatatatatatatatatattacatttcctagtatgctggagcctcaagataatagcactgatttaggctctttatttctgaaagttccttgagtctgcttaggtagggagactttcacagcagggtgatgtagtcatgcagattaaagagaagatcataacttctaatcagagaaagaagtcattaaagggctaatgctttatgaaagtgagacggggacccatctctgcttagatgattggcaagatttatcaggcagatggtattgaagtggctaaggagagtcacccaagtttgagacagtggagagttgatattaatcatcccaagtgatacttttcaataagtaattcatttcttagggaagtagtcaaagtccaagataattttcatatttttttgatttgtgaaggtgggtgaataggaagaaatgttgttaactaacagagtaatgaattaagttactctctcacctcaggcagatagatagagctgatttgttctgcttgaggtgtgttgaatatgagatggcctttgagacatcagagatgttttgtaattaaatgatcttgtttgtgagaagaactgagcacatcctgtcaatttagaggcttatagtacttagatactatctggggttagaaggaaatggcagcatgcattcatgatctctattttttgaggagtttatttaaataccatggaatatcccaggaactctccctgacagtagcagaagaaacgttaggagctatacatctaggcttaccaaaaataattctgtagaatgctttttttgttttctgtagtcaggattcaggtagagatagatattcatgttatcttttaacttttattgacttaacttttgtattttgagattattctataattgtagcgtttctcctttccattcgccatctccaagcccttccatatacccttcgccactctccttccagcttgaggcctctctggttttcactaattattgttacatgtgtgtgtgtgtgtgtgtgtgtgtgtgtgtgtgtgtgtgtgtgtgtgtgtagacatatatattcttaaaaataacttgctcagtccatgtaatgtttcttgtgcgtatgttttcagggttaaccatttggcactgaacagccaattcttgtgctctcccctgggagcatcacctcccctgctcccagagctgctcagttgcctctgttttctgagtagggctgaagctctgaggacgtttctctttcacttttgcatgtccattggtgttgtctttggtcagtgcacatacaaacagtacttaatcctttcttgcctgtcatttctctttacattttttggtttttttatttacttatttttttgtatcactttcttcttttaaaaatattttaaaatgctgtaacttctgatgttcttgggttcatgttacttttaatctaatacaggggttctccaccttcctaacactgtggctcttcaatatggttctttatgttgttgtgaccccccccccaaccatgaagtaattttttttgctacttcataactgtaattttactgctgttataaattttaatgtaaatatctgacatttctgatggtcttaggtgacccctgtgaatagatcatttgacccgcaagtggagcgtgacccacaggttgagaaccactgctctcctcattttgcagtaaaagattgcataagctgtttgatagtaacatggggtaattgtttagaagtgggtactgttattggtcctattttacaaaggtggaaactcagacactcaaaggttaagtaacctaccaaaagccacagaggtaacaagtgataaagagttttcagacctacattaatttttaacattttagtatcagttttgggctggagagatgactcagcagttaagagcactgactgctcttctgaaggtcctgggttcaaatcccagcaaccacatggtagctcataatcattggtaatgagagctgatgctctcttctcatgctgtctgaagacagctactgtgtacttagatgtaataataaagaaatctttaggccagggaccagaacaagtggggtcgaccagagcgaacagaggtcctgaattcaaaatgcccagaaaccacatgatggctcacaaccatcagtatagctacagtgtacccatatacattaaatcaatcaatcaatcaatcaattaatcaatcaatcaatcttttaaaaaattagtatcagttttagttgttattagggaagtctgctgtgtggagggtgtggcatgatgcatatgtgggttgtagaatcacaagggttctaggatccaacttatgttgtcaggcttgggtggcatttgctttcgcccctcatccatatagtcctgctctctctcactccattttcaccccattattttcactaaatatattactggttatttgaaaactgtacttttagtgtctgcataatttcttgaagcattctcttaatcctttgacttaggtcttgtttttatttgatcttaaatttcaaaacttttttttaaattttaaaacttttaattttaatccagagtcttaagattctagacactcttacaaacacgtttattatattaagaaggaacaaaatgtatcaagatcattaaatcatacaaaattcctttcccaaaaagaagagggggggggcagaggatatataggctgggtgggtttctgaattcttcgtagcagtatttctcaatctcttatggttgtctgaaccagacaagcaggcagaatcaacagctcatgggggttaggttgctaaatgggagctcatcagagcagaaatttcatgtatcattaaggtctacatactttttttagtagcaaagaactgcagttagatgtccaacacatgttaagtaacgtatatggtccaaactatagcacagagtgagagttagggccagaacctgtacttaaagatgtgtgatgtagtctgactcttgggaggtttggatgactccagggtgcaggaaatgagtgttcccaggatacagtatgtgggtcagcgtcatggtttctttcagatcaaccctttaagtcagaggggagtaatccaaactgagagcctcagtactcacgcaaaaaaataaggattcccgtctcctagactaggaacactgtgaagtccttctcgtgagtttgcttggctccaactcttagacgttcaggatgatttttggactctactttcactgttctgttaatagtacaataaatatgcttgaaagaaggacttcccaagtaattcaaaactcatgttattcaagactgctttatatcctcgactgaatccagattgtagttctgtttcttagttagaatgtagcaagaatgtgagcaaaatttacgatgtgatttgggttggtgttcatcaggctatgttgttctagaagtaaacctcagtgtttccgtggtctacattaataaagggacacacacacacacacacacacacacacacacactcatgcacacatgtgcatgcatgcaggcacatatacgcaatatatgtgagtcagcctggctgtccatctttgtgcaatagagatgtcacacaaaagtagctgaagctagacaactaagttattcacgtagacttaagtgactcagcttgaaagtgacatgtaccaaatccttgcttttcaactagccaggattacaaacatggttcaaatccagatgggtgagaagtctggaagattcgcagaagagggacatataaatatttcatgaatccagccactctttaaaaattcttgatccttgatcctttaaaattatttacttaaaaatctataggcagtatcacatctttttaaagttttaaacttattcaaattttaaacttctaacacttttctaaacttccatgttgttttcctttatgctcaaagggcaagtatatgatatagtatgtattgtgttttaaagaagtcaaaacattctggttaccaaatttaagatctctataagtcatttaacttctcatctgaaaattggatagtgatttctaatctgtgggtatatttcaaaaattagggtgaggatgacatttaaaacacttgtcccagtgcctgatatatgataaatgtcaaacaaatgcaaatttttgttttatttttatttgaattgccaatcttatagtaggagctacaatatactcataatccacacagcagtagatttggtggggacaagagatatttttgttgtgtttaagtgaaatatctatttcttgtacctgtaggtcatggggagtttcaaaggacatgctctccctgggagtttcttcttcgccatgggcttttggtggactatgaagaacatcctgaaatctgtctacaaaaggcaaactcgaacctgctaccttaactctaaaacattattacgtcggacagagatttgggaaggagttgttgtgcttttaatgtctctcactggtaaggagaccattcatggatgtattctgttttctccttttgagtatttcatgagcaaaaaaatccattcaatacaatattgaaatgtacaaaatgaattttgtattactatgttgcttagtacttaacccaattacagtttacaactgtcataatcttaggaaagtgacatttcataattattcaaaagcctaatcctttttttttggtttttaaagatttatttttttatttattcatttaatgtttctatgagtacattttagctgtactgatggttgtgagctatcatgtggttgctgggaatttgaattcaggacctctgtttgctccagtcagccctgctcactacagtctaaggatgtatttgattatatctaagtacacagtagctgtcttcagacacaccagaagagagcgtcagatctcattactgatggttgtgagccaccatgtggttgctgggaattgaactcaggaccttcagaagaggaagagcagtcagtgctcttaactgctgagcagtccccaaagcctaatccttaatgagttagtatttaatttgtatatgcagtcaagtgaatttcctttatatcagtgacaacctatgaagtagtttgatacagattgtgattcctcaagagtaaactctaagaaaccattgtgtaaattctcctaaaataataaaacagttatgggaaatctccaataaatcattgtgtagagatgatagagagaatcaggcctgagggacatcttgcttcgagtatattcaccttatttcttgagttggacagagtccaggaaacttttaacttcaaagctttccattgttttttttttcccattttttattaggtatttagctcctttacatttccaatgctataccaaaagtcccccatacccacccacccccactcccctacccacccactccccctttttggccctggcgttcccctgtactggggcatataaagtttgcgtgtccaatgggcctctctttccagtgatggcctaataggccatcttttgatacatatgcagctagagtcaagagctccggggtactggttagttcataatgttgttccacctatagggttgcagatccctttagctccttgggtactttctctagctcctccattgggagccctgtgatccatccattagatgactgtgagcatccacttctgtgtttgctaggccctggcatagtctcacaagagacagctacatctgggtccttttgataaaatcttgctagtatatgcaatggtgtcagcgtttggatgctgattatgggaaagctttccattgttattgagcattctataaaaaggatctgtgatttttacaggattgctttagctgctcttttgtaaaaggtaacaattctaactttcccactgcttctttttattcatcaatcaatcaatcaataggattttgttatgatcatcaaattgcaaagtaaccatttccaaagagaggacttttcttgcccattctagaagataacaaaacagcatctctaaggggggggggacacttgtctacataaataattaaccatgtgtagagtctgcatcaaccatcactattcttcttattattcttagttggagcaaaagctaattctttatcaattttgtttgtcaggattcagggaaaatactctttttttttttttttttgaaacagctgcctaagcatgcaatatctagaaagaaaggaatcgtcctttatcagacacatattggaaatccaaatcctcaagtagtcattaaattagaaccaatggttgaactgaaattagcagtattaaggatatgaaacagttgcttggctcatttgtctatgcatagacaaaactgactatccaaacaagcatttaaacttctgcatcaagtctaaatcctatggctaggcatttgacagaaagctcagaaggagaaatcagtatcataaggttagaataatcaatgaacatatgtcctgtgtcttctcacataccaggtagcattgaggagggggttctaaaatgtgctatgttcctccacaggtatagctggtgaacagtttatctcaggaggacctgccttgatcttgcataaagatggccagtggaaccagatcctgggctggcatcacacaaccatgtacttattctttgggctacagggtataacccaaatcatatgtttcactactaatgtacttccactttcctcaagcaagttaatgttatcaattgccatctttgtggagagtaagtatgaagaaaatacattttctttactctttctatctatcagtgtgcattgatgtagtgttttataataatacatctttcatttcttttttgtcaccttgattggcagggctatctgtctaggccatagttgaatatgtgtatctcagacaagatatctatagtctttcttccttacatctttacagactaatttagatctgggcagacacagccactcaaaaaactttagttgcatttcctgtcttgctttaaaagtcatctacaacgggcacttaccatcagtagttgtggagcctattattcttttcactgctaacagtgaaagctgaactcagagtggtaatgcatgaactacttgaaacagagcatcaactcacaatagaatatgtctaccaacctctaatgagcttttcaaaggtcagaaacagacaccctgtgaaattgtggtgcgtagtatctaaaagatgacttcctaattccaagaggttaatgagaatgacagagtatttctttcagtatattttacagattatcctaagggtaatggatgaaacaagtgtttaaaaatttgtgataatttaagtcagtctttgctgaattcctaaaagtgagactttgacttcacctcactcatccatacatccacattaattatagctcctcactgtggtcatgttagttatacattatcctgcacagaaatactttggacgagacttgaaatttttttatggtttattagaacacaagacaaaggttggaagaacggaacagtggagatagaattcaaggattctcttcctaagagacagtatttactctcctccaaagcaaaagtacattgttctgggggatcagtggggatttgctctttgggacaagcatatgtttgtataaaattctgtggagagagagtggtacagtaggaagcctttgactttatcagaaaatatgttttgccccctctattagcatttatgttctacaaccacacacacggtcgggaaatgattgacatttttgtacaccaacttctggtcttcgttggcacattttcgggtctggttgccttcttggagttcctcgtaaagaacaacgcacttctggagctcctgcggtgcagtctcctcatgtttcaaggaacctggttctggcaggtgagttgagacttctagctgacagacccagtgtcatttctatctgtcatttctaattgatgaggcatttgttttttaatactccccttgcgcgagcatcaaagaggtgatgttcttggagtagcctggcaggtctagtgaagattactgtcagagtagctgtggaggaagtaggtgctgtgttccttcatggtggatccactgatcatgtatgtcaaactttggaatggatgattctggttgtaggtgattcctgtagctagagcagcttatagtctgatggatcaaagctcaaaagccatatgaaagtcaaaagacagaatacttactgagagacaactctatgatgggaagggggacaagaagtcatgtggtgtgtatgaaacaaacatactatgaagcttaggattttatgaacattgtggggctaacaagatggctcagtgatgagcagtacttgttgatttgggggaagataaagtttttgtttttagcataacttccactccaggggtccagcatctctggccttgaatggtaccttgctcagggctagagcccctgcctagaataactcagtgagaggctggaagtgtggatcagaggcagagcctatctcactttattatattccctattcacaatggtccaggggttaggttattaccacttctaattcatctctaggtgtctccaacaagatcaagctattttctcatgctcaaacaataatacagctagggtccaaatctagttgtctctaatcccagatccctacacttcccatgttacagcatcatcaactccctaaacttgccatgccattgagagcagcaaatcaaatactaactgtgcattttagagagactattgagtttccatcacgttcatatagacatataaactaagtctagaatgaggtgagaatgtggtttgattgggcaagactttaaagaggagatctttcagtcaccagagagcctggatttgggggtgatgtggctatctcaggggacttaaattccccatgatagttgataaagaattgacaggtgaaaggggaagaagtatggaggaggaggtagagcttgtagtacagggacctatggtaagacgagactaagctcatacattaacttgaaagtgctttatagaaaattatgagactgaaggaatgaccatccagagactgccccatctggggatccatcccataaacaaccagcaaaaccagatggattttgtggatgtcaacaagtgtttgctgacaggagcctgatatagctgtctcctgagaggctctgccaatgcctgacaaatacagaagtggatgcttacagtcatccattggacagagcacagggtccccaatgaaggagttagagaaagaacccaaggagctgaaggggtttgcagccccatagaaagaacaacaatatgaactaaccagtacctccagagctccctgggactaaaccaccaaccaaagaaaacatatggtgggactcatagctctagctgaatatgtagcagaggatctcctagccggtcatcaaagggaggagagccctttgtcctatgaaggttctatgtcccagtatagcaaaatgccagggccaggaagttcgagtgggtgtggtggtgagcaaggggagtggaaggggatagggggttttcagaggggaaaccaggaaagggaataacatttgaaatgtaaataaagaaaatatctaataaattatattaaaaagaaaaatatatctatcagatgattgctgtctataccagttgaggtagggtcttaacagaaaacctaactggagtaaagaggatagcacagaaagaactagtgtacagtgactcacaatgctttcccatgtgcatatgtttaataggcaaaagaaaagctattctggtcaagttgatgcagtgagcttaggcttccctgactattgtcagccctgagcacatggaaaagacagataagatagaaaacagccaccgatatttgaaaaaggaacatggaaaaatagaagagaatgttttgaagaaaattgaaaaaaaaaaaaagaaaaaagaaaacatctaactatactcaagtaaaacagacaaaggcagggtataaagtcttgtggccaaaagtgaaacacaagggcgtggcaggagcagagctgagctggaggcctgctaatgcttgtccaggacaatggttggggtaaaggcaggcccttgcacctcgtctggctgctgtatgtgttttgtctctatgatcgtcttgttgttgttgttgttgttgttgttgttgttgttgtttatgagtatgaattctgtgtgcttaaaaggcaggtatcagttcattactcgcttcaggattgtatgtgttgtctgtctttccgttactgcaacagatgactaagtgatcaattacagagagagaatgaatatcttcccacgtgctctccaaggtcccagtccgtgctttgttaggccctttggcttttaggctattgtgtgtgagcacatcacagtggggaatatgtgtagagaacactcgcctcatgattagaaagtaaaagagagaagtaatggccagggctccacaatctcctccttctgacctaagggctcctttaggcctccaacccaaaggttagatgacttatcaatagtgaaacaagtggagagcaagcagttaccatatgggccttgaggagccttgcatttttccaattgtagtatacatacacatatatacatacatacatacatacatacataattttattaatgagcttgatatttttataaggacagtaagagcaagaaatgaaacctgaggagagttgatgaaagaaattataacataggattataattaataaagtcacctaatatttagttaatacttagttattagttcttcttagacataaaaagagaaggacaaaagagcttattgctgtcattttgggcacaaaaataatattttcacacttcttgaaatgtttaaaaaaaccctcaaaactatgagattaccatctatagggataaacttgtgattatttagaagtttttttcaacctatcaatatgtctagattagtttcttgtattgtcaggtgtctagcctgaatattgtctctgacccttaaagaaaatgaacgtttttacgagtgtaaatatatattaacaagaaatgactagtaagctacatcttcatcctttgattcctctgaaagaaaaatgtctagcaatttaggggaatgtcttgtgcttccattattggtatgagcagtatgtgaacatgcgtgttcaaatctctctcctaaacgaatgacattgtattgtgattggcttttcaccactttcatctcctgccatgtgcccacaaatggccaacagtagtacacaaattatcaaagattagagaaagagccatttggactcttggacgattggaactgtgtgtatggacatgtgagctgaatgaggcaaatgtacagactggttattttttatagcttatactgaaatggttctgtgcagacagaagagaatttctcctcttagcctataaaagtcatttctttcttaaatcacgtggcatttacaatgtgtgtattcagtgactaagccacttcatgtaatttaaaatgagtgtgcccttaattccgtgacaagtttttctccctgtgggagagcaacttagaggttcactttgtactttcttcttcctttgcttctcctcctcttcctcagagatggttgtgcagtgggaaagattttcctgttgccatggcttcttgtcactttggatggctgtctttgtgtacatcctagctctgtttttccccatgtcccaaagattcctcacaggacagttgtccagattctgagttcaaactgtagctcatcctcatctgaatattataaaaaacaaaatgactaagcagttaggagcacatagtactctggcagaggacccaggtttggtttccatcacccagatggtggctctcaaccttctgtgactactattatagataccgagcgtgcaagtggtattcagcatacatgcaggtaaacactcaaagtaaatacacacaaaataaaataaatgtctatttaaaacaaaagtccattctaaaatggcaaaatggttcgcaattgtgccccaaggcctgacattgtagataaaacccttgtttggattttcaatgttgacttcaatgagattaacataatatggggcagtataattcatactgtaagctatagataatggacctctgggttattccttattagaataaaaaagttagctacagtgtttctaatagcagtgaagattaaactaatcaaaacgtgggtttttttttttttttggtggtggtggggtaccatacaaaacatagtaaaaagaattccttcataggtcttttctcttgtaatttttctggtagaaaactaattaggaccacttataaaaatatattgttcattttgcaagatgtcttgggtttgttagtttctggccctgagttacaatgttattaattcatttaagtttagcttaaaggtctagaatatcccttgccttccatagtagttatcttcatggtccctgttcttgggtcacatcttggcctttagttatatatgtagctttcaaacactaggaggtaagggtctagtaagaaacactcaacttttctgtcactctgacataaaataataataaaaatagaaaaaaaagagagtaaagtcctgttgtaaaatagtagtttttaatttatcattgtcattattatttttaatgatggctactaaaggtttcttgagacagtctattttggagatttctaaaggcaactatggagtctgcgtaaaatggtacattagaacccaattctgaaatattcagaaaaagaggggaacaaggtttaaaacatatatggggaacctgtctctagttgaaagagatgaagaaggaaagaaagatgcctgcgtgagattttagtaaagacacagctacaaaaatccatcggcgagtcaccaacatcaacacactgcttgcactttttggtagctgaaaggcgctttttaatggactctgtgctaacgggtcactgagcaggagagattcttgccaggttacaaacatacacaaggactggaggtactgttaatggaggagacattgagacccttagaccatggagatgaagacacaactgtgacaggttctttaaggcagagattctccatggggacactaaaataaacaacccaactgccagggttactgacttcatgggaaactgagaattgaggggttaaactggtccaggagtcttgcataggtctgtggccagaaagacacagtctagtgacaaaggcaggtataggacagatgttctacactttctccgtgccttaaacacagaaaacctcacatagagaaaggcaatgctcaaacactatgtaaagaagtgttaacgggaagataaggagatatcagtctgggaaagtctaacagaaggtggagtcctacatcaaaacctgtattaccaggtggatgtaccaacctgctttgtgtgagtgaattaatgagactggcagccctactctcacctgcagagatggatatcaaagcaaaaaggtggaagagaccacaaccaactccaccaagaagtgaccctgggttataacaccttcacttcatttcatattttattcatttattatttttacctttatcttttagaatttgcagggctctacttctgttgttgagttgttctgagatagcttgtatttccacaggagagtcttttaccaccatccttcctctgtaatataatggttgctgtcttggttttctattcttcctcccttcagcaaaaccataggaaatagcatactcaataatgatgtcagggggaaatgctcttaacttcctagtgaaaagatgcaaactgcctcattgaaccaaaacccagattctgggaatctgggtctgggaaaagacactaaggctagggttgtttattgttcttgcagaggagctggattcaatggctggttcccacatcaaacaggccataactgcctgtaataccagctccagcatatctgaggcatctggcctcttcaggcacatctgtttatacccacatacagacataatatatacacacattttttaaaaataagataaatcttaaaaagagaaacaagatcaaagtatgtatgtttccaggaaatatgcttcacttgtaaaaaagaaaaaaaattcaaaaactgagagtcaaaagtttggaaatcaatcaactaaaaacattgaagccagaaggagagaaaaaaaaaatttggcagagctcttctgatacctgataagagctgataagtagactccaaactaaaagtagtcagaagggatactgaaggccactgcatactgcagggaacaattcaagaagtgttggtaattttaaatatttattcatggaatgtcgggctcccagtttcacaaaacaaacactaaaatgcagaggaggtcggataggtattaatataatgatagtaggagactttaattccttgtccatatcctgaagtaggccttcgcatctaagaattcctaaagaaacttcagagatagactatttaatagagcatgtggattaacagaggtcaacagataattcatcgaaaagacaagattacattcacagtcttcttggcacctctcaaaacgatctctaaaatcgatgagattacaggccacaaagtaagccttgagaatacaaaagaatcgggctggagagatggcttagtggttaagaccacttgctgcccttctggaagacctacctgggtttagtttccagcaccacatcagccacatgaccatctgtaactgcagttccaggagttctaatccttgtgaacactcgcttgcaggtgctgcacatacagagcaggaggcaaacacacatacacatacattttttttaaaaagagagactattacaaaaaatttcaaaaatccctgtatcatgcagattgtagaagaataaagctaaaaatcaattggaagagaaaccaaagaaactatacaaatctttggagaataaaaactatagcacactcagcctctatcttgaaccagctcggtttgtgtatgcagccttctttggtaaactgagaaaatcctaattctgatatctctcagatgctaaggtctccatttcatcctaggcttcaatgccacagattcacatatggcctctcatggattgtaagccagccacaattgcctgaccatgaacgttctaagccaggcaaggtaattcatggaaagcaagtctcaaaatcccaaaagaataaaaaagtaaacaaaaaacaacaaagcattatgaacaatgcacgttatagcctgacatcttagctgtcaatactgtaaatccagaaaacacactaaagtgtttatgttctcagtttctcctcctcctcctcctcctcctcnnnnnnnnnnnnnnnnnnnntcctcctcctcctcctcctcctcctcctcctccattcttcttcttctattccaaagtggcaaaggggaccagcaacctgttttctgtttccatcttggtcctatgccctttgtttacccgccagtttagtgtcatgatttttctccaaagttacctagtaagatactttctaagtctaacgcaggatcagccagaagcacacaggccacagaaaaggcagagcagctgggacagggtccttcctgcatctgtctgcacccaggaggtggggctgttctgcagccctctgtgcagcattcctaccaggagagagcttgtctccagggaatgccctgacccccccgggactcaggggagatctacattttctctcctgtgactatctaaggctggaccagtcaggagaacacaggccacagaagcaacagatcagttgggtcagggtccttcctgcctccatctgcacccaagaggggggactgttctgtagccctctgtgcatcattcctgccagaggagagtttgtctcccaggagtgctgacacaggcttacagacccacaggaggaacaaactccagccagagacagcaacaacatctaacaccattttactagatggtaaaaggcaaacccaagaatcttatcaacagaaaccaagactacttggcatcatcagaacccagtactcccactatagcaagtgaggtatcaacacaccggagaagcaagattcagacttaaaatcatgtctcatgatgctgatagaggatttaacaaggacataaataatttccttaaagaaatacaggagaacacaggtaaataggtagaagcccttaaagagaaaacacaaaaatcccttaaagaattataggaaaacacaaccaaacaggtgaaggaaaggaacaaaaccatccagaatctaaaaatggaagtagaaacaataaagaaatcacaaagggagacaactctggagttagaaaacctaggggaaaaaatcaggactcatagaagcaagcatcaccaacagaatacaagagatagaagagaggatatcagggccagaagataccatagaaaacgttgacactacaatcaagaaaatgcaaaatgcaaaaagatcctaacccaaaacatccaggaaatctagggcacaatgagaagaccaaacctaaggataataggtatagaagagagtcaagatttccaacttaaatggccagtaaatatcttaaacaaagttgtagaagaaaactttcttaacctaaagaaagaaatgcccataaacatacaagaagcctacagaattccaaatagactggaccagaaaagaaattcctcctgacacataataatcagaacaacaaatgcactaaataaagatagaatattaaaagcagtaagggaaaaaggtcaagtaacatataaaggcaggcctattagaattacaccagacttctcactagtgactatgaaagccaggagttcctgggcaaatgtcatacagactctaagagaacacaaatgccagcccaggctactatacccagtaaaactctcaattaccatagatggagaaaccaaggtattccatgataaaaccaaatttacacaatatctttccacaaatctagcccttcaaaggataataaaggaaaaactccaacacaattttatcaatgcagcagttatgattactatgggtaagcaatgcattttaaaatagaaaggtgtgagtcctataactttgatgatctctttccatgattttaagaatgtaataatggatacaatgcaactccacacaaattctatgatcaaaaaaggtttgtaacaaaatcctattaagatttcaacagccattattttgatttggcaggttgccctgggtgttttgccatctcaataatattgagacatgtagtccataatttgagatggtttttcatttccttgggctcttgattccttttaccagtgttatgcagagcctgacatatatttcaaagcttctcagtctgtgtgaattcatgtgtatttacatgagcatgtttgggtggcacctggaatcaacatcagtgccttgctggtaccagttaaatgttcccccatggagttatagttccagttgttctcaggtacttctctttgctcagtgttagtttaagtacattaaagaaacttttgttgtgggatatatatgtgatgattatgtattgattttcaatttacaaatctgtaaatctccttcattacatttgataatttggttgtgggtttttatgattttctgtttctgatcatattatgtatcaacacagaaaatgtttactctttcttttccaagtgaatgtctttgtttttttttattaattttcctgacaagaattttcaataaagtgtttaatggaggtgataatagaaaatatctttacattgtccctgatcctgatgagaaagtcctagccttttaccagttaatataacattgtctgtgggtttctatctatttaaaaagcattttacagtctaattttgaaacagcagagatgagactatgcagtgttggcattatgcatcaatctttatcatcattagagtaaaatatgctttggcaactggtaagttagtgattgtttttaatacatgatccattccttggcatatgaccatcaagacttgatagtgttgaacttctaattcaaaaggaagattttattcttaccttcttataagacagactggggatttctgaaagtgcatccaaggccagagatgaccactataaacattttgaaattagataattaaatatgattaatattatccttcaaaaatatggcttgggagagagtggacaatactggaacatacagaaaacctgacgttgtgtttgtgatgtctcaaattatgggagtcatatttgttagcaaacatttaaaaatgtgccttctttgagaatatggttggttattttgatgtgcacttgttttgaattgcagatggcgtttgtgctgtacccccctagtggaagtgctacatggaacctgtcagatattcaaaataaaatgtttctctcaatgtgcttttgctggcattatgcatcaatccttatcctcattggagtaaaatatgctttggccaactggtaagttagtgattttttttaatggatgatccattccttggtacatgaccatcaagacttgataatgttgaacttctaattcaaaaggaagattttattcttaacttttttataagacagaccagggtattgggaaattatctctacacaaagaagtagccagcaaaaaaggtccatgtggacttaaagttgtaacacatggctgctgtgcctctgacccatgccttaccctgcacattctctctggttcctctgtcctttcacatatactgttgtctattctgaatgaccagatcccctttgtgcagtgagatctccacttactcatgagcacacactttaattgtcccatttcataaccttgggacttttttgacaaatgtatattaacgaaattaaataagacaataaccctaatatttctaaaagttgaatgatgtattcttatacacaagaatcctgatctaactttctgggcaggggaggagcaacatagaagattgctgagaacacattttcctagttctattgccttttggctatgacttcagactcattattgagacacaaaaagtatgaatcttactgttactaaataagagaacctaaatgggaccatgaagatgtaaaacctcaacaaatggtcatccagtccacgttgtcttcctccttatttggtataaaaataagaggtggagactctcccagggggaacattcttgtcctgtagccagggcgaattagagaggcagacaattgaaatacagtccagtgagcgttagcagtctagaggacaaggaaggcttctcacaactgaaaggtaatgttagctcagaaaatgagtaggacagaaagaggatgatcatggctcccacggtagttagtaccaaagcacagtgggattggctgatcttaattactgggcacatacgcagcctctaacactcaatcctccagactctacactgagtataatactctacccctatagcaaagtgtacctagtgttcagcacagtggacgatagctccccagaatgtatagagacacaatccatagtacaattactatatagctagtgctgtacaccttgcaggttctccagatccctagaaggtagcagctattcctaggctccacggtttgtcgacttctactgtaaccagctctggtcctctaggcaagggttctgggtcgtccctcctcctctgagttttccactacagtagctgcgacactgggactctgaaaaagaaactcaaaccattgccttctccagctcccagacgccccacttggtctttggatgggtgtacttcactctgtagatcctttcttcctcttccagattgtttctgttagttctgttcccttcccccccaaagcgtgtgcttcagctcattgttatggctggctgggctactgagtcttgctttcttcccctgttgttctaggctgacatctgagcctcatcctcttaggggctgggcagtcttcaggaacagtaccaggatgcaaggaaaaactctccttcgtgtcagctcccctccagagccaacagaagactactgtctcttcctgtttcaaaagccttcagatgcctaataaatggcttgcccatttacaggtccctagaaacaagaaactcaagttttattttttgtaaccgcttacaattccctgccccttccccaagtgttgttctaatctctgagtggacagttccctttgcctggcatatttatactaaatgctcatctcttctttgaaaccttctataattcctttgattcgtattgatctgtgtttcctgagctccagtctgagctttgtttgcacagacactttaagtattgtggtctatcaattgtcatatgcttggttgtagtccctgttaatcctctctaccagctacattgtatcctcatgtgaaaaccatttttatatccctgtacctactggcacattggcagacaaataagaagtgctcagttgacatctactagatgtgtactggatctgcatttcagaggtatttaaatacaatcttcttttgttcagaaatcctattttatatgtttttcaatttccctttaatattgaaattgaaaagacatgatcaagagttcaactttccctgaactattttgatatatatttaaggaacagttttaaaatatcacaaagactcagtattgtcttttagtgagatcatgcagatataactcagttctagctttgagaataaagagctttgaaactcctttagtcagggtttgactgtgaactgattgcttatctacaagtcattaagtgttagacattatatccatgttgtttgacatagcaccatgacaaccacacaagcacatctaagttacagaagtctcctccccaaatgcttgaaagattaattatcccaattttgcaaaataatggctcaggattgactcattctatcccctgcctgtagtcttgattacataaactcattgaaagctatgtattgggaaatcttgttgcatatttaatatgtcccacaaatatacctctgttgcaaataactatttcaatagtccttgcctatgagtaaagaagcctatatccaaatatatgtttcacacagtgagtcatgtgagctattgtaaagaacaaagtgagggttgttcacacaccagacactctctgctctcttggatattaattgatgagaacatgaagcaaaagcagagacatatgttgatcttggtttcttcagttttctccattctagtaactagaaatgtgtctgagtatctgcctatctctatcatctatctgtctaaccacccatatgtacctctctctctctctctctctctctctctctctctctctctctctctctctctctctctctacctctctctccctccctccctccctcnnnnnnnnnnnnnnnnnnnntccctccctccctccctccttatttacctagttggggtgtgttgtttcgaatgacttttgttttgttttgaagacagggtcttcctatttagtcccaagttgcttagaactttctgtgtagaacaggctggcaacagactgcctctctgcctctgcctctgcctctgcctctgcctctgcctctgcctctgcctctgcctctgcctctgcctctgcctctgcctctgcctctgcctctgcctctgcctctgcctctgcctctgcctctgcctctgcctctgcctctgcctctgcctctgcctctgcctctgcctctgctgcctctgctgcctctgcctctgcctctgcctctgcctctgcctctgcctctgcctctgcctctgcctctgcctctgcctctgcctctgctgcctctgcctctgcctctgcctctgcctctgcctctgcctctgcctctgctgcctctgctgcctctgcctctgcctctgcctctgcctctgcctctgcctctgcctctgcctctgcctctgcctctgcctctgcctctgcctctgcctctgcctctgcctctgcctctgcctctgcctcctccatggtggggtgaaaggcaggtgccaccatgccaggctgcagttccttttaatcaccccacctttcacagtgcctcacaggaccattgttgcacatgagccacagatgcctagaacccaataaaggtctaaatgtgtctgcacttgcttatggcaagagcaggtataacccagagagaaagaacaggaagtagtgggagttactggatctttattaacatttcattcccagtaagcagccttcagaaatgaacacaattgattaatctctttcatcttacgtggattggtgttgttctatgtggaaagaatatatgggcttttaaaagatgacataaatgctctccagcctttaacctgttacagaccatcagcccctcacaagggtagtggcttgaactattcaggacatatgaacaaagttagtagtaaaaaaatcaaggcaaataactgagcagttttttttagctgttgagttgacagacattattgaatctgttcagttgttttttattgggggtgctagggttagttggtggctaaagaataggtagcctctattcacagatgagtgatgtgacctcctgtcatattgctccaaatgacagtgatgtgtcaaaagagccaatgttctaggttagagtcactcctgactctggttagggttaggccagaaaatgagatgaagtcgatggatgaagctcttatgaagcttttgtgtggggtccagagcacagggaatgacagcatgtatagacagaataagccagaactttatcagacaaagaaagagagaaagtaaaagtcagaatgtaaagaggccgaaggaagctaacataaaaagaaatacaggccagacttgacatgcatattcagttgggctgtcatccttagaacaggtcatgtatttccttacagcaaataactcctctttgcaatccacaggtagtttgatgtagatgttctgctaaagtcagattcatttacatttgtcacagtcaatagcgtctcctgcttgtttttacaaatgatcagttgtcttctggtgcataactaagcaatctcataacacattttatagacacatctttcctctttccttagtccttggtggagtccatactcatttccaggtatctcaaagccacgtggaaatcatttccctttgttggattgcctctgttcatggtcattgtggcaataatctatagtttattacagtttagattcttatttctctaaagttttgacttttgatagcttgtaaccagacatgatcttcttctctcctaggttagtcaagtctaggctgaggaagggctgcacctcagaagttggactcctgaagcatgctgaccgtgagcaagaatcagaagaagaagtatgatcttgaagtctttcttgataagccttctccctttgcgttgcctttgttcatggctttgtttcttgacctctggtctcaagaacacttgtctgaggctgactccatgctgtttgtacttccagttttgttaaagtgttggactttaagtatcttactttcagctctgaaagaaccatgagtgataaattcactttttacactgtgcatgccatgtaattcaagaccaatcataattgttttccaaagtttagtttcgtgtccatttattaaaaatatttttttttattttccgggtagataccttcaa

SEQ ID NO: 144 - DNA, 1183 bp, Mus musculus
cctaactgacaaagtggggagagtaaggtgtgcgcaaacaggacaagttgggtcatggggagtttcaaaggacatgctctccctgggagtttcttcttcgccatgggcttttggtggactatgaagaacatcctgaaatctgtctacaaaaggcaaactcgaacctgctaccttaactctaaaacattattacgtcggacagagatttgggaaggagttgttgtgcttttaatgtctctcactggtatagctggtgaacagtttatctcaggaggacctgccttgatcttgcataaagatggccagtggaaccagatcctgggctggcatcacacaaccatgtacttattctttgggctacagggtataacccaaatcatatgtttcactactaatgtacttccactttcctcaagcaagttaatgttatcaattgccatctttgtggagacatttatgttctacaaccacacacacggtcgggaaatgattgacatttttgtacaccaacttctggtcttcgttggcacattttcgggtctggttgccttcttggagttcctcgtaaagaacaacgcacttctggagctcctgcggtgcagtctcctcatgtttcaaggaacctggttctggcagatggcgtttgtgctgtacccccctagtggaagtgctacatggaacctgtcagatattcaaaataaaatgtttctctcaatgtgcttttgctggcattatgcatcaatccttatcctcattggagtaaaatatgctttggccaactggttagtcaagtctaggctgaggaagggctgcacctcagaagttggactcctgaagcatgctgaccgtgagcaagaatcagaagaagaagtatgatcttgaagtctttcttgataagccttctccctttgcgttgcctttgttcatggctttgtttcttgacctctggtctcaagaacacttgtctgaggctgactccatgctgtttgtacttccagttttgttaaagtgttggactttaagtatcttactttcagctctgaaagaaccatgagtgataaattcactttttacactgtgcatgccatgtaattcaagaccaatcataattgttttccaaagtttagtttcgtgtccatttattaaaaatatttttttttattttccgggtagataccttcaa

SEQ ID NO: 145 - protein, 271 aa, Mus musculus
MGSFKGHALPGSFFFAMGFWWTMKNILKSVYKRQTRTCYLNSKTLLRRTEIWEGVVVLLMSLTGIAGEQFISGGPALILHKDGQWNQILGWHHTTMYLFFGLQGITQIICFTTNVLPLSSSKLMLSIAIFVETFMFYNHTHGREMIDIFVHQLLVFVGTFSGLVAFLEFLVKNNALLELLRCSLLMFQGTWFWQMAFVLYPPSGSATWNLSDIQNKMFLSMCFCWHYASILILIGVKYANWLVKSRLRKGCTSEVGLLKHADREQESEEEV

SEQ ID NO: 146 - DNA, 104939 bp, Homo sapiens
  misc_feature (1)...(104939): n = A, C, G or T/U
caaacatagtgagatagttaagtcactattcccagagaagtacaggagcaaatagaaaagaagtgaaagagggggaatgagaataacaaatcagaggtcttttaaagatcatgattcaagactgtctagctcaaactcccacttgaggcaggaactccctctgcaatgtgtctgccaagttgccccagcttttcttgattaatttaagggctaggaaagcagattaaccttcatagtatgataataataataataataataactattattaattatttcactgcattaaagctctagtagttgatattgttataatcctgtccactctttgacccccaaagatccttttccatcctgagctgaaatctttgaaggattccatccacatgaaacttggtctttttatttccctctggtaccccaaagcaaaggtcttaatcctctcctgaatgatgtcactactgttcctttaagagctctcatgcctttctctgcctctctgttgccatggggtctcctcaggtgaacatccctgcaccatccatcattccttacaaaacctaagttccacaaccacattgccctaaatggcttcctttgaacccctctaaaatatggtgtccatactaataaaaatgtaaatgaaaacaatttaaaatgacaaattggcaaatgtttttaaccagtaattctcaatacttgggagagtgagacgagatttgttcaacctttcttgaatgtaatttgtgtctcaagaatattacaaatattattactacttcaccctgtacatttccttataggaatccattcttaagaaataataattgtgggatcaaagatttttgtgtaatggtgttttttacactattttgcttaaatattccattctgaactgctttgttaaggtataactggtatacaataaactgcacatatttaaagtgacaatttgataattttcttttttcattgtggcaaaatatacagaacataaaatttaccgacttgataaattttgacatattggaaaccttcctttttgctccttcctcccatcatgctctagacaaccactgatctactttctgtcatgctatttccttcctttcttccttctttctttcctttctttccttctttctttctctttctttcatctttctctttctttctttctctttctttctttcatctttctctttctttctttctttctctttctttcatctttctctttctttctttctctttttctttctttcattatttcttctcttttttgaggcagggtctcattctgttgctcaggctggagtgcagaggcaaggtcttggctcatggcaacctctgcctccctgcttcaagcgatcatctcacctcagcctctggagtagctgggaccacagacataggccaccacgcctgtctaatttgtgtacttttttttgtagagacaaggtttcccccatgttgcccaggctggtttcaaactcatgtcttcaagggatctgtccacctcggcctcccaaagtgctgggattacaggcatgagccaccaccccttgctattcttgtatttctgcctatttttgcttcatatagtttgaggcatatataacttattaggtgtatataacttagagctgtcatatcttcctaatgcattgaactttttatcattacaaaatatttctatttttattaatgtttttaaagtctatcttgtttagtattaaaatataatcttattagccttcctttgtttactgttcatatggtgtttatttttccatccacttatacacaatctttatttgtcttcatattttaggtgctttattggtaaacagcatatacctgtatatgcatttgtgtgcatgtgtgtgtgtgtgttttatctactctgacaatctgtcttttatttgaagtgtttggtttatttacatttaatgtaattactgatatattgctgtttaaacttaccatattactctgtgcttcctatttgcttcatctgttatgtgttcccttttctctcctttattaatttcttttaaatttcatatttttgcctattccatttcccccttaaattagcttggtagctgtagctgataccttgcatcatatcctcttatcctacttcagatttctgctgcgactgtagtagagagctccttctgagtgcagctttacctcaggtgaacagtatctcatttccagcactcaatatgtatttttcactttcagtcccagggaattctctgatggcaaaagggagcaagtgccctaacccttaaagtttcgcagaagcagttgcttcccctcttctggaggagactaatctcattttcccggtaaccataaaaaaactccctcagatggctgcttcacagggcgatattcacccttcttgagattagctcatgctatatgtcactgcctacagaccaacagcttaagaggagaaatagtcttcaccaagattaaatatcttgctttccaaaagaatttcagggcccagctaatatgaatcagcaggaaccaggagaacatatgtgagtattggagtatatgtggtgaaacattgaccagacagggaagaatttatcaacatggtagcactctcttctgactctgaatttagtaacctggaaaggacatttggggtctatactagtagcctgctggaatgactccttgaagcttgggcatgataaggatttacaataaaagaggtggtgtggtggcttatgcctgcaatccaagcactttgagaggattgcttgaggccaagagtttgagaccagcttgaaaaatataatgagactccatatctacaagaacattataaaaatttagttgggcatggtggtatgcacctgtggtcccagctacttgggaggctgaggtgggaggatcacgtgagcccaggagttcaatgctgctgtgagccactgttattgtgtcactgtgctctagcctgggtggcagagcaatacactgtctctaaaaaaaatacaaagaaaaaaaggtggaaatgccagatctgccttggcagaatattgagggagggaggatcagagggcttggggaggtagatttattatatgagactagagatctcatcccttgattatgttgcccaagagaacccagagtaaactgaatccattgcaatcataaggaattcattagtaaagtagtaacgcacttggtgtttctgagcactggtgaccatccactatttaacaataggagatactgccacagtgctgggctccctaaaagcaatgataagatttcagaatatgagagtgcaggtgaggataagctggacttaattactgtaatgggatgcagggtcagagtaccagtagttaccagagtacttagtgccttggcaggcagggatctgtggtgatggctaacagaccatggtgtttctgttaagaactgtgaaggttctgagatttttcccttacatgtaagctaacaaactagtctaccacagtgttgtggatgatgacaaaggacaagagactcttgcgtcagggacaaaaggtggtttgttattcatagtcatagcaggagccagattatcagcattcgcactggttcccagaataccaaatcctacaggatgacatggtgagggccagttgatatgtaaacatgcagcaggtttctgagcttagaaacttccaatattttataatgcttgcaagcaaacctttccaacttctgccctgaaataagacattgtctttatttttttaaaaatgccctctcctctggaaggaggcattatctttattttccaaggctgtttgctctaccttcttgagctgatagtctaagaaaaggctctctgtgtctctgttcataagatatgcagaaacctgagacatcagtgaattgtctcctaacaatattgacccttgtttttataatactatcttcacttggggcaaattttcccatgaatatgccactccatcagccaatctgattaacctgaccaatagagctgggaccaagtctctttaatttgtcccatacagcatttaattaaggctactatcaacaggactccaaatatcaggagtcccagaatattgacttcaaatctacctccctttctgcccaggctcctggattaaaccagctgaccaaatgccacaaaccatcagaatctatctttgaaagccaaatggctttttctttaggtttctgtgttgacctttccactaggcccaaaaaggcattaatcttgattcaataggatgtatgagtgatggtacaataggagtgatggtacagactctgacttggtctgtaaggagaaagtctgtcatctataacaatcctggctagtgagttgagactgacctgaatgcctttaaggaccaaagtggtgtcattgatgacatcatttaaagtaaggggtaagtcttgcatcatctttgtttttttttttttttagaaaatgtcttattctgttgcccaggctggagtgcagagtagggtgatctcagctcactgcaacctcgccttctgggctcaggtgatcctctcacttcagcctcccaagtagctgggactacaggtgtgtgccaccatgctcggaaaactttttgtattttttttgtagagatggggctttgccacattgtccaggctggtctcaaactcctgagctcaagccatctgcctgcctcagactcccaaagtgctggagttacagaccagagccaccacacctggcccatcatttctaattatacaacttccattgttggaaaaactaccaggagggtgtgcataagaaatgcatcatttaccctctgggaagcttctccaagtaaccaggggagtctcatttttttnnnnnnnnnnnnnnnnnnnntgcccaggtgggagtgcagtggcccaatctcagctcactgcaaccttcgcctcccaggttctagcgattctcctgcctcagattagtctcattttttaaagagatctccttggtgatctgaaagtttcataatctgctggtagtgtttgtttaaatgctagtaggtctcttctgacaactcctaagatgcaactcactatggtttttgttgttgttgttgttttaacagacaggatctcactctgttgcccaagctggagtgcagcagtgctatcatagctcactgtagccttaacctcctggactcaagcaacccttctgcctcagcctctggaagagttgggactacaggtgaatgccaccatgccaggctaatttttaatttttcgaggagatggggtcttgttatgttgccaaggttggttttgaactcctagcttcaagaaatcctccctcctcagccccccagagtgtagggattataggcatgaacaaccaggcctggcccactatgtttttgggagggaggcaagttaatgccaaacttctcaagaaggatggtactggagatgtgcatggctcccctagaaagaccaggattgtcgacaattgctggggccctcaggggaacccacatcagtggggttggaggaaggactacaaatgacagttcttccagtgtggcttcctggctagttggtaagtcttggggttcttagttaagttagaaaaattgaagctggttgtttttggaaagactgtccgagggtaaccagtcctatctgtcctgtctgtccatgccactggctgagtggcatttgtttacccccaagagtgacttctcagtcctgactctgatgatgatcatcagactccgatgaagacattcagaggtgttgacaggtgcttggtgtgggaagtataggagttggggccatcctttgatgttgccaacagtcttcttggtaaggttaagggaatggttatcaaattgtggtaagaactatcggatggggtggcagaaccacagtcagtaaaatttaaggtgcttgcaacagtttgggagagcgtcattaaggcattttctctggggaggaaggctctaaggcagttctgaaagacaaagtatcactaatgtccctctttcctctgtatatcacagggtctaatgtgtatcttcctcatgtgccaggcttgttgctttcctttcaccccagtcgtcccctattcacaccaagcccttttgtccagagggccaggtgcaggaaggatagtacattttgataagtttatagagatcccttatgtccactccttgggcccacacaggatactataggaggactcggtgagcagtgtactcaactcaactcttaagtgttcattacctttatgatctaggacaaggtctgtccaacaagagattgcaggtggctgaaccagaattaagtttgaatcccctagccttttgtccagcctaactctgaaggtcacaccaacccagctggcctagtgttaccattaagagaaagaatgaaacatcatgcccaagaatggtcaggtcaggatcccaaattttcctaactctctgcttctttcatctggaacatgacccaggaagcagctgagcaagatgatccctttctggagagagttacatccagtgaccaaactaaattgtggtggtcaggaggaggtgagggagatagagtcagaagtatttttttaaactttttctttcgagctaattgtagatgcacatgcaagttgtaagaaataatacagagaaagcctgtgtactcatcacccagtttcccccaatggtaacattctgcagaattacattatctcaatatctcaacaatatcccatggatacagtcaagctattaataaaaatttccatcaccacaaagatccctcatgttgttctttcatagccaagcctacttgcctcctactccaccatctccttaatacctggcaaccacttatctgctctttatttgtataattttgtaacttgaaggatgttgcacaaatagaattacaaagtatgtatggaaagcatccagtctttcacattcagtataaggtcagctgtaggtactttggtaggtgttctttatcaagtgtggaaattcccttctattcttctttttctgagcgtttttatggtgctgaattttgtcaagtgcttgttctacattgattgatatattcatgcgatttttcttttctttagcttgttcatatcaggaattgcattgatcgacatttgtttttttttttttttttgagacagagtttcactctgttgccccatctagagtgcagtggcaactgcagtctcaaccccccaggctcaggtgatcctcccacctcagtcccacctgtacctgagactacaggtgtgtgacaccatgctgggctaattttcatattttgtgtagagatggggttgtgtcctgttgcccaggctggtctcaaacttctgggctcaaaggattcgctggacttggtctcccaaagtgctgggattacaggcatgaggcaccacgcctgggttgattgactttagaattttgattttgcatccctgaaaaaaactccactatgttgtggtgtataattatttttatatattgctgaattctgtttggtaatacgttgttaaagatttctgcatcttcaccttgttacagcctggaaaaggcgggagtctaggatttctactcagcctctgttcatgtaggagtgagtggggccagggtttttcctgtggtgtttggctgaagtagagccattactgcctaaaagtttttctgtctttctaggcttcccatttcctggtccttgactagagagagcagggttcgttgagacttttttgtctgtgcctgttgtcatttttgggttgctggcttcttcagctccaagtttggggcaaagaaacaacagaaagcaagcccagggaactcagcatcatgtcattccttgggttctgagatttctagctcatctgtcttcttctctcaacctcttggagtttccaatgttggaaaatatatgaagtccaggattttttgttgtgcttagcaggagaaatggaatactgatgtccactccatcttcctgagagcagaaggattctttttttttttttttttttttttagtgatttttggtcaatatcagatgcctgttgatggtaatgagtgtggagggttaatcaataccttgactatcagcccactgttgagcggcttctgtgataaaaagtgcagcattgtgagattacaaatgattcagaaagctgaacacatgacacattactttcaagggctacattcaaatgttgctcctttgtgggtttccttgactgccagaaggattggagtgttgtggttgcactcatgtagtgccactttacttgctgagcaggctcctgcatttgtgggggtcttacagagttatgataacattgcagtcaggtccattgaaattgaggtgtctgactatccaattgtggcagacagacttgtaggtggcccctgtgatctctattctctggcttttcagaaccgtggatggccattgggagcctaagagcagtctttcggagctaagggcagcctctagctcacatctagaaagaaactggggagtcagtcctagagctgcaaagaaatgaattctgtcaatgacctgagaaagcttggaaatgattcttctccagtagagcctgcagatgacaatgcagcccggctgacaccttgattgcacccttgtgagagcataagcagaggatctagtttggccatgcctggacttccaaccttcagaaactgtgcagtgatatacatgtgttgtacaaagcactaagtttgtgggaatctgttgcgcagcaatagatgacaaatacaccaacaaacaagacattatcattgtagtgaaagctttggacactcataataaattctgacccctgcagggatggcaaattgcagatgagtttatgtatctatgatggagtgctgcaaacatatgtttggagacatctgtggtaggctgggataggtgctgggtcttggagattattttaatatctattttataaggtagttgtaagaattaaatgtgataatgcaggtaaaaactgtttaatgcggggtctggtgccttccctggcgtgcagcccagtgagtgtggctcttgcccacttaatatttcaatgagggaacggttctgtcaatatgcacaaattataatggcaattgatttgcagatctcttctttcctcctctccttctaactcactaatcaaaaaactggttaaccctccaactgctttcccaagttcaaagcaacgtttggcgcagtcctttctcaattctcacacaacaaagcagtatttctcggttccctacaacgaccatcactcaatacaaaaaaccaagcaggtctgccaaaccactctcatacccagtcctggtcatctccgcaggaacaacttcaattctggttaataaggacttcaacgaagggttcattaaggttttccctccaccgaaagaaagaataccgtccccagggagcaggctcttgggccctattatttgctccctggagaaagtgaagagagaggaatcccaaggcgtggcctgaacgccctttgggggcgtgggcagcccggagccccagcctcttccactccaagcaccaggcgcgtcttattttcagcccccaaacggctacaaatcatccgccttattttcagcctccaaacggctacaaatcatcctgtttaaacaaagcggtctgtctaaaaggaggggcataacagggccggggcaggggcaagacctgggagtaggcaacctccctctctgccccgagccgtcccggccgcgcagccgccgagtgccacatcagcgacggcgctgcacttccacattcccttaggatgcagccagcgggcctgagagaggggcgggcccgaggccctccggagtggcgggccgcccggccaatcggcagcaagtgaagagctgcggccaccaatgagctggggcttgtgccagccgcggccgccgaggcccgtgccccgcggggggaacagatgaagcacatctggacagctgtgcggcctcctcgcgggccgacgtcagccgagcacgtcccccacgtcctctccttctcgccacttattatttattcgttttcccaaagaagcgactagggacccaagtttaaaaattcctccccccacccaatgcgagacgtggccagatcccatccaacacacggtttaattttcatggggctctgggatcaaaagaacagaaacagcaacaacaaaagcccagccgctgtctgattttaagctggcaaagtgggaaaaataaagtgttgagtaaacagaccaagttgggtaagttttggatacgtgctggatatcatatttctcttgccgtgatctctatcctgtgtctttttactgttctcaccagctttctcttcatcaaggggagaaaagtaacacttgctgcgacaaactggacccttcgctcccttctcttccgtttcactaacattttaatttaatttttttggtttgctattcttttttttttttttttttttttggggagctagttttaaatatcctgggagcagcaatgtgactgatattctgttgtaaacctctaactccaaaattgaatctattgataaatttatttctctattttctttctgtgaaaatactgtgggtatttgtaaagccaaaatcgttttttatccccaactctgggactgttttgatgggagattgagaaaattatctgatcttttcagaattaacacgtttgcttctgttaataggatgtctaatataaattacgtaaaacctgggttatgcaggtagttgctggatttttcacttaaatctggaggtagttgcaagccaaatatatatcttttcggtattctcctatccatagtgggagacctgaattcctttataattgttaaaaacaaacaaacatgtgacagaccacttgtgtgttcataaacttataattgtatatatatactatatagtatatatgcactatatagtatggtatatatactatatacatgctatgtatacactatgctatatggtgtatatgctctatgtatgctatatagtatactctatatacgctatatattttgttgttgttgtagtttgtttgtttgtttttgagacagagtctcactcttgtcgccaaggctggagtgcaatggcacgatctcggcttactggaacctctgcctcccgggttcaagtgattctcctgactcagcctcccaagtagctgggattacagatggctgccaccgtgcccagctaatttttgtatttttagtaaagacggggtttcgccatgttggccaggctggtcttgaactcctgacctcaggttatgtgcctcccttggcctcgcaaagtgctgggattacagatgtgaaccactgcacccgaccttataattgtatattaaaacaataattctatcaaaataatataaaattgttatatgtacatgcttgcagatagttccggtatacattacaggatttagaaacagaatgatgaaaaatattcagttaagtgagtggcctgagacccactccatctgaaacatgtataatcccctctgtttaaccaatgttttggatttgagacttttgtcatatgttatttactatcatgggagagctggatagaatggatctttaatttccggctcagaaagcagtagatgggaatttagtacaataattaaaagttgcagcctgggcgcggtggctcacgcctgtaatcccagcactttgggaggccaaggcaggttgaccatgnnnnnnnnnnnnnnnnnnnnnnnnnnnnnnnnnnnnnnnnnnnnnnnnnnnnnnnnnnnnnnnnnnnnnnnnnnnnnnnnnnnnnnnnnnnnnnnnnnnnnnnnnnnnnnnnnnnnnnnatctccagctctggtgacagagtgagactccgtctaaaaaaaaaaaaaattctaagtgtgtttttgattcagaaaggtaatgcatacaaagtggatggagcagctgaagtgatttgcagggaagcaggcttagaaggaacagtattgcagagaagcgatgtaaagagccagctggcctggttcaatttacagccctacaacagtaacttacctagggcaagttactcagcccccctgtgcctcagcttcctcctctgtaacatggagagtttcctcctctgtggtgagtttccttctcagttccctcatctgtaatgtgctaataataatggcacctacatcatggggttgtctcgagtactgagttagcatacattgaacacttggaatagttctggcctgtagtcccatagcatgtctttgctgttgtactcactctttgttatcttccttcccagcctgcactgttgcacatcagtttccccagctgccattttgacttctgctctagcaactggtattaactgagtgctgaccacttgctagccagcattgtatgaggctataaggagagagagtcttgaatgaggagtgaggtagaattgatcttcttaggaagatctagaaggttctgaaatgcagggaatagaaaaaggctatcttttgtaggatggcttcacagaagggcttgcgtttctgggaatgggttttgtcaaacagttctggtttgggaatgggaggaagggaagggattatagaggagcaggaacattttaggaggaaggagaccttttgcaggggcaaaggcactatggctggaaagtgaggagctatcctgtggatgttgggacattgggataatctgtgggaggttagttggaggaaagtttggaaaggtgggagaggtgggaagggacagcataaattacctgataaggaaagagaggcttgggaggtagattggtggggagatggcaagccgaactgtcagcagttacacagaagaggtgtttctggaataatccatctctggggtcctgtcttctctcttgcccagcattcccttcccatctgctccactgcttctataacctccatccaggtcctgcaggttgggtgggtagggatgggcagtgagtctgtgttttggagtcattccatggtggctgtcttggagctctgtttaagtggtctggtgctcagggcagttacccaggctactttttgttaacaggccatgccctaaaatctttgacatggatgtgattgttacaaccctccccatccgcatacacgcccatagtgtatgccgagtagctctttctcatcctgctgatagaatcatctactcacattttaacacatataacttcataacttacaattattgaagtagataagaactgtaatatgcacttaagtggagagtcactttggagttcccttgctttctcttccctgagagcattgttctgtggtagagaggtgtgcctgatgctgctgttgaccacctgtgtgacttcaggcaagacattgaacccttgtggtcctccttgccatcatctgtgaaatgatctctagaggccctttttctctcagataatcatttattcttctccccggatccctggaacagtccattattcacagatgcctatttgatacatctgcgactaatattttctgatcacttaatacatggagaacgttctgatgatggtcatgtcctcctcacatcctcctgtgagggttggtacctatttgtgtcctgtttttctagttgaggagacaagggcaaaggcagtttaagaaatttgcccaagattacacagtgaacaagtggcaggtgtagaaccagtctaactttgtagcccgagccttacccaataggctatgctaccttaggtataatacagctacagctgctcttcgtgtttgtggtggtgatagttgagaagtacatggaaggaagatcattggagaaagggcatatttggagatattgatttggtaaaatttgcctggcgggggccagaatatcaatgtgaatcttgtctatgaaatgtgctccatatggagacaggagacatgtggatctcattgcaggcatgcactctgtcttttcaccttgtttgaacaaaacccacatagcacctggttgtctagcagacactcaatacatgtcaattgaatgactgtcccctttgaaaaaggaagttgtgaccacactatttttatttaaaaaaataaatagagagactatgaaatgtcccaagacttgtgggaaaatgggtcagatgccaggtaaacattctacttctgcttttggggcatctcagtttctctttttatttctggacatgctgtggttttgggctaagaacttctcatggtgaatatcaatgaaggtctattttaggtatatagttattaatcatacccattctggatttggcatctatctttttgggaattcattccttaaatattttgtgtattgaatcaactttaaaatatttgaaaaatgttttaggttgctctttatctaatgtagttgctcttttcagtatggcatagtgactaagcacacaggctttgaagtcagactgtgagggtttgaattccagatctgattcttaccaatgtggccttgagcaagtcactttcctctagaagcttttattatctgtaaaatgggggtactcatatgcattacatgagaaaagccatggagagcattcagtatattgtctggctcacagtaaagcctgtacatgtaagcaattccttttttattgtggtaaaatatataacataaaatttaccatcttaaccatttttaagtatacagttcaatggcattaagtacattcacattgtgtgtaaccatcaccaccatccatctccagacatttttcatcttcccaaactgaaacttaatactcattaaacaataaatccctgtaccccttactttgtcagcttctggaaccaatattctacttgctatttttatgaatttgactattctaggtacctcatataagtggaagtatataatatttattcttttatgtttagcttatttcatttagcaaaatgtcttcaagtatcatccatgttgtggtatgtgccagaatatccttcctttttaaggctgaataatatttcattgtatgtatataccatcttttgtttttccattcattcattggtagagggacttaggttgttttcacctgtgatgattagttatgtgtcaacttgtctaggccacagtactgagctatttggccaaacattatcctaaatgtttctttgaagatattttttagttgatgatatggtttggctttgtgtccccacccaaacctcatcttaaattgtaatccccataatccacacgtggagagggagggacctggtgggaggtgattggatcatggggacggtttcccccatgctgttctcatgatactgagtgagttctcatgagacctgatggttttataagggactcttttcccacttgctttctctgtttcctgccaccatgtgaagaaggtccttgcttaccctttgccttctgccatgattgtaagtttcctaagcctccccagccatgtggaactgtgagtcaattaaacctctttcttgtatgaattacccagtcttgggtatttcttcatagcagtgtgaaaatggaataatacagatgaggttaacatttaaatcagtagactttgagtatggcctccataatgttggtaggcttcatctaatcaattgaaggcctcaatagaaaaagattgaattccactcaagaagagagaattctgcctccagcctgcctttgaacttgagactacagcaagtcttccttgcaccttcagcctgctagcctaccctgtaggttttggacttgctagccttcacaattgtgtgaaccaattctcaaaatcaatctgtccatgtatgtgtgtgtgtgtttgtgtgtgtgtcccctgttggttttgtttctctggagaacccgggcctctaattaatacaccatcttttggctactgggaataatgctgcgataaacattggtgtacaaatatctatttaagtttatgctttcaattattttgggtgtataaccagaagtggaattattggattaccccttatttttaatattttgaggaaccatcctactgttttttcacagcagctgcaccattttattttacatccctacagcagtacacaagggtctcaatttctccacattcttaccaacacttgttattttctgtttttaatgtaaaaaataatagacatcctaatgtgtgggaagcatcttgttgtggttttgatttgcatttccctaatgtttagtgatgttgaacaccatttcatgtgcttattggccatttgtaaatcttttgcccattttaaaattagggtttttttttcgtgtgttgtagaagttctttacatattctggatattaattccctatcagatatattatttgcagatattttcttccattcttcgggttacctttccactgagttggtagtgtcttttgatgcataacagtttaaaatgttgatggtctaatttctttatttttttcttttttgcctgcacttttggtgtcatatctaagatatgattgccaaattcaatgtcctgaagctttttccatatgccttcttctgagaattttatagttttagctcatatgtataagtctttgttccattttgagttaattttgtaaatggcataaggtaataggtgttcaccttcattcttttgcatgtggatagttaagcaattcattaataatttttatcaacgattataatgtttgtctctatgtagatatcataagcatagacatagccatagtttaaaaatattaattcattcttgacatcatttttctaattatatctaaagtactgattttttcttatagaattactaaaaaattctgtacttggatcaggtgcagtggctcacgcttttaatcccagcactttgggaggctgaggtgggtggatcacttgaggccaggagttcgagaccagcctaagcaacatagcgaaaccccatctctagtaaaaacacaaaaattagctgggtgtggtggcatgtgcctgtaatcccagctacttagggtctgaggcaggagaatcatttgagcctgggaggtggaggctaccgtgagccgagattgtgccactgcactccagcctgggcaacagaacaagacaaacaaaccaaccaacccctacactttatagcttttagtatttccaagaaagaaaaactattcttgtggtcaaatggcattggtggctgatagctattttttttaaaactatttttacctttttgtggtgtttagaattaaaaaagcaacatccccatgttgcaaaaaattgaaatagattgtagagtcaaaagtaatggttccccttctatttacatggtttcttcccttccactactctccccacaattaaactttgttaatagtctgctctatatttttctagaccttctccaagagtccattcacaggtatagatttaaacataaatattattttaaaatatacatgggaccatattttatgcattgttcagaccttgtttttttaaaaagtctcagcggtatcaaatacacacatctcagtctgtccactgagacccagagatctcgtgaacatactgtgtcctggagaacagacactagcactcaagtgaaagaatgttctttttctataacacgtaacagtggtattgggttacatttgttgaatgaatgttctttttctataacacgtaacagtggtattgggttacatttgttgaacgaggcctgtttgccctgttccctctctctggactcttggctcctctctgtgagccatcagattgactgtttccagtctcgtctgactttcaatgtccctgccaaggactctcacattcgtctgtctcagagaaagctcggaagacaacaaatcctttcccgcatccacccatcaccgcttctgagcagcctgggcccctctggtgccatcaacaatcttgaagtggcaacaggtccagaggcaaatgactccttccttcctgctgttttatgcaaagattgctatcttctgtggcttagtttatttctccttcaagagaaatttaaaaaaaatgaccagcaaggtggtgctttccacagcaaggaagtgggtggtatgcctgcacctttctccagaattcctggaattccaaaggcttaaaaacatacacaatattttattaaattctttttagtagatgagaaaattgatttttaaaaattatgcttatggaaattgatgtttagaaaggtaaactgtactacttgtaaaattccacaggcttaaaaacacctacacaatattttattaaattctttttagtagatgagaaaattgatttttaaaaaatacgatatgcttaaggaaattgatgtttagaaaggtaaactgtactacttgtatagtaagcaaagaatatgaaaatttgtctgattttagttctcttttcattcaacattcccgttgcctccgaaagatagcacattgcccttgagaattctacagactagtcctgtggtacctaaccaatgtacagctgaattgcctgtggaatatttaaaaaatacacccatgcttgtcctgcccctggagattctaattcagaaggtgtggagtgaggccaaggcatctgtgaaaagctccccagagagctgatggttggcctgggttgagaaccatggatctagtgggaggagtttcccagctaaagttccaaaccctcacaggtgagctggtgtccttcattgctgatgatgcttagaactggcctcaagcagtcacagttggaggaaagctctacctaaggtcctaattaaaaacacataaattggatggaaactccttcttcttgggatgtttacagaggttacctttttatcctgttgccttattcccatgaaaactcacttgtctaactaagctgaaaggtggaatctttctcaccaatatttgtagagctcctattaacttcacttttttgggagccaaacttccctcagtgccgcagttatttcgtggtagtaacataggtgtttaggagacatctgaattccctctcaatgacctaaaagtataattagtccattttctgacatgagtcaacaactagggttgccacatagacccaattcttagtagagactgtgtctatctcggactcagagttgaccactaattacatttcagtaaaaaaatattacttttaatttatcttaaatttcacagaggaaaaagaaaccaaggtgaaatttaaggaatttctgaacttcagacaaatatctcttgaaacaagacacgttagttccttaaagattcctctaaaaaatatcaaactgttgggattattaactactctcataaaattcagaatacattcttcatatccaaatagacctacattttatataactaccctcacactttaaattaaaaaaagaaaaagttccagatctgactttgatatgtctaggtatggatcttttttttttttttaaacaccttttctcctgatatgtcctttcaatttgaggatccatgtctttcttcatctcagggagtttttcaccaattatctaattttttctttctctctccttacaaaccaggcataattcagactaatgatcatggcagaatgttaaaggcagattaaaagaaaccaaaattgagagctacatcataataagaaatgcatttagaaaagatttggggattctatctgtgtatctatcgatctatcaattttttttttgagacagggtcccactctgttgcccaggctggggtgcagtggcatgaccatagctcactgcagcttcaacctcttgggctcaagccatcttcctgcctcaacctctcatgtaactgggattacaggtgtgtgccactgtgcccagctaacttaattttgttttctttgtaaagatgggatctccctatgttgtccaggctagtcttgaactcctggcctcaagtgatcctcctgctttggcctcccaaagtgctgggaaaacacatgtgagccactggacctggtctaaatactttatattaatgaaaattaagtaatattaaaaatgttagcaaggaagaaaaaaattatagaaaatgctcacagcaaaatcatgccatggctaaaccttggggataaagaccagaggaagacagagtgaaaagggagtaaaaaaggttgtgtagaggaagaatggggagttctccttctccttcttctcctccttctccttctcctcttcctccttctcctcctcctccttctcctccttctccatctcctcctcctccttcttcttctccttcttcctctctttcttctcctcctcctcctccttcttcctcttcttcctcttcctcttcctcttcttcttttattgagacacagtttcactctgtcatccaggctggagtacagtggcacaatcttggctcactgcagcctccgcctactgggttcaagcgattctcctgcctcagcctccctagtagctgggactataggcacacaccaccacacccagctaatttttgtatttttagtaaagatgaggttcactatgttggccagactggtcttgaactcctgacctcaagtgatccgcccacctcagcctcccaaagtgctgggattacaggcctgagccactgcacctggcctctccttgctgcttctatgacttcttggacagtttgtttccagtgggggagcagacagatgaatcaatacctcatccacttggggcaagtttgggaacttctctatataaattaagcctcattttcctcaacagaaaattgggcctgtttctccttccttctaaatgtcattgcagaggtttcatgaagcaatgtgtgtgatgggactttgtccaatgtaagatactttgcagaagtgagtgattctgtgaccacaatcttgctatgaagctttttcttcacaggaagatacatgaacaactaatgactgagtgactgttggttaggtttcaacctcttctcaggcttcttcttgttttaccctcatggacaacttgtcgggaagaggctattattattcccattttattgataagcccagagaggttaagtaactcatgcaaggtcacaccgtggtgaaatcagtatttaaatacagggtagcttcactccagtgtctgaactgttaacatttatgccatgtgtaacattattttcaggaatgaaacaatgttattggttgccacttttcagagaattggcaagtgctcaggtttaatgcaggtgggcagaggcagaggtgtcactgggtgctctagcctctgtatcctgaacttccagcttcctcttactgtccatttgtgatcctgggagagagaaacactgtctcctctgtgcctgatccactcttgttcaagtgtccagcaccctttccctgaattactgcaaagacctctcaaattatctgtggtaaaggaccatttcccaccccaccccctgagtccattgtagccttatatttttataaaaaaaaaaaaaagtcttgcttggatatcgccacaatgttaaactacttcaagatatttaaaagcctctaaacacttcatctcagttcctgtccttgtagatggtaacagcttgcagactaggactggtccacagggtgtggttgaaatagcactgctgcaagggtctcctgactttgattctttccccgtataacctatgcaccacagagtggccagagtggttcttgaaaaatacaactaaaagtcacattgtttccctggttacaccctccagtagcttcctattgcatttaaaataaaatccagatatttaccaacggcccaaaagtccctgggtcatctggccctgcctgtatccacccgctttcatctcctcccttgcccgctggatatctccaatgctaatgaaacataggtaggcttgggtaaaagttgtttcaaacagggaacacataataatctgggatgtgagatacactctgttttgtcctttcctctactggatcaagcatggacaagtgcttctatcactttctttccagcagcgagagccatgccactaatttctgaatgagcaagatgaccaaaaccaagtctcagaaaagatttgtgcaaaactgtgcttatgtagtgtagcctgttgcctctctggtgaactcagcctgaagatgcctgtattctgttgaagtctcatacctgctttttagactctttgtttcctcccccagaaaatgggtctgtcgtgggtcgagatgatggaggggtcattccaaatgttcctgagattggagaacaaaaggttgaccgtgtggttgttgtcacagactcattgctggggagtgtggctaccattgctgcattggttatttaatgactgagggggaaacacaaattttggttaaacaatttcctggtgggtttagtgcttgctgcccagagagcctcttgtgtggaggcacccgggagagacacccatctcaccacgtgctctaccatggcaatgaatgagaaagaagcagctacatggaaaatggttcatttagcaacagacagccatagtttctaggaaactgacttcccactgttctccctaacatccccccaacccatgactttttaatccattgcctattccaatgatttttggactttcagaagaagatttcattgtcttttgctaattaattgccatggcaatggcaacaattctcacattttagtggcaggaaatttatgtttaatagaatggagaatgtgatgtagcaaagtgcgtctttgccaagcatcccaggtgattctggcataggtggtccaaggaccttactttgaaaaacactggttttaggattgtctgttctgtgtaatgatactggtattgagtgcaaagagttttaaagaagttctgtttctgcccaagatggagtaacagggccagatttacccttttgcctgacacaaccaaaaatgtcagataaaatacatgaaataatgatttttgaaacaccagtcatcaggtgatgaacagcagtaatctctaagaaataggagacaaaaaggcgtacactcggactgctccagcttactgcatggagagaatttccaggctgagactcagggaaaggaactcaagtgcaattcagactcccaatttgaggagaaggtgtgaagaggctggggaaaccaaggtggttagagttcatggaacagagtaccaggaatgagagagctgcatggagagagaggaccccgataactgcagagggggccctcaaggattcagcatcgtactgaccagcacctgtatgtggggaaactactggagacctgggggccaagcttgtggggggaagagaacagagcctggctctcaccaaaggctgggaatattgcctgttccttccagccagactgggaaacccataatccacagggtattggtagaacagtcaggagggccttgcctcagtagtggggaataattagcagtctagagcactgctccatatttgcctaataaatcataaaaaagcaatttgcaaaagtattaaactgcatctaagttacttaagctcatcccagaacagagttcaagaatatttatgggaataaaaaaaaaatccggtgccaaacaaggtaaaattcacagtatctgacaccccaaaatagtaatgtagtttaaagtggaaacacaccactctccctgactgtcctggaggtgaacttccatgcacatttttgtacccttaaagagtccaacagtttaaaccttcagtgtaacattttatacataacaatctagagactgccaaaccatggtctgtgttgatatttatcttggcttctgagatagcacttcctctttcatgtctatgagtgtttcagaaaatattttttctgtgtttgacaccttcaaccttgccattgcattatggtaaggtagattcagctaagatattggctaattacattgtgcatcctaagaggttggagctaagagtcgtaggtaatggtgatggttgggtgagatgggacaagttttctgaggtcaatgtatgactcagattcaaaggcttggagagcagtaaggaccaaaccaggcaggccaagatcttggacaggtctgagggggctagctaagccaagttctagaaccagaagccctttggaacccaacaggaacatacagagagtgaagtgagtaaagtcttgttaggacttggtcaagactaaagagtcagggtttgttcattggcagaagttggaggctgggtcagagaggagtgttctgggatcatgcatggacttactgctctagaggttcataactgagctccacaatatgagcctgggatgtacattcttcctctgagatttggaaggttttaaatttggtttccaggcctatttgtccgattctctcccatgccccaaattcaacctgacactctgtcattaggatgtccctagttagacacttgactgccagaacaaacatgttttcttcagattgtctggcacctgggcattctttcccactctgcctatacagaaatgtggcttttctgcatacaatttacaaatcttttggctgctggaaaacactaagtttcttaaaatattgtagcccagatgaatttgtgggaaagttcctacttgaagatgatcacaagatattactgttatttgatagaaattttacctgctccgggagatgagaatgggactcaaggattagtctttgggaaaagtggaaatgagttgatcttttaaaggagggggtcttaaaatcactttttcacctagaaaggttttcaataaatgttcttggagctctttattttcattcccaatggctattgtaccatggattgagtaactagagttgggatgcagggatgaagaatggatgctagtcagtgttgtcatgaccaccatgatggtctggatggcgagaacaattcacttacagtttttaataatgacaaagacaacaacactagaaagtagatagagtaagtttatactttaatttctttcagatcagtatggactagaggagcttctgccctctctatgttttccaaagagagaaaaatagatacagaagagattaagagagcataggagggggcttcaagatatttgactagagacatctgttattcaccttctccacaaaagaggaccaaaacagcaactagataagcacgatgtcaaatagagtatttaagagagaacacaggaactcagcaggaaagtgacagaaaacctctcaggcatggaaggagaggaaagcaaagcagctggcccagctgagatcggagccaggagagactcctcagtgcaggaaaagggaagggagagagccccatgttccacatttccaccatggactactgcaatcctagctacagagtgccctttggctctcacagaccctgagactagtataggaaacttcctggagcccacacgatggcattgtctcagagagggatttcaccatgggtcacacacatagcccaagactgaagcaactgcagcgtggtgcccttcgagagcccaggcccgacaagactgcatcttgccgtggagtccaacagcccatgcatctccatatccctggagccccactgacatccccttacatctactcagatggttgcaaaataccaatgacattcttcacagaaatagaaaacacaatgctaaaaattgtatggaaccaaaaaaggacctaaatagccaaatcaatagtaagcaaaaagaacaaagctggaggcatctactacctggcttcaaaatataccacagacctatagtaagcaaaacaacatggcattggtataaaaacagacacatagagaagtggaacagaatagagaattcagaaataaatccacatatttacagtcaactgattttcaacaaaggcatcaaaaacatatattggggaaaggaaaccctgttcaataagtggtgctgggaaaactggatattcatgtgcagaagaatgaaactgtctgaatgaatagacccctgtctctcactatataaaaaaaaaaaactcaaaatggattaaaaactttaagacctgaaactataaaactactagaagacaacataggggaaacacttcagggcattggtctaggcaatggtattatgattaagacctcaaaagcacacataacaaaaacaaaaatagacaagtggggttatattaaactagaaagcttctgtatagcaagggaataaacagaatgaagagacaaacttcgaatggaagaaagtattttttaactattcatttgacaagggactaatatccagaatatacaacgaactccatcaacttaacagaaaaaaaatcccatcagatatttcccaaaagaagacatacgaatgactaacaggcatatgaaaaactgctgaatatcactaatcattaaagaactgcaaatcaaaaccacaatgagatattatctcaccccagttggaatggctgttatgaaaatgaccaaaagtaataaatgctggcaaggacatggagaaaagagaactcttacacattgttggtgagaatgtaaattagtatagccattatggaaaacaatatgggggtttctcaaaaaaataaatgcagaactaccatagagtccagcaatttcgctactggatatttatccaaaggaaaagaaatcagtatatcaaggggatacctgtactcccatgtttattgcagcactattcacaatagccaaggtatggaatcaacctaagtgtctatcaatgaatgaatgaatgggtaaagaaaatgtggtatatagatatacgatgaaatattgagggatggaggagccaagatggccaaataggaacagctccagtctacagctcccagcgtgagtgatgcagaagacaggtgatttctgcatttccatctgaggtaccgggttcatctcactagggagtgccagacagtgggtgcaggtcagtgggtgcgcgcaccgtgcatgagctgaagcaggctgaggcattgcctcactcgggaagtgcaaggggtcagggacttccctttcctagtcaaagaaaggggcgacagacggcacctggaaaatcaggtcactcccacccgaatactgcgcttttccaacgggcttaaaaaacggcgcaccaggagattatatcccacgcatggctcggagggtcctacgcccacggagtcttgctgattgctagcacagcagtctgagatcaaactgcaaggtggcagcgaggttgggggaggagcgcccgccattgtccaggcttgcttaggtaaacaaagcagctgagaagctcgaactgggtggagcccaccacagctcaaggaggcctgcctgcctctgtaggctccacctctgggggcagggcacagacaaacaaaaagacagcagtaacctttgcagacttaaatgtccctgtctgacagctttgaagagagcagtggttctcccagcatgcagctggagatctgagaatgggcagactgcctcctcaagtgggtccctgacccctgacccccgagcagcctaactgggaggcaccccccagcaggggcagactgacacctcacatggctgggtactccaacagacctgcagctgagggtcctgtctgttagaaggaaaactaacaaacagaaaagacatccacaccaaaaacccatctgtacatcaccatcatcaaagaccaaaagtagataaaaccacaaagatggggaaaaaacagagcagaaaaactggaaactctaaaaatcagagcgcctctcctcctccaaaggaacgcacgcagttcctcaccagcaatggaacaaagctggatggagaatgactttgacgagctgagagaagaaggcttcagatgatcaaattactctgagctacgggaggacattcaaaccaaagtcaaagaagttgaaaactttgaaaaaaatttagaagaatgtataactagaataaccaatacagagaagtgcttaaaggagctgatggagctgaaaaccaaggctcgagaactacgtgaagaatgcagaagcctcaggagctgatgcgatcaactggaagaaaggttatcagcagtggaagatgaaatgaatgaaatgaagtgagaagggaagtttagagaaaaaagaataaaaagaaacgagcaaagcctccaagaaatatgggactatgtgaaaagaccaaatctacgtctgattggtgtacctgaaagtgacagggagaatggaaccaagttggaaaacactcttcaggatattatccaggagaacttccccaatctagcaaggcaggccaacattcagattcaggaaatacagagaatgccacaaagatactcctcgagaagagcaactccaagacacataattgtcagattcaccaaagttgaaatgaaggaaaaaatgttaagggcagccagagagaaaggttgggttaccctcaaagggaagcccatcagactaacagcggatgtctcggcagaaactctacgagccagaagagagtgggggccaatattcaacattcttaaagacaagaattttcaacccagaatttcatatccagccaaactaagcttcataagtgaaggagaaataaaatcctttacagacaagcaaatgctgagagattttgtcaccaccaggcctgccctaaaagagctcctgaaggaagcgctaaacatggaaaggaacaactggtaccagccgctgcaaaatcatgccaaaatgtaaagaccaacgagactaggaagaaactgcatgaactaatgagcaaaataaccagctaacatcataatgacaggatcaaattcacacataacaatattaactttaaatgtaaatggactaaatgctccaattaaaagacacagactggcaaattggataaagagtcaagacccatcagtgtgctgtattcaggaaacccatctcatgtgcagagacacacataggctcaaaataaaaggatggaggaagatctaccgagcaaatggaaaacaaaaaaaggcaggggttgcaattctcctctctgataaaacagactttaaaccaacaaagatcaaaaaagacaaagaaggccattacataatggtaaagggatcaattcaacaagaagagctaactatcctaaatatatatgcacccaatacaggagcacccagattcataaagcaaatcctgagtgacctacaaagagacttagactcccacacattaataatgggagactttaacaccccactgtcaacattagacagatcaatgagacagaaagtcaacaaggatacccaggaattgaacccagctctgcaccaagtggacctaatagacatctgcagaactctccaccccaaatcaacagaatatacatttttttcagcaccacaccacacctatttcaaaattgaccacatagttggaagtaaagcactcctcagcaaatgtaaaagaacagaaattataacaaactatctctcagaccacagtgcaatcaaactagaactcaggattaagaatctcactcaaaaacactcaactacatggaaactgaacaacctgctcctgaatgactactgggtacataacgaaatgaaggcagaaataaagatgttctttgaaaccaaccagaacaaagacacaacataccagaatctctggggcacattcaaagcagtgtgtagagggaaatttatagcactaaatgcccacaagagaaaggaggaaagatccaaaattgacaccctaacatcacaattaaaggaactagaaaagcaagagcaaacacattcaaaagctagcagaaggcaagaaataactaaaatcagagcagaactgaaggaaatagagacacaaaaaacccttcaaaaaattaatgaatccaggagctggttttttgaaaggatcaacaaaattgatagaccactagcaagactaataaagaaaaaaagagagaagaatcaaatagatgcaataaaaaatgataaaggggatatcaccactgatcccacagaaatacaaactaccatcagagaatactacaaacacctctacacaaataaactagaaaatctagaagaaatggataaattcttggacacatacactctcccaagactaaaccaggaagaagttgaatctctgaatagaccaataacaggatctgaaattgtggcaataatcaatagcttaccaaccaaaaagagtccaggaccagatggattcacagccgaattctaccagaggtacaaggaggaactggtaccattccttctgaaactattccaatcaatagaaaaagagggaatcctccctaactcattttatgaggccagtatcatcctgataccaaagcctggcagagacacaacaaaaaaagagaattttagaccaatatccttgatgaacatcgatgcaaaaatcctcaataaaatactggcaaaccgaatccagcagcacatctaaaagcttatccaccatgatcaagtgggcttcatccctgggatgcaaggctggtttgatatatgcaaatcaataaatgtaatccagcatataaacagaaccaaagacaaaaaccacatgattatctcaatagatgcagaaaaggcctttgacaaaattcaacaacccttcatgctaaaaactctcaataaattaggtattgatgggacgtatctcaaaataataagagctatctatgacaaacccacagccaatatcatactgaatgggcaaaaactggaagcattccctttgaaaacaggcacaagacagtgatgccctctctcaccactcctattcaacatagtgttggaagttctggccagggcaattaggcaggagaaggaaataaagggtattcaattaggaaaagaggaagtcaaattgtccctgtttgcagatgacatgattgtatatctagaaaaccccatcatctcagcccaaaatctccataagctgataagcaacttcagcaaagtctcaggatacaaaatcaatgtgcaaaaatcacaagcattcttatacaccaataacagacaaacagagagccaaatcatgaattaactcccattcacaattgcttcaaagagaataaaatacctaggaatccaacttacaagggatgtgaaggacctcttcaaggagaactacaaaccactgctcaaggaaataaaagaggatacaaacaaatggaagaacattccatgttcatgggtaggaagaatcaatatcgtgaaaatggccatactgcccaaggtaatttatagattcaatgccatccctatcaagctaccaatgactttcttcacagaattgaaaaaactactttaaagttcatatggaaccaaaaaagagcccgcattgccaagtcaatcctaagccaaaagaacaaagctggaggcatcatgctacctgacttcaaactatactacaaggctacagtcaccaaaacagcatggtaccggtaccaaaacagagatatagatgaatggaacagaacagagccctcagaaataacgccacatatctacaactatctgatctttgacaaacctgagaaaaacaagcaatggggaaaggattccctatttaatatatggtgctgggaaaactggctagccatatgtagaaagctgaaactggatcccttccttacaccttatacaaaaattaattcaagatggattaaagacttaaacattagacctaaaaccataaaaacctagaagaaaacctaggcattaccattcaggacataggcatgggcaaggacttcatgtctaaaacaccaaaagcaatggcaacaaaagccaaaattgacaagtgggatctaattaaactaaagagcttgtgcacagcaaaacaaactaccatcagagtgaacaggcaacctacaaaatgggagaaaatgttcgcaacctactcatctgacaaagggcaaatatccagaatctacaatgaactctaacaaatttacaagaaaaaaacaaacaaccccatcaaaaagtgggcgaaggacatgaacagacacttctcaaaagaagacatttatgcagccaaaaaacacatgaaaaaatgctcaccatcactggccatcagagaaatgcaaatcaaaaccacaatgagataccatctcacaccagttagaatggcaatcattaaaaagtcaggaaacaacaggtgctggagaggacgtggagaaataggaacacttttacactgttggtgggactgtaaactagttcaaccattgtggaagtcagtgtggcgattcctcagggatctagaactagaaataccatttgacccagccatcccattactgggtatatacccaaaggactataaatcatgctgctataaagacacatgcacacgtatgtttattgtgtcattattctccaatagcaaagacttggaaccaacccaaatgtccaacaatgatagactggattaagaaaatgtggcacatatacaccatggaatactatgcagccataaaaaatgatgagttcacgtgctttgtagggacatggatgaaattggaaatcatcattctcagtaaactatcacaagaacaaaaaaccaaacaccgcatattctcactcataggtgggaattgaacaatgagaacacatggacagaggaaggggaacatcacactctggggactgttatggggtggggggaggggggagggatagcattgggagatatacctaatgctagatgacgagttagtgggtgcagcgcaccagcatggcacatgtattcatatgtaactaacctgcacattgtgcacatgtaccctaaaacttaaagtataataataaaaaaaaaaaaagaaaagaactattgagccacaaaaagaatgaaatcctgtcatttgtagcaacattgatggaactgcaggtcattatgttaagtgaaacaagccaggcacagaaagacaaatattacatgttcttactaatacatgagagctaaaaaagttgatctcaggaaagtagagagtagaatggtggttaccagaggctgggaagggtgtgggaggaggatgaagagaggttggttaatgggtacaaatatacattcatatagaaaaataagttctagtgtttgatagcacagtgaggtgactatcatgaacaacaatatattatatatttcaaaatagctagaagagaaggtttgaaatgctcccaatacaaagaaatgataaatgtttcaggggtgatagatatcccagatactctaacttgatcattacacattttatgcatgtagccaaatagcacatgtactctgtaaatatgtacaatgattatgtatcagtaaaaaatgttaaaaagagagagcataggtgagagctctctgcttttatctaatgagctccggactgccatactcctggacatgatagtaggaagtctcaatcaagggcaagattatgctttctggagagaaatacactggaaacttgatataatctaattgatgttaattgtgataagtgttgctggttttacttttggcttcatacatagtgacttatgttttgtggtggtaatgagtaaaagaggtggggtgaattgatgaaactgcttctgtgccctgataagtggctgtgttctgattggttctcagatgggagttgatttttctacaggaagagaattagcttaccattgtgaaaccactgaaggcaatgtcaagagaagtttactttacctccatcgcagtcttattcccacgtcctcacttttttctcttccctttatttccttccttttctccccagactcatgattgcctttctgtcagcaactctctccaggttctcattgacacagaaattgtaaagactcagaaaaggctatgatgggatatttttcctccttgtttctgtgaatcttatatttggattggaaatagaatttatataccaccttacgggatccttcttcaatttttctgaaattaagagagcccattttttttttcataatgtgttgaaggaaatagtttttgaaaagttgggaatggaaagaggtcaactgagaggagattttttactttgagatatcctctccctggcatgagatgagtccttgtgaagtgaaaagatgggggctatctttggaaaaacacccatccctgctcccagagagctctgggcccgcattttatggagaacagcatctgctctcacattgagcctggttaagcctttgaattttcctttgcatgtgttctcaatcactgatggtgctgaatcatgaggcatattgccagacgtgggaatgaaatttttcttttcttttctttttttttaagacagagtctctctctgtcacccaggctggagtgcagtggcacaatctgggattattgcaacctccgccttctgggttgaagcgattctcctgccttagcctcctaagtagctgggattacaggcatgtgccaccacgcccgattaattttttgtatttttagtagagacagggtttcgccattttggccaggctggtcttgaactcccaaagtgctgggattataggcataagccaccgcacccggctgggaatggaatattcctaatgaggaacttgatactttctgaaaaagtaaattttcaggaaaagccacaggcttgaagtgtatcatctttccttcatggtttggcacatccacgtaagggtgtaagttctgtaagttccttttccatgtgttagttaacaaatgacgtttagaaatatcctctttctcactgtccccatgccaaagatcagcctttcatatttttccttaattgtcaaagaaatatttgagcatctaaggtgatattctttattactgtggatgtgatttgggaaacaattcttggagggcaactctgagtctgtggtgaataaaaaagtgaggataaatgtgaatgaatattgtttctggggttctctgtgcagctggaaaaatgatgagcaagttagcttaattagctgagcatcttcctcttcttgaaagggctgtgatgcttgtgattggaaaaagccgttcttacgtggcatccttttaggaaagactgtggtttaaatgggcttgtttacaggcctcacttttgggcttacctccacctccaagccatccaccatcattagccacgtttctaaaattaacttattagaggaactgtttgattcattagataagtgggttttgattgggcgtggttatggggtttaggagggtctgctggttagttccactgagaccctgaacagtatgaaggggaaggctagttaagaagcagaaagaaaaaaggaagccattcttctcaaacattttgttggaagtctgctgaaagattcattttgcttctgggccccacagattgcatagctggttctgcctctatgctttcaggtcgctcaagtgttaacaggagtgagaaattagaatcaagggcccatttcctcactttcttccaagtttctgtatccacatgtgcactgtatgaaactgctgtccatactcttgtcttaattgatttaatgtttaatctcctttaacagaaggtttgcagaggtctcttttcttcttctagtacaacttgcatacttatttagagtctgtagttaaaagggtgattcaggtcttggcaatatgtgaaacttctgtcctttgaaaagaagtcatttttaaaatcttggtttactttgttttatggtaacaagacaatacatcttcttatttatttcatatgtgcactccacactcattccagcaggccttatttcttaagcaagagacaagaaatggccttattgactggcaggtacaagtgctgaaactagcactaatgactgtgaatattcattcctgagtcgtatttgtgttcagactcaggtgaggggtgcagactggagtgttcgtctattccccttgtgtgggttaagataagcatgagatggtcggcttaggttggcccaggtgagagaagcaaagtgatgggtggccctgttccctgtgggaggctttacttttccatgcttacacactgaacacctaagctggctggtcaaataatcaagaggcagacttggtaaaaatgtgaataaatgagtgtagttactatatagccattaaagaaaaatctgctaatggtgactcagtagtgcctccctgattgtaaaggacaatgtcttctggtgagctgtgagcatgttccatgggttgacaatcagatttacatgtctgatgacattaattgcagggtgctatgggccaggtttctgaagttgggtggaggtggaggccaccggcagtgagtacaacgcccaggggaagcatgtgagtgggaggaagaaaagagagttttctggagctgttgcaatgtgtatgctggtgaaatctacttgagcattaagcagtatctcccagcattgttagctactgagtggcacatcttcagtacgcatgattcgtgggggactcaggcagaggtaaaagtgtggtaagttttaatactgtgtttgcttactagttgcttttgacatgcatacaggttgtgtgtgtgtgtgtgcatgtgtgtgtgtgtgtgtgtgtaaaactgactgtaagatgtcaagtttcagcctattgatttttttattccagaaacttttcagcattacctaagaagcaaaggctcaattttggctgcttcattcttatctcttctgccacagttctaacgtgcctgatctactgagaccaaggatgaccaatgactcagaagggaaaatgggatttaaacacccaaaggttagtttggcgtttctgcagtaacctttggtgtgataatgtgaaaagagcaagaacttttgattcataaagacctagtttgaacctgactgtaccgtgtatttatgacattgtgcaagtaacttattgtgggttgtggctgatcaaggcaaagttaatactagcctaatgctgatgattctgtagaaattttatttcattttatgttgggatctagcattgtgggtggataggaagagttgatgttgaagatatgtgccttaaatgcttctcttgatttctgtagcattttcttcctctggggccttcaggaatctggcagctgaagcgttaggtctaccaggcactctttttatccatccttcccatccatccatttatccactcaacacttaggtactgaaccacttactgtatgccagacacagttctaacagctaaggattaagcagtgaagaaaatagaaaaaaaaatcctgtatacatggagctttcattctagtgagggaggaatgcaataaacaaaataagtcagtaattatgggtatattaaaagggaatgtgttacagggtaaataaagcaggaaaagagggtagggtattgaggcaattttaaataaggtgatgagagcaggtctcattgagaaagagctcccctgcagagctctgaaaacaatttgcagacagtgccttcttgttattaccaaccagcagtgctcgttgccttgtcttcctcttgtttattcactgaggcctcaccatttttggtccatgaaaaaaataattgtttgagagcatagaatatgacttttgggttttcccttagggctatgttaagatgctagtagatgctagttaaaggataccttggtgaggccctcttttccgcccttgctgggttctggaaatgataccttctgctctgttatccatgtggccttatacattgggtacctacctgcagagctttttgtgcataacctctctagcccctcttgtacgccccacacaaacctctgactatgcagctaagtatagtcccttgtagggctaggcctctgcttctagtcttttccctgctttcttggaggagcaggcaggcacgggttgccaacctaacttcatgcttttggataacagcaacctctgccttcaccatttcctgacccaacatagtgaaaggagagtgtctcatcaccaagaaaagcctctcactttctccgtcttggtccaggaggtaggagaacaaagaggagcaaataagtcaatcacatcatggtgtcacagccaggctgggacctggaagcaacctttgcagtacgaggatgggatccacatcaagaagacacccagtcttctttggcccatgatggatcacgagtcagtgaatgtttcattagctttcatgaagggggatatctgctttctggtaattttcaaaatgttaaagaacccctttcggagctaggagcaaagtttagcgcgtgaagctctgtgaaggcaatggatgccttttaatttgggatttagtagagcttaaattccctctgatacatcctaagttccccaaaggcaatgtgaatggatggggtctgggcaatgtctgcacctccagctgagatgggatacggtagggtttagctttcatttcccctttcttttttttttgagaccgagtttccagttgcccaggctggagtgcaatggtgcaatcttggctcaccgcaacctctgcctcctgggttcaagtgattctcctgcctcagctcccaagtagctgggattacaggcatgcaccaccatgcccggctaattttgtatttttagtagagatggggtttctccgtgttggtcaggctggtctcgagttcccgacctcaggtgatctgcccgcctgggccttccaacgtgctgggattacagtgtgagccaccacgcccagcctcatttcctctttctgatatggatctcagaggtggcttctccttggctaggaatatgacattgccacaccagctgcagcacgtacgcacacaccctggggctttccaccccacatcattctgtgccagttgtgttggcctttttctgcccactgaggatctagagagacaatgatgtcagccagagctgctgtggcaggtggggctgttctgatgtctgatcaagtggccagagcctccttgccacattcagctcctgcccacgtcctctaggctggccccagtacggctctgggccactttccatgactgtgaagtatatttctgcccagcttagtagtaatgaggagtatttatttttatacgtttgcttgttgtttcaggtggtaagagttctgtagaagccaggctttcctaacatcccaagtccttcttaggcagcattttggtgctccagttatatacctgcccagttctgtccaatattgagttccaatctatacttgaaaagacaaagatgaacagtaacaggagagtaactgttgggggtgggggtagtgggcccagctgcactgacaataacaatcccttccccacccctccttggttgtctgtgaagctactctaaggagtaattcttccctggaccataccctgttgggaagcgaggtgtggaggtgccaggcagtggtttggggggctgactctggcccttgacctgtgagtcacagctgtgtgggagatgcagtatcagtcccttgatttgtttgtttttctggattgcacctttgttgacagtctggcacttactcttgtgcattttgttatttattttcaatggtgcaaggccccagtgttccatcctccttctgaattcacagaaacatccacgcaaatagactggccttggctcggactcacatttgagagacttcaatctccttggcctgtcaaaatgaagttcttcttaaaagtcctaactctctggtgctggcctatagtctaatcaatgcttcccaacctttttcatgtcacagtatacatggacatgacatgatttatgtaggtgggagggctcattcctaggcagtaggccatcggggtctggctactatagtccttgccccctcaccctcacctggctgttcctggggcttagggaaatttgtgtttccctctggcacacctgttcccactgggggcacacaggtatgctacagctaaggttagaagttctggcccaagacctagcatagaccacaatctcaaggtgcaacaaagtgtctcgtccataaacatctttgaagatgatcctagagggtggatgtactttcccaggatgttgtaagtttgggagaaccaagttcctgtggttgcgcccattgcttggtgcagtctgccaccacctgtccttctagaaggaagggtagaaggatgccaacactgcatgtcccctgtcccctccaggccagcatgaccaggatccttggctctgtggccaaactctaatgcttagcactgcttctttccatcctaccatattctggggttatttcacatgacttccacaggttcctgacctcccagctttgctacatcttctgcatcgcttagaacatcacttcttatgcaatggttgcaggtgtcatagacgttctgctgatgttgtctgtttgtgttgccgtgaaccacacctggataactggtctgggtggaattcagctactgcaagagtacatactagtcctcttttagcccttatgactgtgtggtaccaggtggtggttcttacatttaaacagagctatgggctcatccatccattcattcatttatttactcgtttaacaaccctattcaataaatgctgggtactgggaatataaagattaaagtcatagtctctgcctttnnnnnnnnnnnnnnnnnnnnnnnnnnnnnnnnnnnnnnnnnnnnnnnnnnnnnnnnnnnnnnnnnnnnnnnnnnnnnnnnnnnnnnnnnnnnnnnnnnnnnnnnnnnnnnnnnnnnnnnnnnnnnnnnnnnnnnnnnnnnnnnnnnnnnnnnnnnnnnnnnnnnnnnnnnnnnnnnnnnnnnnnnnnnnnnnnnnnnnnnnnnnnnnnnnnnnnnnnnnnnnnnnnnnnnnnnnnnnnnnnnnnnnnnnnnnnnnnnnnnnnnnnnnnnnnnnnnnnnnnnnnnnnnnnnnnnnnnacttggagagtggtcagaggaggttccctggctgagatgagataacttttagcttgaatcttttctcctcttccctccctcctcctccttctcttcttccctcctccccctcctttctcctccttctcctcctcctcctttctcctccttctcctcctcctttctcctccttctcctcctccttctcctcctcctcctttctcttccttctcctccttcttctccttctcctcctcctcctccttctttttctttcttctctttctccttcttattcctttttgaacagagttatctgggatgtgtgctaattgaatgaaggaaggaagggaactgcatagagctagagagcggaacttcaagtgccaccattttgtttggtcatagtagaattctaatgggcaacagtagctaatgaaataaggatcacttaaggagggagaggagacctctacattagcctgcaatagtcagatcatacttttggaaggagaatgtctgtgggattcactcatagaaaccctggaaagtttccactggaggagaaagaaatctagatggcaagctggcttgaagagacttgttatgtgtggcttctgtgagtgcgggaggatggtgggggagactgccttctctatcctgcttctttcattcaaaagacagcatgatcttgggcaagtgccatgacatctccaaaccagtgtcctcatttataaacgtggttctcataatacctctcttaccagggttgatatgataattaaatgacataatttattgttgtatgaaagaatctaacatagtaactactcaacagatgttaatttctttttccttcccatgtatcttttttctcttcctcttttccttctcttttccctttcccctgccttcatacatcagctctttattaggtaagtaatatttgtcaggcatcctgcaagttttacattgtccaatatggtagccacgagccacatgtggctattgaacaactgaaatgtagctagtcccaattgagatgtgttgtaagtgtgaaatacacacagaagttggggtagttaacactccaccttgtccccacaccatttccagggcatgctttcctatgcgcaggagactagaggcattttgagtctgtggaggcttttcctataaaaagccagtctttgatgggtttctgaggtggtcttcaattgctgaccagtaagctcaccttccttcctgcaatgacatttttataaatgacagtcttgcttttaaattcctagtatgtggtcttaatttccacacaagtctggaaatgttgacttagtacaaaaagaaaaaaaggccaggcatggtggctcacacctgtaatcccagcactttgggaggcagaagcaggaggatcgctgtggccaggagttggagacaagtctgggcaacatagtgagaccttgtctttaaaaaaataaaaaaattagccgggtgtggcaatgtgtgcctgtagtcctagctatttgggagactgaggcaggaggataacttgagtccaggagtttgagactgcagtgagctatgactgagccactgcactccaacctgggcaacaaagcaagaccttgtctctgaaaaaaaaagaaaaagagaaaaaaatggaatgccaactatctcattaataatttttttctattgagcacatatttaaatgacaacattttggctatatttggttaaataaaatatattattaagcttaatttcactggtttctttttacttttaaaaatgtggctactgaaaaattaaaattacatatgtgtcttgcactgtgtttctgttgggcagcactttgtggagcttatgtctgatggggggaaggtagaaaagcaacaacagcaacagaaagatattttaaaaataaatgtaaaaaacaacaaatacaaaattacacattgtgatgcatactgtgaagacaagtttctatggaaaggaaaatgagaagacctaacttcattcagctggcccatggaaggcctcgctgaggaagacacatttgtgctgtgccttgagggaggctcttcccacagagtttccagccaaaagtggagacagagcattccaggtagaggaaacagccttccggggagtatttcttgagattcccaaacacttgtggtcagcaatggggagaaacagacccatgaagggtcccctgacttttcagagcttgtggtacggggagacaggcaggacaggcatgtgctctaggctacagggatgcgacaagtagtactggctctggaagcacttttccttcctttcttctctctgcctctgaagcgtcactgaccacagtcctgcccttggaggtccctgggctggtctgttcttccttcatggtgggtagtgaataacactcgcatttgtcccttgattccttgttctctcccgcggctctgactcagactcaccatctgggaaatgagcgtctgcagcagccacttaaccagtttccttgcctccagcgtctttctccctttcatatactctgtgtgacgctgccaaattaatcttcctgaaataccatttagcccgtgtaacttccctgatagcaccctgctgctggcagaggagctgtgtgctgggagcttctggacgtctctcacttttcacctttaccttttccttctatgggcaatgacaccgtttgcagagaagcatgttctactgccagcctctttagcttgaggaactcttaaagtctcatcttcagccatcttcccatatttctactcttgccttgcattttcttctgggccaggcatacttgagtcatcattctttaaatgctaagggccactacctcccagggaagaaagaatattaacaacagctcaggttctggcatccatcaaactagcttcaaatcccagctctgccattaaactagctgtgggaaccttttcaagaagtcatttatcttttctaagccttagttttctcatcagttgacaccatgaggctaaaagtaatttgtatcccttggggttgggttctttagatagtactgcagatagacttaaggcaagttagccataaagaactttgttattttagatggaaaaaaattatctgccaaaaaaattctagattttcttttctctttcgaaatccattagttttagattgcaacagactggtcacaactccaacaaattaagctacaaagaacagactgtcttagagtcccctaagtaattaagcaagatcctttgcaaattaggaagctttaagtagaaggaagaatctagttcaaggttggcttttatatttgcagtcacaggcacaaagtgagtccatgtggctataatcatgtttctgaattttttggatgaagacgtaaaaatctcatatcctctatttatgtccgtattttaaaataggtatttaaaatacataaatgtaatttaaaattataatatatatgctttttgggacaccacctacatcaggaatgactgagcaagagaccgcctttctttctattgatctctttggaagatgtagtgtgtagcagttagtcaacaagagaggactatgacacctggtccagagttagtgcacaatagatatttgtaaagtgagaataaatgagggtcaataaaaaagtatttcaaaaactcccttatggtgactgaaatgtctatagattactgcagtatttgatgacaagacaagaaacaaaactccaacaagagttcaaatgtcttgtatactatattttaaaaatctgttcaaaggaacaaggtgaatatagtgccatcattctcagctaccctcatgatagtccttcttactttgggcccaagactttggccttttttttctatttgctcagaaccagtaaaaatctaatgattcagtgactgtggttacagaatgctgggaattgtgatgaggttgggagaaacattggaaactgtccttgaccaagggttccaaccttatgaaatatgaaatagacctatttttaacatctgaagatttccagatctctctccatcctgtcctgcaattttattgtgggtgttttagtatctgttgattgagaagaaagatataccagttcatgatgacctcttgcaatgcaactttggccgaggaatcttcagttcacctgatggaaccactaacattttagaccaaatttctaattgtattaatgaggcacaggaccacttttggtttaggaatagcccgggtataattcagaaaagcataggatgttcaaatagagatttgaaaatatccagaagtcacaaccaagacaactcaggacaccagataagactggtgttgcttgagaaatcttcaccctgagctgttgcagtgttcattactcaatggaaatcccttcacggatcaccacataaaatgcagaatgcttagtgaaatttgaattttgaataaacaacacgtgcactatatggaacatacttgtgctcaaaaactacctgttgtttatgtgaaatttaaatttcactgggtgttctacacttctgttgttgctaagtatggtcactctaccttcaggtgtccacagtggtgccaagggttgaaggacaggaactaaaaacatgggttgtattccagcatgactgtcaacatagattactgatgcattttctgggaacctttcgcatctctaagtctgtaaggctctatatttggttttcccagggatccttgttctccctcaggggtgtgcaacccaacctgggcagtggcagcccagaaggaagttgttgatttattctcttggttcattttcatttactttgaggttttgtcatgaatttgtatacctgaccttctgtgaagtgagggcagaatcgaaggtggggatttcttggggctgaagtaatgactttaagggtgaaatcaagggacagaggaggaggcaggatggaaggagacttcagctcacttggaccccttgtttttttctgtacaggagtcagaacattttccaagaagcatggcagactagaaactctccaccttttcttgtctaaatttgaatttaaaggagattggaatttagctgctcagctctcttttttttaaacacagtttccttctccctctataagctaagtttaaaagaaaagctggcattgtactgttttttaaatcatttatttaatttataaatgaaatatcctaggattttaaattctgattgtagaatcaatgaatttattccaaaagcatgcagaacactatgacagagccaaagaaatagcttattttaatgaacattcacattaaaaattctgtttccataaaggcagagcaatgtaaaaaaatgactttcatatgaggccttaagggtcagatagtttctgttttataggagattggaaagaaagcactgcaaatgaagctcctatttgttggatgggcttttctctcctaccaaggacaagaattttgaaggttcattttataaagttgtatggtggtgaatgccattgtttccacacaaacactcctttcccccataagacctcaaatgtttggttgtgcagggggatttaaaatcagagaacatgaagaaattaaaaatgaagcaattagttgtaggctttaacaattaacagaaaaaaaccaggggctagaaggcagtagcatatgagtttgagaaacactgctttacctcattctttctttcactgggcattagctagtcccacactcagcatagccttgattcagtcatttaacattttaaagtgcaagcttggtgcttgaataaataagcagctcctgggtagcgggaagagatggagactcaaagaggtcatctcagcatagtgtgggaggccatgctgcagcgaggggatgtgcaagcgctgtgggggcatagtgggaacagcctaaatcagactggaagttcaagatcaagagaagaatcacctccaagactagacctttgggttgtaactgctcccttgtgagtcttggagtcaaaacctcagatttctcaggccagcctttatttttacttttatttttgtgatagggtctcattctgtcacccaggatggagtgcagtggagtgatctagctcattgcaacctttgcctcccaggctcaagagtttctcccacctcagcctcctgagtagttgggactacaggcacgtgccattatgcctaacttttgtatttttttgtacatatggggtttcattatgttgcccaggctggtctcaaactcctgagctcaagtgatccacatgcctcggtctcccaaagtgctgggggttatgggtgtgagccaccatgctaggccaaccttgatttctgatattttgttctatcagaacaacatgtttacgtgtacagaccctgtacagaaagaccgtgtctctgctccttggctcttccatctctttttatccttcccaactttttaaatggaaaatttcaagtatatataaaaatagaatagtataacatactgattaccccgtttcaacaacaattactaactcatgccaactttgttttatctattcttccatccatttctcctgtcccccagataatatttgtataagttagggttctctagagagacataaccaaaaggttgtgtgtgggatgtggagagggagatttaggaattggctcacacaattttcaggggctggcaagtctgaaatctgctggcctggagctggggacccagagggtagttgatgttgcaatcgcaaaaccaaaggcagttttgagggagaattcattcatcctagagaagacctcagtcttttaagaccttcaactgattgaatgactcctgcccctccagcctccattcaccagtatagagggtaatctgctttactcaaagtctactgatttaaatgttaataatatctaaaaatatattcactgtaacatctagactggtctttgaccaaaagctgagttatgttttaaccaaattgacacataaaattaaccatcacaattttgaagctaatccaacttatcacattatttgatccataatactttagtatatatctttataaaataaagattctttaaaaaatgtatatggaatactattaggacccatatgaaattaaacatcctgaattatttttgtttgaattaggatccagataaagcccatacattgcaattacagatatgactcagaagtctcttttgatctgtggatttgttctttatctcttttttgtttttctttgagttcatctgttgcagaaactattttgtcctgtagaattttgcatcatctggattttactgattgcattcccatgatataatttaaatgttcctttgtccctgtgtgtcccataaattagtaattatataaatagcttgcatcacacccaggctttttttttcctgcaaaaatacattgggtgtatcttgttgagttgtctctctttcagatgtcagcagcctttgattaacattgtttgactctattaatttattagggtatgtaaaattctaaattcgatcatttcttcttgcatttatgcattgaaatatttctgtaaagagtaatttgccctcattaattatttcattatagtttttcctaattatttatctcagcgtttcccaaattgggactgataaactcctggaaatgtgctgacatgttcttttgtgtgtgtctgcgtgagtgtatgtgtgtgtgtgtgtacatggtctgcaagctttctattataataatataactcagcatttttatctcaataatgattgagaaacattataagtatatctggatcacctagatgatcatctattgaagttaaatcaatgaactcagagctggagtttgcatttgtatttaggatcatgaggatagcaagcagcactgctttaattatcaagggttaaggaagaaagaagatgggcttaatatgccaagtcacttttcagtggctattagcttgaatagagaatcaactagagcaattgaattgctatcatgatggtagtaagcagcactgctttaattatcaagggttaaggaagagagaagatgggcttaatatgccaaataacttttcagtagttattggcttgaatagagaattgaatagagatttatgccccaatttggggcatacagtaattacatattctgtaccaaaaagatgatactttgtagctgtcagtaccataatgatgctggcgatttattttagcaaaaatcattttttgttatatttgagatgcattcgtttatttgatttttgctgggtttgtagttttgctgaatttgtaaatttgtttcatttttacagttgtccatgtaaatacttctactatttaagaaagtttataatagaagtgatttgggccaacatactgactctgaaagaataattttttccttttttgaagatcttcacattactcaagtttgagaagtgctgctttatcccattcttgctttcataggactattagcaagtctcacattcagcataatttgtcctgttaaggagtgatctctgctcagagtacttggagtcaaatggtgtgtgcctacagatcaacaccctggaacactcagagaaaaagagctgtatttatgaaaaggtattttggtgcctcctgctctccccgacatcatgttaaaccagagaacagaagcacttggctccttctgcatctttggctggttccttgtaaggcctgataactggagagtcttaggctgtacctacacattactgtaacaactttttggaaagataaaaaccagaacaaaagtcatctacagcaggcttttccggctttaatgtacttaacagatcatttaaaaatgcagattctgagctctgactctctcaggtgatgcggccggcccatatgccattcgttgagtaacctgagtctaaacaaccaactgctttgtctttatgccatgatcgttttattttcctaggataatacatagaaagctgtcagtacagtatttgatacagagccagcatttgataattgttcattgttcttgttatggttgttatagttgttacggtgagtttttgaggcatggagatgagtggaaatgatgaaagagaagatgggagtttagagattgacaggcctgaattaagatcccagctttgccatttgtaagctgtttgacctgggcaagtttttcagcctttctaagtctctctcttgtcaaatgttaaatggggagaaaaatagtacctcaaggaatcaagaggatgctatgcagctcctagagagatgggtatttgataaatgccatttttcttcctttgttcctttttggacatagacttggggctcagtcttggttctgtgacaacactattgtgagttgcattataatccctatgaaatgcagctctttctcattatctttaaagtggggataataattatgatgattaaattaatgggtgcatgtaaaatgtcttggtacataataggagcccagtcattactggcctctctctcccctcccttccttcacttagcgatgcagttggcgaggtcaaccaagcttaggcacagctttaagataggggacccatggtttcaatttcagttgactagaataatctggagatcttacaaaagaaaaaaaaaagattcccaggccttaccccaagagactctgatttaataggttctgggttgggatcagataccgtgcatattttttatggttctcccagatgttttgtataggcatccaggctgagaatcacggctctagtagacagctaagccttgatcactatcagatggctcttagcattcctcacgtctgcacagcacagcacaccacaccttttccacccccagctccagcctttctgattgtttcttcctacacactcctgtttttgtgcactcccatgagaatgctgcaactttgcccttcccttggcacactggggtgagcacttctggaacccatcacaaccaggcagggcaggggagcctgagctcagcatgcctcccagccccacccttcacactgagacacacagaaatccctttgggttcctgcctgaggaagaagacacccctctggagagctttgaggcatttgaaggagaaacaaacctatgacatgaggcagtgcctactgtgtggcaagaactttacttgtattatgtctgcttatcctttatgaggtagttttattgatattgtcattctcattttatagaagaaattgaggcaaagttaaataacatgcccaatgtcaagcgcacagtggtctttgtattagagtagtctgattctagaatctggggtcttaaaaaaatgacgcctgggtccactcagactaattgaaggagagtctctagagattgggccctatatactggtattttttatgagctgttcaagccaaatgtgagacctagacaacactttgctcttctgtctcccaggctgacttggaacctgagtctatagagattccttttattcctgttctcttcttcccctcttctgttggcgatttaaaaatttttttgttttcatgcttgttagagatcctcggtctgactgtcattcctaagagggttgtgataagctgaataatggccttcagagatgtccatattttattttctggaaacagataatatgttacctgatgcagccaaaaggattttgcagacatgattaaagttcaggatttggggctggagagattatcctggattattcaggtaggcccagtggttctcataaggagggaggcaggaggatcggactcagaagaaggagatgtggcaaaaggagaaggggtcagagtcagtgagagagatttgaagatgccatgctgctggctttgaagatggaggaagaggcctggaacccaggaacacaggaggtatctagaagctggaaaaggcaaggaaagggattctcccctgcagccccgagagggaacgtggccctgccagcaccttgattctccatctgtgagacccatttcagacttctgacctctagaactgtaagataataaacttgagttgtaattagtggtaatttgttagaccagcagtgggaaattaaaccaggggtatttggtgctgtagaaagtgcactgtcctccagcaccccagagaactggattccatttctgcactctaccattcactggctgtgaataattctggcaagccaccagatgtctttaagataagctgtttcttctgggaattagagccaagaaaccagatgtccttgagggcaggactgggctgatgacctcacacacctcacagatgcactccctgccatagccttgattcttctgctcagctcagctctgcacttcccaataggaaccactgttctcgctccctcaaactgagcctgagctctctatcatgttgtcctgggttattttaccactggctgaaattattttgtgtgttaacttgtcacaggcacttgctaaaatcaggaggcactatttccttggctgggcctttttttttttgagatggagtctcactctgtcacccaggctggagtacagtggtgcaatctcggttcactacaacgtccgcttcccgggttcaaaggattctcctgcctcagccttccgagtagctgggattacaggtaccatgcctggctaatttttgtatttttagtagagatggggtttcaccatgttggccaggctggttttgaatggctgggcctatttttttaagaaattaattaaaaattaacaatgaactataaatttcccaacaccaagagaccgagagaccagagttattctgttggcttttcccctccactccagtcaaaattgcacaatgttttgatatcacctcattggcttcagactctgcttttgtgatttatttgtttttcacaaacttctccctgccctacttccagtatttgagggtggacatggggcattatgtctaattggccagctctttcaaaaaggggagatattctagacctttgtatgactgtacctagtgcaaatataattggtagtgatgacatccaatcataagtccttggcctcatatatgcatatttaatactaagtctctttatccttagtagtaatattaaaccgcaaacttgagtgacttttgtgtgaaagttttctcatgggaattgtgcaaacttcattttttccaaatgatgttctgtttgttctattagttgctgtaccttatcttttgaaaaaagtgaacatgatcttggttgtacttagttggataaaatagttaacagctaagtttgttacattcttttttcctaagagaaaaggggaaaaaaagtcttgacgttaaggggatttcaccaaggttctcctagaacaatgtttcttaactagtgacaagagtgagaatttgccccccaggtgacatttatcaatatccatagatatttttggttgtcacatctagggggaaggtactgccagcatctcgtagttagaagccaaggaggctactaaacatcctacaatgcacagaacccctcaccctgcccctgcaccaaggaagtaaagaattatctgatcttagatgtcaatagtgccattgttgagaaattccatcctggatcagtgttgctcaaactttaatgtgcatatgagtcacttggggatctggttaaaaaagattctgatttgataggtctaggtggcccatgagagtctgtatttccaaccagctcccacttggtgtagccactgctggtgtgagtgccacaatttgagtttaaatgtcctagaattcttgtttcttatctgtcttcctacactaaaagataagttccatgagaacaaagaccttgtctatgtcctgtccgcaatggctagaactataactggcatatcatagttgtttaataaatatttgttgaaagcatgaatggatccatggaggaattaagaaatgaataaataagcagacaggcaggagcactgcttattctcacacgtacctctgaagaaccttagaggcacttattcttaaaaaaactgaatttcctctcaacaaagccagaaattcaccaacagctttgctcagggcatgacagtcttcctcaggttaaaaatggtctcctttctctgatgtctcacattgtccctttcgatgcagttccactggatagatggttgggctgataatagagggaaaaaccagaggcccaaaccctggccccacaccccagcctgtcccaaggtgaaaggcctagattcaatcatatttgtttgtattttggcagtagggggaaggaggaagtggggattttttttgagatggagttttgctgttgtcgcccaggccggagtgcaatggcacgatctcggctcactacaacttccgcctcccaggttcaagtgattctactgcctcagcctcctgagtagctgggattacgggcaccccacaaccatgcctggctaatttttgtatttttagtagagacggggtttcaccatgttggctaggttggtctcaaactcctgacctccggtgatccgtccagcttggcctcccaaagtgctgggattacaggcatgagccaccatgcctggccagaataggtttttaaaggaaaatgaggttagattgaatttcatggtgtaacctctgggggaaagacgtcttctagtgggcaacagggagctgaggggtggggagaaccggatgctggtatagtttgtacacctgtgagctttgggaactcagagatctattagcctcagttggcaaatcatttccttgtttttgctctctgggcctccattgattgcccttgtcttccaccttccgcacacaaggaaatccaaacaaagccattttggaatcctatctaggagtggctttccttcccaaggtggtccctgtgctcttgtagagaatttgctcagaacccaaaatacgctccagtgtcctcctgagaattggttgtgttgggcagaagacagaaaggagagagaagagcaggatgacaggaagaggagtaaagaagaggcaaagaaggcgaggccataagaacagggccacagggcattctctgtagattggcccaggagatagccaaacgttcacacaggtgtcattgtcacagagctcttgacaatagcaactctctcctttagaagctgtgatgcaagtgaatgtgtcagccctgctgattcaggtgtggtcactgcattttgactgtacattgttttgtaaacttgtcaggcccactgggtgcctgtgactgcgctgaaccaaagagaaactgagaaacagctttctcgtctgggttgggagccagtagagtaataccgggtttgggagtcctgcctttgaagcagttcatcaacactgaagaatgttctgcatctttcctgggacctataagggattcaagattgctataaggaaaggtcaatagagagtgagatttgtttgtcatcagaatgggttattaaagcacttggaggaatttacctttctggatgtcttcaaatagaaactagattcttgtattatgggatggtttaagggctctcagaggcagagagatgtatatccctatcatatcccatctttgctcaaaaatattctattgcttcttattgttcataggataaagtttaaatttctaaaactggcattcagggtcttctattatttggctctaaacctttcctaggtctttcttttttaaaagataagttaaacacaaaacaaaacaaacagaaagcagcaaactaggaatagagaactttctcaacttgatacagaatatctacacaaaacctacagccaacatcatactttagtggtgagaaactaggtgttttccccttaagactgggaacaacacaaaatgtcccgtgtcatcactcctatgccacatcctactggatgtcttagctaatgcagtaatatgataaaagggaataaaaagtatacagactgggaaggaagaaagaaaactctctttgttcacagatggcataattgttcatgtagaaaatcccaaacaatcaacaatagcagcaaaacccttcctggaactaagtgatttttagcaatgttttaggtgacaagattaatatataaaagttaacaaaaagatataaaattaaaaaaatataaaagtcaaatgctttcctatataccaacaatgaacaactggaattcaaaattaaaaatacaacatcatttacattagcaccgaaaaggaaaagatttagatataaatttaataaaatatatataagatctatatgaggaaaaccataaacctcttatgcaaaaaatcaaagatctaaataaatggagaaatattctattctgtttatgaacaggaaggctcaatattgttaagatgtcatttcttcccaactgatctatagattcaatgcaatcccagtcaaaatcccagcaagttactttgtggatattaaactgattctaaagtttatatggacagacaaaggacccagaatacgccaacatgatattgaaagagaagaacagaatcgtagtactgatactacctgacttcaaaacttattttaaagcttcagtgatcaagaaagtatggtgttggtgaaagaacagacacataggtgaatagaagagaatagatagcccagaaatttacccacataatacagtcagctgatctttgacaaaggggcaaaggcaattcagtagtgaaaaaataagtctttttaacagatggagctgaacaactgtatgcccacagtattagggttctccagagaaacagaacccaataggatatgtatatgtatatgtatatgtatatgtatatgtatatgtatatgtatatgtatatgtatacgtatacgtatacgtatacgtatatgtggggaaccattatgggaatggactcacacaattatggaggcctaagtctgaaggcctgataactggaaggcctgctggtataagcctcagtgtccaaagccctgaggaccaggagctcctatgtccaagggcaggagaagacggatgcctcagctcaagaagagacagtgaattcacccttattctacctttttgttctattcacgccctccatggattgaatgatgcccacccaggcaatcttctttacttagtctaccaattcaaatgccaatctcttctggaaatgccctctcagacacactcagaaatcatgttttacctgctgcctgtgcatttcttagcccagtcaaattgacacataaaattaaccaccaaatctacatgcagaaaaatgaatccagacatagaccttacctttttcataaacattaactcaaaatggattatatacctaaatgtaaaatgcaaaagtgtaaaacttctaaaagataacagaggaaaatctagttgctcttgggtgtggaaaagggttttaaaataatatatcaagaggacaatccatgaaagaaaaaatataaaagttagatttcattaaaatttaaaacttctgttttttcattctcttaatggtgtctttcaccattttgagttaatttttatggaaaaagaaaggtctatgtctagattcattgtttgaatattaatggtgaaagacaccatcaagagaatgaaaagacaaaccacagactggggaaaatgtttgcaaaacataaatctgataaaagacacatatctaaacaatataaatggctcttgaaacccaatgacatgaaaacaactcaattaaaaagtgatctgaacagacttcttatcaaagaaggcatacagatagcaaatgagcatattaaaagatgcccatcatcatatgtcatcagggaattgcaaattaaaacaacagtgagatactactatacacctatcaggaacgctaaaatccaaaatactgacaccacaaaatgttgatgagaatgcggagaaacaagaactctcattcattgctagtcggaatgcaacatggtacagctagtttggaagacagtttggcagtgtcttacaaagataacatacaattatctaggagcaccatacaattcagaattgtgctcctagtatttattcaaatgaattgataactaatgtccatacaaaaacctgcacataaatatgaatagcagctttattcacaattgtcaacgatgcacaaatatatccttccatatgtctttttggagaacaatttattttcttttgggtatatacccagtaatggaattgctgggtcaaatgttagttctaagttctttgggaaatctccaaatgctttccacaggaactgaactaatttacattcccaccagcagtgtacaagtgttcccttttctacaaagccttgccagcatctgttgtttatttgactttaataatagtccctctgactggtatgagatggtatctcattatggttttgatttggatatctctgatgattagtgatgtggaacattttttcatatgtctgttggccacttgtatgtcttcttttgagaagtgtctgttcatgtcttttgcccactttttaatggggttatttgttttttgctcattcgattgtttaagttccttgtagattctgggtgttagacctttgttgactgaatagtttgtgaaaattcgctcccattctataggttgcctgtttactctgttggtggtttattttgctctgcagaagatctttagtttaattaggtcccacttgttgatttttgtttttgtcgcaattgtttttggggacttagtcaaaaatcctttatgaaggccaatgtccagaatggtgcttcataggctttcttctaggattcttatagtttaaggtcttacatttaaatctttaatccatcttgagtcaattgttttctttttcttttcttttctttccttttttttttttttttttttctgagacagggtctcactcctgtcacccaggctggagtttgatggcacgatcatgactcactgccgcctcaccttcctgggatgaggtgatcctcccacttcagcttcctgtgtagctggtactataggcaagtgccaccatgcccagctaactttttatatttttagtagagacagggttttgccatgttgcctaggctggtcttgaactcctgggctcgagcagtctgcccacctaggcctcccaaagtggagttaatttttgtatgtagtgaaagctaggggtcaaggttcattcttctgcatatggctagccagctatcccagcacctttgttgaattgggagtcctttccccttttaagtcctttccccttagcttatttttgttgactttgtcaaagattagatgactgtacatgcatgttttatttctgtgttctctattttgttccatcggtctatgtgtctgtttttatactagcatatgctgttttggttactgtagtcttatagtaaagtttgaagttggtcagataatgtgatgtctctggctttgttctttttgcttaggattgctttggctatttgggttcttttttgattccatatgaatttcagaatattatttgctaattctgtaaaaaatgaccttggtagcttgataggaatagcattgaatctgtagattgctttgggaagtatggccattttaatgatattgattcttccaatctatgaacgtggaatgtttttccatttgtttatgtcatctatgatttcatagacatatgaatactagaaggatcgtagaagaaaacctaggaaacaccattctggatgttggctttgggaaaggatttatgactaagtacccaaaagaaattgcaacaaaaacaaaaatcaataagtggaacctaattaaactaaagatcttctgcagagcaaaataaactatcagcagagtaaacaggcaacccacagaatgggagcaaattttcacgaactattcagtcaacaaacatctccaaaaagacacatgcactcacacattcatcacagcaccattcacaatagcaaaaacatggaaccaagtgaggtgctcactggattggataaagaatttgtggtacatttacatcatggaatactatgcaaccataaaaaggaatgaaaatcatgttctttgcagcaacatggttgcagctggacccattatcctaggtgaattaacataggtacaataaatcaaataccacatgttgtcacttataagtgggagctaaacattggtaatacatgggcatacagatgacaataataggcattggggaccactagaggaggaagggagggaggggacaagagttgaaaaacttactgttgggtactatgcttagtacatgggtgatggaatcattcataccccaaacctcagcatgatgcactatacccaggtaacaaagctccacatgtatccactgaatcatatatccactaaaataaaaatggaaaaataaaaacagtacataaattgcatcaaagtttaccactgttttgcaatttgcatttctcactgaacctaatggtttcaaaattcattcctgtttgtaaatatagatatacttcttttattcaaaaatcttttactggtagtattatattctgttgtatatatattacatcatattatttattcatttctctattgatggatgttcagattatttccaactttatgttactacaaccagttgcagtaatgaactttttttgacatatacannnnnnnnnnnnnnnnnnnnnnnnnnnnnnnnnnnnnnnnnnnnnnnnnnnnnatgtgcattttcaactgtcctagctactgccaaattcttggcaaagtgtaatagtaatgccattttgcacttttagtagtgtatgagtgttcttgtttcctcatgccctcaccaacacttgatataatagattttttaaattttgcaataaaatagatgaaaaatacctgtttttaatttggttttctttgcttttagtgaatcaaggatcttttcatgtgattattggacaattagtgttttgccttgtgttgaattgtctattcttattttttacccttgggggagcagtttttctttttcaaattgattcctaattaaaaaattacattccctagtactcatcctttgtcatttatgtttatttcaaatatttttttctgtctgtcatgtatttgaaaactttatttatggtaccattgtgggagaggcatagggccaaggatgggtatgaatcccggttccgttacttatcaccagcacaaccttggatattttagttaatctctaactgtatttcagtttcttcatctgtaaaatgggggcgatagtattacctatttcagaggtttgttttgaagattaaaggagttaagatgaagagcacttacataaatgaaaagtggtacacagaaagcagtcaataactattagctaatatttggacatatagaagttttaagtggtttttttttttgctattatacaaggtagatttattttttttgcttttgtacatgataaaagtttgattccatctcacataaaataagatatgcagggatggagtggtggatccacagtcttcaggaataagcctcttttaggtgcactgctcctatcccctagatgtgagtcttatctgcataatctgggataattgccaaagcattaaccatcataaccatgttccagccttccagagaaggaagggcagaagtgatatttcttcccttcttttcaatcagctttactgaagtgtaatttacatgcaataaagttcacatcttttaagagtataatttgatgagtttgggcaaatgtatatggttgtctaattattgtcacgatcaatatatagaatatttccatcaccttgaaaagttccctaatgccctttgcagtcaattctattccctttacctggaggcaaccactgatctgctttctatcactacagttttctctatattagaatttcatataaatggaactatgcagtaagtaccctttagtgtctgttttgtttcatgtaacataatgcttttgagattaattcaggtttttgcatgtatcagtaatttgtccctttttattgtggagatgtatcatagtttgttcatccattcacatgtcaatgggttatttccaggtttgggttattataaataaagctactatgaggatccatgtacaagtctttgtgtggacatcgttttcatttctcttgggtaaatacctagtgaggattgctgggtcaaatggtaagtgtatgtttaatgttataaaaagtgacaagctgctttcccatggggctgttctatttgtgtttccacctgcagtgtataagagttctagctggtccacatccataccaacacttggaattgtcagtcttttaaaatttagccattctagtgagtgtgtattggtttttattattttaattagcatatcccaaatgactaatgatctcgaacatcttttcatgtttgccatttgtatacagaagttttaagttttgatgtggtcaacttcctcagtctttttcttcattgttttgctttttgtatcttgttaaaaatttttttcttatcccaaggacataaggatgtcttcaaatattttcttctaaaaagttttaaagttggaatttcataactaggtctttaatacacttagaatttatttttgaatctgatgtgagtagggaatctagttaaatttttatccatgaatagaaactcagttctaaaaacattaataatttttccatggattggtaatttatattgtcatttgtatcactcaccagcttctcatatgtgtatagtttctagctgtatttttcattatctcctaccccagtgactacaatgtctcctgcatgttccttccaatgtgagtttatttatgctcttccttatgtctagggtgactcctttttgttctacctttcgaaatccactcattgctcaaggtctagctcagatgacctttaaagttcttcccaaatccagtcatatgcctctgtccctcccttgaattaaatgaaggggctcagcacacgtatagcattttattcctctactataaatcttagcctatctttttggaatcacagtcacttctgtgtctgtcttctttgttctgccagactgtaagccctttcatgtttttgtggtaactgccagactgtaagccctttagtgtttttgtggtaggcagaacagtgttcctacctgcctatgtcctaattcctggaacttgtgaatatattaccttacttggcaaaagggactttgcatatgtgattaaattaatgacatacagtgaagagattatcctggattattctggtggactcagtctaatcacatgagttctcaaaattagaacctttaccagataaattcagagtcacaggaatccatggttaggaagtggtcagagatggaacattactggttttgaaaatggaaggaggggggctatgagccaaggaatggaggtggcttctaagagctggaaaagggaaagacatgtattctcccttacagcctcttcaatgggacatagcagcagcctaggtggcaccttggttttagggataggcatgtaggggcagctttgctgacaccttgatagcccagtgagatctgtgttgaatatctgacccatagaacggtaatataataaatgtgtgttgtttcaatgtactaattttgtagtagtttgttacagcagcaatagaaaactgatatatttgctcaccatagagtcccctgtaacttgaagcagatccttagatacaaagtgataaatcattgctcactgagttgaattgtgaagcaacatgtaccttggaactacagaatgaaaactttacgttcttactacatcattaatgatcagtgtgatgcttatcactagcatctagacctttgtcaatccatgacaaatgaatgacaaagaccagttttccttatcgttagcagtcctatgccctctgactttgactacagtggtggtaagtaaatactgttggnnnnnnnnnnnnnnnnnnnnnnnnnnnnnnnnnnnnnnnnnnnnnnnnnnnnctttttccctagttatttaacctactcaaggtacttgactgagaccctttgaggggccattgaaaagtgttttctagtctttgttcttaggtaagggatttggagtcagacatacaaggactttgaaatcctggctctggtcttcgttaactctgtgacatagagtaggtcactaaataccttggagctttggttttcttatatctatggcagagataataatacagttgacccttgaacaatgcaggggttaggggtctggccaccccttgcagtaaaaaatccaagtatagatttttacttcccccaaacttgactggaagccttttataaacagccaattaacacatgtttcatatgttatgaaatgtagcttcattatatactgtattttttttcttttttttgagtcagagtcttgctctgttgcccaggctggagtgcagtggtacgatcttggctcactgcaacctccgccttccaggttcaagggattttcctgcctcagcctcctgagtagctgggattacaggtgtgtgtcatcacgctgggctaatttttgtatttttagtagagatggggtttcaacatgttggtcaggctggtctcaaactcctgacctcatgttctgcgtgcctcagcctcccaaagtgctgggattacaggtgtaagccactgcacctggcctatgtactgtattcttacaataaagtaagctagagaaaagaaaatgttatgaagaaaatcataaggaagataaaatatatttactattcattaagtggaagtggatcatcataaaggtcttcatccttatcatctttatgttgaataggctgaggaggaggaggaggaggaggaaaaggaggggttgatctttcttgctgacttgggggtggcagaggcagaagaaaacccatgtataagtgaaccaacccagttcaagcccatattgttcatgggtcaactgtatttccttgagttgttttaatgataaacagatgtatgtatgtaaagttattagtatacaataggtgttcaatgagtgccttccttcccatcacaggtgcatcactactgacaaacaatccagacttctatttactttgaagagttagttacaagcaggtgatgccatatgacatttgttcttagtttttgtttttgtgttttatttttaaagacataagtttttggattgcctcatcctttcttatatttccaagtttagggttcttgtcattttagatgtttggttaagaatagctgatgttccgtggatggttttagttatttaaacattgagaggggttggtagtgggaacaataggcagaggtacaggagagatcaaaataagataaaataaataaggtaatagcactctagagtggttattttcttctgacagagctttattatcattctggctttgggagcagctgctgagacactcatctctggtcacatgctaagcctaatatgaatgaacacgtccgggcttatgacactgacaagagacaaatggcctctggagtacagagatggggaagttggatttaaatctcagtatcttgatgctactctgtttgtctccacatgctcattcaaatagcattcctgtgtcttggcactatcatctgcaaaaagaagagacactcatcctcttatttggaaggctgggcttgctaagctgagagtgaacgagaagctctcttgcagaccagagctctcacttctttcttgatttcacctaactgctttccactgttgagaagcttcctttccactgtcccctggtcactgcgggctcctcctctacagcactactttagaacgatctcctccatcaggcaccttcttagacaaagtcctctccccgtcttacacatgccagtcatcttaacacctccatagaacttgtaattagtttgttccttagggacatattttagcatttctgttttttgtggtttgttcagtctatcataagctttctgttgtgagcaggggctgtgtctattctgcagtgggtgcctcaagcgcctgaagtgtccctgtacaatgcaagtgatgattagaagagcatcccaaatgctttgcgctgcactgttgacctacagcagttttctttcatcatttttcttattcctataacttcggttttggccatgacttcaaccctgtggcgatctctttcttgaggcactgtgtgttagaaaatgggttatctttggccgggcatgctggctcatgcctgtaatcccagcactttgggaggccaaggtgggcggatcacctgaggtcaggagttcgagaccagcctggccaacatggtaaaaccccatgtctactaaaaatacaaaaattagctggtatggtggcatgcgcctgtaataccagctactcaggaggctgaggcaggagaatcacttcaacccgggaggtggaggttgcagtgagctgagattgccccactgcactccagcctgggcaacagagtgagatcctgtctcaaaaaaaaacaaaaaaacaaaaaaacaaacaaaaaaaccaccaaaaccaaacaaacaaaaacaaccaaaacgaaaatggattatcttcttatgccttacagaacacgatctattatgttactgctgctctaaccattccctttgtcttctgtctgtctccatggcctgcaagagtggcaatatccttcactggccttggttctcagagcaggtggcacatgactgaggctagtggcctggtaggtgggatggcaaggtgagtcacatccagaactgccctctggcacaatgtttggacagggaggctggaggttccaaagggtgtgttctctgggtttaaatgcattggaacctagtctgaaggtttacctgctcatgctagaaagataggagcacattggtttaatctcaaaggaggaagagtgggcagttttagatttagggccactcagcatctgcttttccctcttgagtctagagccattataaatccttaagagtgtgatattccccttcctgtgtccatgtgatctcattgttcaattcccacctatgagtgagaatatgcggtgtttggttttttgttcttgcgatagtttactgagaatgatggtttccagtttcatccatgtccctacaaaggacatgaactcatcattttttatggctgcatagtattccatggtgtatatgtgccacattttcttaatccagtctatcgttgttggacatttgggttggttccaagtctttgctattgtgaataatgccacaataaacacactctggggactgtggtggggtggggggaggggggagggatagcattgggagatatacctaatgctagatgacgagttagtgggtgcagcgcaccagcatggcacatgtatacatatgtaactaacctgcacaatgtgcacatgtaccctaaaacttaaagcataataaaaaaaaaaaaaagaaaaaaaaaatccttaatagaagagaattgagttggacttgacattgaggaaagtgtgaaggtaaggatactttaagaagactcattcaaaaccaatgaaatttgcaggagaaagtgctggtacagaatgatggagaatgaaattttaaagctacatatttttgtatccacatagtatgtggatacaatttgagtattaagacaaacagagcaaagctgttcagatttgtttagtgtattggaatttacaaatgtattttgaagtatgagtcactaatgaagacttaggaatacttcattttggtggtggcgcaagatgaaattttaagttttttctcataatggtattcattttatattgaatttagctattcgattagaattccaccaagcaaaccattgcatctctttttctgggttattgtgagttgttttccctttctgtgtatagacctagtctgtggtttgtgtggctgttaacatctgggaattaacacctagcacctgagttagatcttgggctctgcccaatattatctcttaagggatagagttttaaaatgtttcccttctgcatggtgagtgagtctgtgtttacgccggggggtgttcagcaaaaagtagggtaatggggataccaggaggggtttctggttttcaggccagagggtaatgcttggtatcattagaagtggagggcttctttggatgggggaggaggaagaatttttaggatgaatcacactggaaaccaatgatgaaatctttcagtccgtctttttaggcctgggtgaactgctttttttttttttttttttttgagacggagtctccctctgtcgcccaggctggagtgcagtggcgggatctcggctgactgcaagctccgcctcccgggttcacgccattctcctgcctcagcctccctagtagctgggactacaggtgcccaccaccacacccagagacttttctgtatttttagtggagacggggtttcgccgtgtcagccaggatggtctcgatctcctgacctcgtgatccgcctgtgttggcctcccaaagtgctgggattacaggcttgagccactgcgcccggccgaactgcttttcttaggaggttgtaagtggtaggatcaggtaggagggtacggaggaaggaccttcatgtttcctgccctggcattttccctggggttgctgctggctgcttgcatgttctctttggtgggcgaggaaagccccgtggtctccttcaaacgagaatgtctgcttttgtgtttaaatctgatcaaactctgtgctactttacttggcttttacaaggagtaagttgcacctgaaggcaacagtaaagcagggaacaagagatttacagataattgtttctaggagatgagagtgaagtaacgtttgaggatatggacaatgttttctttcacaatgaaaatgaaataagatgaatgatgtttttattgccaggagtaactgtatctgttgggttccttagccagacaaatgttaacaacccttatactttgacttcattttgtttggatctttaaacagaaagattggaaccatcagattgtttcagattaaaaggctgaagacacaggagttgtataactgaagtaggaaggaggactcctttctttccccactttgatcagctcatattcttcttcacaaaccctccactattccccattgcctccttattacatcctgatggatgtgctgagatatactgatcctctcagctttgggggcagcaggagcctcttagcttgtcataggggtgggtcaggagggctatttggcctagagctgtacattcagggaaggcctggattttaaaatttcatcatatctatgacataggcaatatgtttgcttgtatgtttaaagtatttattaggtaattctaaatatttaaaagcaaccaaaatttttgtgactctgttttggcattttctttcttttttaatatactaacagccttaaaaaaaaagtggagaaggcccaggcatttaacctctgaggtgcccccatagtcagttgcacaggctttcataatatggtaatggtcatagaggctattgaggaggacagaccttcaataactaatcatgcaaagaagtcactaatgtgaggactgggtgccttgaaagggtgtaatagggaccctcccctatttgggccatcaggaaggatttctccaagcaggtgatctcctacccctagaggggatcaatgttagacaacagaggtgataaatctcaattaccaattgttttttaaggaaagagccaaactctaggatgatgttcatattttgggtttgggcaaaggggtgaattggcagtgttgttaaccaaactaggtaaccagggattcttttaggataactaaaattattttctggcagtaggtgggttgataagatgattagttcagttttggggtattttgagtgtgagtggcctttgagacatcagagtagagatgttttgcaaatatatgatcttgtgttatgagaagagcttagtaactccttgtaaatttagaacctcatagtatgtaaggcagtggatagccagtggggaatagaaagaagaatggatatatggcctctgctttcaaggagtttattctctaattgcagtcaaggagttcaataaccacagattatcccagtaaccctctaagacaacagcaagagaagtgtcttgggcactacatcaatgattgccaaatgaattgtatcaatgtttcttgattttctatatccatcttagtatctaagtaaaattgttcatttggttttacttttgttttactctggtagttagaggtaggttgaagatagcatgagcttatttaacagtactgtgggttatttgctttggagtaattcattttaaatttatgatgtaggtactgttatttgtcccattttacagaagagaaaactgcggcactgaggggttaagtaacttgcccaaagttatgtaactaacaaattataaagttggtattcggacttagataatccaaattcaaagccccttcccctaatttttaatcctatttttttaactaaatatgttccctatcatttaagttatttgaaaaccttattttcagtggctgcgtaatttatttgacattctcctagtgcttgtatttccatttatatttgcaagataaatccctgcaagtgggcttcctgtactaagaaatataaaatgtttaagacttcttaaaccaaatacaacccattttcagaaaagttcaaaaaatttgcagtctgtatatacttttcaatcccatatagaagttttctcgatcccatatgattgcctaaaccaaaacagaactcagcaacactgtgataaaggtggtggttaagataataaatcaaagacttttagggcaggaaagaactccaggtttcatctaggcttgcctccttcttttattaattaagatccaaggcttagaaaggttaagaaacatgacgcaaacacaccattacaggtatagttaggacaaggacctgcacatagcactatgtgatatattgagtctgagactcttggatggtttggacgattcaatggtgtcctgaaatgactgcctggggtcaccactgagatataagagacttttagtgtttgggtcagcttccaggtttccccctgagtttcacagttgtatcagagggatggaagtaactcaaaagggtctgtcctgaactgagcagcccattatcacctagagataaaataaatctgctgggccaggggaaatcctgaaatctcctttcatgagtttccttggacctggcctagtgtcagatccacaagggtgattctggactctcttttcattattctgttgatggtatgatatgtttcaacaaagggctactcacgtaattaaaaactcacataattcttttttttttttttaatagcagggaccaaaaatggagggtattactgtttattaaccagaagtgactccactatgtggcaataatgtaaacaaagtttgcaatttgatttggcttgatatctggctaggtggggctaaggtgttttaacagtaaatctcaaagtttcattgccttagcacaataagggattgtttcttacaaaatctgaagcaggctggttgatcaccttctgggttgcagatatgccacaccaaggttgcccaggcaagataagagagaggtaaaggagttgtgtagactgctaactgaccctgcttggaaagtgacatgtgctagttcaacttatagtgtattagccagaactaaaaacatgggcccaatctaactggagggagaggctgggaaagagtggggagcagcacacagatatttgatgaacactaattgtttcttccatacacttgatgcttgatattttgaaattatcaacctaaaagaatgtgtaggcaatttcacatcatttcaagttttaaacataaagataaaactttcatatcactttccttcagataggcctgaagggccactgtatggcgaagtatatactgtggatgtgaagaaatccttttcatttctgtgttaaaaataatggaacttttgcttaatatttgtgagatttgggcaagtggtctaacctctctaaatgaggatccctaaagaaaaaggggtaacagtgcttcattcatgggtatgttgcataaattaggttgaagactgaacataaaacacttgacacagtgcagagtacatggtaagtattcaacaaatgtgagtttttattttgtttttattggtattatgatattgtactggtatttactagtatgcacagtaatgtaggatcctcagaatcatcctcagtgatgtatccataataatcagaagacagtgtactttatggaaacaagtgatgttttgtccagattctggcaatgaaatgtcttttactttctgtgtgttcttatatttgtagatcatggggaatttcagaggtcatgccctccctggaaccttcttttttattattggtctttggtggtgtacaaagagtattctgaagtatatctgcaaaaagcaaaagcgaacctgctatcttggttccaaaacattattctatcgattggaaattttggagggaattacaatagttggcatggctttaactggtgagtggaccattctgtgttctatttttaccttttaggtgttttcattcttttaaagaattggttggagcttctgaaataattttatatcaattgttctgatctctgaaagaataaaccctatcaaaaaccattttgcaaatgatatgaaattaatcaagttattatggaaaagcttcagtaataaataatttctgataggctgtagaagactttagccttctgcactcatctttttttcttggttcctaaattggagaaagagattaggccagatgacttctaaggcctttccactgaatcttccatatgaagattcaatgaaaatgttctgtgttcttgagagttccactctagcctctccattataaaagataaaatttccagttttcccattagatttcttcatgctttattcatggcaacaggtctttgctatggcatcaaattacacagtaacatttccaaagagggaaatttccttgccaaattctatagattaacaaataaggcagtatctgtaggaaagtttaactgtttgcataccagactagatcgtctgctgtatctgtctgggctttcttttttccttttttcttttgagatggagtctcggtctattggccaggctggagtgcagtggcattatcttggctcactgcaacctctgcctctggggttcaagcagttgtgcctcagctcccaagtagctaggattacaagcacctaccaccacacccggctaatttttgtatgtttagtagagatggggttccaccatgttggccaggctggttgcgaactcctgacctccagtgatctgcctgcctcggcctcccgaagtgttgggattataggtgtgagccactgtgcccagtcctgtctgggctttctcagttatcataattggagaaaagctgaactctttagcatttttatctggtaccaagcacaatcccctattttatggcagctacccaaagatgtagtatttaagaaggaagtaatctatctccataggagttgtctcccaaattcaaatctccaaataattcaggatgtatctcagtcattagattggaataggcagtggaactaagatcattggcattgaagatctgaaatagctgtttgattcaattggctatctttgactaaaactatttatttgaaccagcatctgaacctccaaaagaagcctaaagtgccagtgctcagctgttagggaacagctcagagagaagaattaatgtcaaaagaggacattagattggaataagcaatggactagtcctcctgcatcttcttgaattctatgtaaagcagagttgctaaaactgtgatatgtttcttggcaggcatggctggggagcagtttattcctggagggccccatctgatgttatatgactataaacaaggtcactggaatcaactcctgggctggcatcatttcaccatgtatttcttctttgggctgttgggtgtggcagatatcttatgtttcaccatcagttcacttcctgtgtccttaaccaagttaatgttgtcaaatgccttatttgtggagggtaagtgttagtgagtattttcatgtacctttctctattagtgagcatttatgtagcccttcatattaatatacctctggcatcttgttgcagccttgattgataggaccatatatctgggccataatgaaatatttgggtgtcctaggcagggcgccaaaaatctacatgctgtactgactcatttagtagaactgggtaaacacaattgttcaattgctatgttcacatttcacatctgtctcaaaggaccacttacaaaggttactcatctctgggttgttctgaagattatcattttttttcacttttaacaaacgaaaactgatcccagaataataaagcatgaatacactaaaatgaggcagccactcacagtggaacagcttccactatctactaacaggctttttcatattgatacagtaatactctgccatttgatgataagtagggtccaaaaaatgcagtcacataaaaaatatggggtcctaattttggaaagttaattaaaaacaatattttttgttcagctggtctcccagttactgtagggaggaaaaaagaaaacaagcatttaatggtttttttttttcatgtattacacacgtaaaaaatagattgattatggaaatagataaccacaaattgatcaggaggcagtcacttcctactcaccttgcctctggcatccaaagatgagaacttttgcccatacctcgggaacaagggctggataaaagatggatgtcaacaactaatagcccggttctcattatctcagggggttaccgtatttttgtatcaatcttttctctttgtcttcatgaaaaagatgaagctggaatctgtctacaggatgaagaaatgcagttatttactacttcttgggagcttccagagcatgttgttatatctgtcaaaatccacccgtatgtgtttgcttcctccagtggactgaattccttaaggcgatgctttgacttattcatctgtgtgctcatctgaattattgcacttgccatgcttactgttgtttgtcctgcttagaagatgctttgaaatattttcatcttatggagattccaacttcgtcttaatccttttcatttagataaagaggaaaagatattcattcaaaaatacagttaacaccctgagataatgagaatccattcattgaaaatgtcacaatgtgttagagagagaataaaggtcagggaaagcaaaaagagggttcaatttcaaagatcctattctaatgaggtggtgatgtctccaaaaatgcagtactgtgggaatcagtgggcgcctgctcttttggacaaatgtgtgtatgtgtaaaattctgtctacggagagagggagagagagaaacagtgggtggtccttggttccactgaaaaagacaatctgttttttccccatcagcctttatcttctacaaccacactcatggccgggaaatgctggacatctttgtgcaccagctgctggttttggtcgtctttctgacaggcctcgttgccttcctagagttccttgttcggaacaatgtacttctggagctattgcggtcaagtctcattctgcttcaggggagctggttctttcaggtgagttggggcctctagttaatgtacctggactctttgcctgtaacttctctgtttatttgatgaggcagtttgctcccggagacttccctccaacatactgcctgtagtaagatcatgggcctctgagaagtgatgtttctttgagtgtcccaatagccctgatgggagaattgtcagagcagctgggaagtggtgcgtgcacatcttcatcacacctggacatccattatgtaggaactctgagccgatgcttttagttagaagcagcttctgacactaaagcagcttatagcataataagcttaagaaatatatagaaggcagaaaagagagcaaactgttatttattgagaaataactatgtgttggctactgtaccaaacttttatatatacattgttttattttttccttgcaacagcctggaattcaggcattatcatcatcaatttacagataggaagactcagagagaccaagtctcatacaataacagagctaggatctaaatttggattcatctgacccgaggccgcaggctttttccattttaagctgttaactctttaaccttgatgaattgttgaaaacatgaattccaatcagtaaacacacactttatagagactgatgaatcataatccaacatgcatacatatctgtaaacaaagtctaggatggaaggtgaattttggtttaatcagggaagacttcttagaagagatttttagtcaccagagaacacagatttgggataatgaggttattttagagatttgtattgcacatgaggagtgataaaaagcattggtaggtgagggggagagaaacatcatggtcaaatgggatagaaaagatgcaatatttaagcatgtaagaaagcggaaaggctgttggagcaaaggctagtaaagaggggctagatccaagggttattttaatggaaaaacttcatagaaaaaagctaacaaatactctataatgtgataaagctgataattggtgaatttaattatataaaatattatataaaatctatatctcttgcttggaatgttttactatatacacgtattcctattcaaaaataaaaatagacggaaaacattttaaaagagatgacttctggttaagatgacttctggtcaagatgacacagtttatctccagtgtatcttgtgtgctcctgacacatagcaatgacagataaaataaaataaaataaaataaaaacctagaaaattggaaataaattttcaaaaataaatttaaacaataaagtagaaaacactaactgcaatgaagcaaaacaaacaaaaacaggccaaagaaacttgtgggctggatgtagaacagaaatgtagagcaagagtcgagctgagcctgcaggcccagagcagacggtgatggttggttttttggctccagtggaactaaaagaaagtaaaaggactcctttcaaggtggaggatgaaaccaggcttttgggactctttgattgtgtttttttatatattctatattcctaatggtttttcatctgattgatctctcactttctaatagaagtctgttgaagttttatattacaggtctggatttgtccatttcttcttatgttcattttttgctttgttgtaaggctgttttctgcttctctctctctctctttttttttttttgagttagatgctgatctcatttattttcagtctttcttgttttaaaataaatgcatttaaacaaatacatttgtctgcacactgctagagctgccttctgtaagatttgatgtgttagtttgtagtttttttgatgtgttgatgtagttttcactgttgggtaattttgaatgttatttccatgtgcttctctctttaatttatgagttatttaggagtacacttttaagtttccaaaaatattctttttttcttattatttatttctaatgtaattgttttacggtcagggaatgtattctctttgtaatgtgttgagacttcctttggaatacggcccagtgtcagtggttgtaaatgatccatgtagtcaaaggaaagtatatcctctgtttggtttaggagtcctcatatatttactagatcaagtttgttaaaaagcgaaatattcaaataaagaaaggcaggacaagaggggaaaccccaagagagcggaattataaacataagagcagaattaatgaaattaattagtgttcagttaataatgactaattaatgtctaggatctgaaggaggaagctgtgggttatacctcaactgggaataggttggcttagtgttgccccttttggcagataaatgttttcatatttcccccaaaagcttttctaaggaagagattaatgtctttgggcataaatccgtgattatttagaaaatttttcatctaccaatatgtctagactagactgtttccttcttcctggtggtcagcctaaataatgtccgcagctttaaagaaaaatgaacatttaataccagcgcaaacacacacactggcaggaaatgaaggtttagccatagtgacattcccactactgcacccctctgaaacaaaactgtctagaaacttaggtgaatatattatgcttccagtcggtaagtgtggcatatgaatgtttacagcaaaacgctgtcttaagctaacaatattatgtcgtgacttgcttttcaccatattaccatatttttttctcactacttctccataaatggttaatatgttaatacttgtgcatgaactgtgtatagagggattagataaaacatccacctagactcttggaaccgtaagtatggagatgtgaattgaaggaaaccaatactcagattggccacttttttatcacacacatataaatgattgggtaatacgtaaatggagagggaatttcccttccaacttattagcaatgctttctttcctgaaccacatcacagtcaaaaatgctttctcaataacctagccacatcatgcaatttaaaaaagaaaaaaaaatcctgcaagcccctttatactatgaatcatgttttccctgtgtctctgtgtgggagaatatttcaaaagctccctttgcaacttctcattcccaagctccctccagtcatcctcaccgcccaggtgcagggacaatcagggaatgaggaaggtgctcctgctgtctttgcttcttgttttttaggacagttgcttccactgcatctcccagctccactagtccccccagagattcctcccatcactgcacagatcctgagcccaaacgaaagctcagcctttgttttgcctttatgaaggacgaaagttcatttttaaatgacaaaaaggcccaactaagcagtaatggtttgaggtctgatgcggcagcagatcaaacatttgcttaggcttttagtgttgaaataaatgattggataatcagataacaacaggaaattcagacttcgttataggaaattggccccaggcttattgcctattagagaagataattatttaaatttgaaatgtgatactaatgaagcttaaactagtcgaaaccagatgttcaggaatggcatacaagttacagcaagaaaaactttttttttttgcagattgaggtttttttttggaattttatataaggaaataaattaagacgacaaataaaagtgtggtttctgtatttaaaggaggatttaatgagttgtggcagtttctagccttagtttgggctttcagctttcctaatttattcgtgtttggcctagaatgactatggaatgtttctatggctttcactgtagtcacatcagttaactctgttcagtggcctcagtcaaatctttagctttcagcattaggctctggggctgctaaagagattggcgacgggaggggctccaagtttctcttctcctgatgtaaacagcaaaaagtttggtagaattaatgatgcctaatggaggtgacttgagattttattttggaggcttcaaaaagcaattatgaatgtggcatgcagtgacaagtccctgggcctgcagtttagaccaacctgaatctgtatgctagctttaccacactaactatatgaatcaccatagataatatgttctgtgccattaggcttactaccccaactgtaaaatagaaatattaataatatctcatggggttattgggaaaaatatatgctataacttgacaatgcatgctgtcctggggagagggctgctaatttcagaggaaggggagcagaggaagcttccagaagaaggtgaaagatggaagagagtcaccaatgtgtctaggcttaaggtttagggcaagtgatacccttttgcttattttgaactcaactgttgtattagtttcctagggctgtagtaacagatccctacaaattgggtgacttacaagagaaatttattcttttactcttctggagaccagaaatctgaaatcaaggtgttggcagggttggttttttcttggggtccagagggagaatctgtcccatgctgatctcctagccaactgccagccatccttggcattccttggcttgtggcagcaagacttcattctctgcctttattatcacaagatattcttcctgtatttctttgttttcctatgtcttcacatggccttcttataaggatgccagtctttgggtttagagccaactctaatccagtatgacttcaccttaacttgattacctctgcaaatactctgtttccaaatacaatcacattcagagatactgggagttaggatttcagcatattggcagacacaatttaacccactacaaatgctaactcttatctctgggagctgaagcagatcacttcccagatcgcaggtcatgtggatggcattggaggaatgttggcaggactgatggatgggatctggagggctagtccacagctctaaacactcatcttccctaaaattctcctttctacacagaatttttctgtcaatttccatgaatttgttgtaagaggaaggcatgagaccccagcttagataactgggcctttgaactgggagttgactatgtgactcaattttctctcttgttattccaaacagtgaacatagaggacctagaaattcttgccttcttccgggggcttcagggacctgggctctggtcactttggctcccacagtgagctttcctagcagtatataaaaggggtattgcaaaacactgatatctccaaagcaacagtctaaccagcagggtggcattttccacctgcagtttctgagtattgtgagctcatacctctaacttaatgactgatgtatcttcttccacagatgttgacacatcttgcctttagaatatatccatgttctaatgcagaggccccagcccttggtgggtgaggcacagcggcagtgatgcaaatgtttttgcagctgtttggggatggagaggcaagggtgtgcattacttaattttcctgtttctaaaatagacaataactgtattctgtgtcctaggatataaagaagggaaagaggaagttattgtaaagtaccttgctaatttcaactaataaggtattttgggaaaatgtatgactctgacattggttgacaaataaaatgcattgggccaggacaaaaatagaaaaccttggttggatcactccacttggtcaggaaggtaaactgaatgatgaatcaatggagactgcatgcttccactcatgtttgccatttaggaatacaggcctaatgttgccagatagttctatttttacaaaaaagctgaaaatgcaaacttttgtgtaatgtttcctaattttttaagtgttggcaactaaagcaaattattattattgttttttttttttttcctttgagacagagtctcactctgtggcccaggctgtgggccaggagtgcagtggcacaatctcagctcactgccacctccacctcccgggttcaagcgattctcctgcctcagtctcccaagagctgggattataggcacatgccaccaggcctagctaattttttgtgttcttagtagagatggggtttcaccatgttgcccaggctggtctcaaactcttgacttcagctgatccacctgccttggcctcccaaagtgctgggattacaggcgtgagccaccacacctggccgcaaattattgttttaaatgtgcaggccagacaaagcatgtctgggaattagagatgtggctcaagggcaacagtctgtcatctggttttaatggtaatatagtgccatgtcctcgtgggaccaccttccatctcagtactgattattcaaaccatatcagaactgctgagatgtctcaaactgatcttgttatccaggtcactgtccttcgtattgccccatatggaaaggctgtatggtgaaaagagtatgggtgggnnnnnnnnnnnnnnnnnnnnnnnnnnnnnnnnnnnnnnnnnnctaccatagtcgttcagccattttgtaatactaggggaagttgttgaagtccttgagttccaatcttttcctacgacatacgaggatgacgatgtcttcttcttgaggttgtttcaagggctaagaattattgtgatgtttatgtacatgagtgaggattaccgtttatgtacatgagtgaggattacgtgacaagcacgtggtggtaccgccatctgtcagacagtagaaatggaagttttctttccaattaaagggaatcctgaaatgggaacaagtgattaaggcacaaatcttagttttccccgacttactctaattatttgaaatttcaaacagaaatggaattaatgttttattcaatattgcacatgaagtgtttttttttcttgtaacctttcatttattagacgtgtaatcatgggcaaatcactaaatcacccgattttattatcgagataataaggataataatacattaaaatgagggtaataatacatccttgaaaagggccattgcaaggagacacctaaacactgtaactgacacatagccaatacatggtagacatttgtaggattattcattatattatcctggttttgaatttcatttagttccagaaacctgcaatacattcatccagttatctattatctctctatctacttattgtttattgggataaaactttcctaacataacattaatatttttaaagtgtacaatttagtggcatttagtatattcacaatgttgtgcccccatcagctctatctgttccaaaacattttcatcaccccgaaaggaaaccttgggcccataaaatagtcactctcccgtctctcctcctagcccccggtaccactggtctgctttctgtctctatgaatatttgtctagtctagatattttatgtaatcagaatcataatatatgtgaacttttgtgtctggcttcttttacttagtataaatgttttcaagtttcatccatgttgttgcatgtacttcattccttttatggtcgattgatagtcccttgtatgagtatactgcattttgcttatccatatcagtttttgaatatttgggttgttttcatcttttgactattattaatagttctactatgaacactcatgtacaagttttgtttgaatacctatttttagttcttttgggtagaagtgaaattgccaggtcatatggaattctatatttaacttcctgaggaattgcaaaacggttgccacagtagctgcagaattttatcccaataaaaaattagatagatagataaatggatgaatgtatttcaggtttctagaactaaatgaaattcaaaaccaagataatatcatggatactcctacaaatgtctaccatttattggctatgtgtcagttacagtgcttaggcctttccttgcaatggccctttttgaggatatattattatcctcattttcatgtattattatcttcattatccagataatcaagattatccattttacattcccatcagcaatatataaggatttcaatttctccatatcctcaccaatatttgttatttttattgttattattgccagcctaatgaataaaaaatggtatctcattgtggttttgatttgcattcccctgatgaacaatgatatccataatcttttcatgtgcttattgaccatttgtatatttgctttggggaaatgtttcttgaagtcctttgcccattaaaattttttgttgttgttaagttttaggaattctttttatattctagatataatctcatcggatatatgatttgcaaatattttctctcatgctgtgagttgtcttttcattttcttaatagtgtcctttgaagcacaaaagttaattttgatgaagtccaatttatctgttttcttctttggttgatggtgcttttggtgtcgtagcttaaaaaaaatcaacaaatttcaagtgatgaagatttctccctattttcttttaggaattttgtggttttagctctcatatttaggtctttaatccattttgagttcattttatatatatataattttatacatgagttaattttatatatgaggtaggggtccaaattcattttttttcatgtgaatacccggttatctcagcaccatttgttgaagactgttctttccccattgaatggctttggcacccttgtcaaaaaccaattgacctcagacatatgagtttatttctggactctcaattttatttcattgatctaaatgtttatcattatgccagtatcacactgttgttttgattactgtagctctgtagtattgaagtcctccagctttcttttttaaggttgttttggttattctggatcccttgcaattccatatgagttacaggatcagcttttaccatttctgcaaaaaaaaaaaaaaaaaaaaaaagaacattggaattttgatggcaattgcattgaatctgtagattgctttgggtggtattgccagctcaacagtattaagcttccagtctatgactatgagatagctttccatttatttagatctttgatttctttcaacaatgttatgcagattttggtgtacaagtcttaaacctccttgattaaatttattcttaaagtattttattctttttaatgctattgtagatggaactgtcttctttttctttttcttttttttgagacggagacttgctctgtcgcccaggctggagagcagtggcacaatctcggctcactgcaagctccgcctcctgggttcacgccattctcctgcctcagcctcccgagtagctgggactacaggtgcctgccaccatgcctggctaatttttttgtatgtttagtagagatggggtttcaccgtgttagccaggatggtctcgatctcctgacctcatgatccacccacctcggcctcccaaagtgctgagattacaggcgtgagccaccacgcctggccagaactgttttcttaattttatttttgagttcattgcttttgtacagaaatacaactgttttgtatattgattttgtatcctgctattatgctgaactcatttattagccctaatagttttctaatggatttttaaaggaatttctatatataagatcatgtcatctgtgaatgtagatatttttgcctctttctttccagtatggatgccttttatttttcttaacggcttaattactctagctaaatcttaacttaattgctctagctaagattttcagtacaacattcaatagaagtgtgaaagcagacatccatgtctcgttcctgatattagggggaaagatttcagtcttttaccattaaatataatgttaactgtgggcatttatttattttaaaacctttttgtactccaattttgaaataacagagtgaaactgcacaatgtagaaacccaagacattctcttaaagtccagacattcctagcaagatgactgtttatattttgaaaactgatcattaaatgtccttttaaaacttttatgaaaatatgacatattagagactctctatattactaaaacaggcagcaaaacctgatgttttatctgttacatcttagataattggagttaacttagttatttacctcggaagcaagtattttgaaatgtaccatttttgggaatgtgattggttattttaatatatgctttttgttctaaattacagattggatttgtcctgtatccccccagtggaggtcctgcatgggatctgatggatcatgaaaatattttgtttctcaccatatgcttttgttggcattatgcagtaaccattgtcatcgttggaatgaattatgctttcattacctggtaagttagcgatttctgttaatggaagttctgttccttggtatgtgattatcaagactcagtggtattgaatttaaaattcaaaagggtatttcattccttatcatcccataagacagggtagcatagcagaacattatctgcaaacacaaaaattcccagtaaaaagaataaatgctggtttaaagttagtcactcaacagtgcctcagctgtgcctctgatgctcacatttcccttcatcacactcctctgtgcctccatgtctccacatatgctatttcctcttctctcttctgaatggtttccctcaccctgcactgcctatagtgagtcctccatttacccatgtgtagatacttcaattatagcacttcttaagcttcgagtccttttttgaccaacttgtgtgtgttccattaaatgtaggtgtctgcctaatttgacattgactaatatttctaaaagtcagatccagttgaatacattttttataagaaccccagtataatgttccataggtgggtaaggagcagtagaacagagttataagaacacatatttttagctgcactatttatcagcagtatgactttgggccaattacttaaccacattaagtactagttttgttgtttgtaaaatggggaaataataagacctaaatgagatcaagtatttaagcttaggacataataagagctcaataaatattattgtcttgttgttcttcctcttgttattcttttcctccctctcctcttccttattcctctttggcataaaaaaaatgaatgtgatatgaatcctacccatgaggaatttttagtcttataattaggactaaattagggagatgcacaatgaaaatacagtgcaatatacagaaatagtagaagaacaaagcactcttggagttcaggggaggcctctttacaattgagaatgaagctgcagcttgaaggatgagcaggaatagaaaggggtgatcacagttcctttctctaaggtggttaatgctgaaccacagttggcttggctgatttcaatgaccaggcatgaagactccagcacctaatccttcagacttcagtgctgattgaaatgttctgtatctacaatgtctaatatggtagtcactagctattgagcacttaaaatgtggctcatgccacactaattttattaatttaaatatccatatatgtgtggatagtggctactgtattggacactacacatctagcaggttctctgattcctaaattgcagtagctactgctaggcccagtgaggtcccagctagaacaaactttccacccttctctttagacatggaccccaagtcacccctcctgctctgtgcttctttgtgcctcattgctgaagcagctctggtgctgaggcaccgggtgaagaaatcattcctttgtctagctctcagctatctctgttcagctgcaggtcagcccactttgatctatagttgcttccttctagagttctaggtgctttgggtactaggaaattccaccttctcattctattagccccattcacttcctccaaagcatgtgcatgtgctccttgtcaagactggctctgccattgagtgaaacttggcttctccctgttgttctaggctgacttctgggcctcatctccttaggggctggaaagccttcaagatcagtgccagcatccaaggaaatgctcttcctcatgtcagctcccctccagagccaaaagaagactactgtctcttcctgtttcaaaacgcttcatacccctaatgggcctcttatccacttatagtactctggatactggacactccattttttattttccaaccttcccctctacccccaacacataatatcctaatctttgtgaccatgcagttccctccacctggcatattcacattaaatgcacgtcttttctatgaaaacttctgtggtgactctagctcttgctcatctccctttaagagtttttgttttttttttcaaatacaccacaaaagattttattatgaaaaacatatgggtaaaatgtagcaactatgcggtttacaaaatgttctattattgcataaaactatctttggtctatcaccttctaaaacttcttacactctttcttggtgttaggtcaaatctgcaaatgctttatctgttctccatatcattagagctccatcttccacaaatattttaagatagaccttccctccacaatcattactcccacagtcttaatgtaaccagtgaacatggacagcagccgtccaatatacattcacattatcaaaacatgatggaagctgtagatatgcctaaatgtccacgtgagtacatattttttctagtagagtccttgattcttttttttaattttttttgccaacaagtattgtttactgcacatatataaagatgatttaatattgaaaaatttattaattaaatgcaccctaatgataggtccagtttcttatgattaagaaacaccataaggtgatcttaatagctacttaagaaacattcgatacaatttaaactgatttgtttacctcttagaaaacaagaatgaagtttttgtatgataagcaatattctttttttaaaaattttattattattatactttaagttttagggtacatgtgcacaacatgcaggtttgttacatatgtatacatgtgccatgttggtgtgctgcacccgttaactcatcatttagtgttaggtatatctcctaatgctatccctcccccctatcgacaccccacaacagtccccggtgtgtgatgttccccttcttgtgtccatgtgttctcattgttcaattcccacctatgagtgagaatatgcggtgtttggttttttgttcttgcgatagtttgctgagaatgatggtttccagtttcatccatgtccctacaaaggacatgaactcatcattttttatggctgcatagtattccatggtgtatatgtgccacattttcttaatccaatctatcgttgttggacatttaggttggttccaagtctttgctattgtgaatagtgccacagtaaacatacatgtgcatgtgtctttatagcagcatgatttataatcctttgggtatatacccagtaatgggatggctggatcaaatggtatttctagttctagatccctgaggaatcgccacactgacttccacaatggttgaactagtttacagtcccaccaacagtgtaaaagtgttcctatttctccacaacctctccagcacctgttgtttcctgactttttaatgattgccattgtaactggtgtgagatggtatctcattgtggttttgatttgcatttctctgatggccagtgatggtgagcattttttcatgtgttttttggctacataaatgtcttcttttgagaagtgtctgttcatatccttcgcccactttttgatggggttgtttgtttttttcttgtaaatttgtttgagttcattgtagattctggatactagccctttgtcagatgagtaggttgcgaaaattttctcccattctgtaggttgcctgttcactctcatggtagtttcttttgctgtgcagaagctctttagtttaattagatcccatttgtcaattttgtcttttgttgccattgcttttggtgttttcgacatgaagtccttgcccatgcctatgtcctgaatggtattgcctaggttttcttctagggtttttatggttttaggtctaacatgtaagtctttaatccatcttgaattaatttttgtataaggtgtaaggaagggatccagtttcagctttctacatatggctagccagttttcccagcaccatttattaaatagggaatcctttccccattgcttgtttttctcaggtttgtcaaagatcagatagttgtagatatgtggcattatttctgagggctctgttctgttccattggtctatatctctgttttggtaccagtaccatgctgttttggtgactgtagccttgtagtatagtttgaagtcaggtagcatgatgcctccagctttgttcttttggcttaggattgacttggcgatgcgggctcttttttggttccatatgaactttaaagcagttttttccaattctgtgaagaaagtcattggtagcttgatggggatggcattgaatctataaattaccttgggcagtatggccattttcacgatattgattcttcctacccatgagcatggaatgttcttccatttgtttgtatcctcttttatttccttgagcagtggtttgtagttctccttgaagaggtccttcacatcccttgtaagttggattcctaggtattttattctctttgaagcaattgtgaatgggagttaattcatgatttggctctctgtttgtctgttattggtgtataagaatgcttgcgatttttgtacattgattttgtatcctgagactttgctgaagttgcttatcagcttaaggagcttttgggctgagctgatggggttttctagatatacaatcacgtcatctgcaaacagggacaatttgacctcctgttttcctaattgaataccctttatttccttctcctgcctgattgccctggccagaacttccaacactatgttgaataggagtggtgagagagggcatccctgtcttgtgccagttttcaaagggaatgcttccagtttttgcccattcagtatgatattggctatgggtttcatagatagcttttattattttgagatacgtcccatcaatacctaatttattgagagtttttagcatgaagggttgttgaattttgtcaaaggccttttctgcatctattgagataatcatgtggtttttgtcgttggttctgttatatgctggattacatttattgatttgtgtatgttgaaccagccttgcatcccagggatgaagcccacttgatcatggtggataagctttttgatgtgctgctggattcggtttgccagtattttattgaggatttttgcatccatgttcatcaaggatattggtctaaaattttcttttttggttatgtctctgccagcctttggtatcaggatgatgctggcctcatgaaatgagttagggaggattccctctttttctattgattggaatagtttcagaaggaatggtacaaaaaacctttcaaaaaattaatgaatccaggagctggttttttgaaaacatcaacaaaattgatagactgctagcaagactaataaagaagaaaagagagaagaatcaaatagacgcaataaaaaatgataaaggggatgtcaccaccgatcccacagaaatacaaactaccatcagagagtactataaacacctgtatgcaaataaactagaaaatcctgaagaaatggataaattcctcgacacatacatcctcccaagactaaaccaggaagaagttgaatctctgaatagaccaataacaggctctgaaattgaggcaataatcaatagcttaccaaccaaaaaaagtccaggaccagatggattcacagccgaattctaccagaggtccctccaagaatttttacagcccgtcgtcttcaccatgcattttaacaattgggatctctcctgtgatgttcactattaggtcatgtgggttagtgttatctactggctagattgtgtctccttgagtatgagaccctttccatatttcccacacctcttggcacactgccaaacatatagtagattctcaataaacccttgtttgctgttttaatagataatagatttatgttgcagagctctttaaatataggcttcatttgttttgaaatcatgttttatatacttttcaattttactgtcatattgttcttgaaaagataagaccaagggttaaattttctgatatattttgatataaacttaagcaatagcttaagttagttccacagaagtatttcaaaaacccctctcagagcacaagtaaagccattacatattgatacaggcaggccagactttcatcagaaaaaatatagcagaaaataagggtaaagatgcaggtagactggtgaaatttttcatttgtgaagagtgatattggtgatttggcttatcaaatttgtttgcatattcctatgtatttctgggagttaactatgctttgttgatatggtcacagcacaatgcctttataataatgatgcacaggaaaagctttgcctagttcttatgacactctttctcacatcagagaagtggagagcctgctgagcttcagctgctaatcagtgtcacatcttctagtgtcaaaaattataatccgtgcttcccccaggcctatggattctcttttttttttttttttttttttttttgagatggagacttgctctgtcgcccaggctggagtgcagtggcgtgatctcagctcactgcaacctccaccgcctggactcaggagattctcttgcctcagcctcctgagtagctgggattacaggcatgtgccaccatggccagctaattttgtatttttagtagagacggagttttgccatgttggccagtctggtcttgaactcttgaccacaggcgatctgcccgccttgcctcccacagtgctgggattataggcatgagccaccatgcccagcccagattctcttaaactatgaaaacagtcaccaggatggagggtacttctttgagcttcttaattcatcatggcagaggcatcacatgcagttgaacagcttgttccctgcacaaaagctccccctggaaggggctagtagcaggaagtaggggctgaatttagcccagacttgacgtgggccttgacttgggctgccaaccctagaggcgggcttcatgcacttcctttatatgatatagcacctgtttgcaatacacagttagatgtggcttttatggagaaactcaactgagcttggtttcatctgggcttgccacagcccagcgattctcttaattgttttagaaatgatcaaagttggctgggcacggtggctcatgcctataatcggagcactttgggaggctgaggcggtcagatcacttgagttcaggagttcgagaccatcctgaccaacatggagaaaccccttgtctactaaaaatataaaaaaaattggctgggcacagtggctcatgcctgtaatcccagcactttgggaggccgaggcaggtggatcacgaggtcaggagttcaagatcagcctggccaagatggtgaaaccccatctctattaaaaatacaaaaaaattagctgggcgtggtggtgggcgtctgtaattccagctactcaggaggctgaggcagagaattgcttgaacccgggaagcagaggttgcagtgagctgagattgtgccactgcactccagcctccagcctggatgacacagcaaaactccgtttaaaaaaaaataataattagctgggtgtgatgatacatgcctctaattccagctactcaggaggctgaggcaggaggattgcttgaacctgggaggtggaggttgcagtgagccaagattgcgccactgcactccagcctgggtgacagagcaagactctgtctcataaaaaaaaatagaaaagaaaagaaaaagaaaaagaaaaagaaatgagcaaagttatcttctgaggcctaattaaacaatgatgcaatacattggaaaaccacgttgtatctgtttacttataccctgctttaatccacaaaaattttcaggcagctccaaagccaaataaaagtaattttcctttttgggttgccttccccagttgcccaaataatctagactttgtggtataatgggtgcatattgctctgggtttctattttaaaaaccgtctaacttgagatgcttttctttctcctcaggttggttaaatctagacttaagaggctctgctcctcagaagttggacttctgaaaaatgctgaacgagaacaagaatcagaagaagaaatgtgactttgatgagcttccagtttttctagataaaccttttcttttttacattgttcttggttttgtttctcgatcttttgtttggagaacagctggctaaggatgactctaagtgtactgtttgcatttccaatttggttaaagtatttgaatttaaatattttctttttagctttgaaaatattttgggtgatactttcattttgcacatcatgcacatcatggtattcaggggctagagtgatttttttccagattatctaaagttggatgcccacactatgaaagaaatatttgttttatttgccttatagatatgctcaaggttactgggcttgctactatttgtaactccttgaccatggaattatacttgtttatcttgttgctgcaatgagaaataaatgaatgtatgtattttggtgcagacacctgaaatctttgtttttgttatttagctacactcctcctttttatcatgcagaagaagctgcaggacacagaaattcttttttgtgagacatctctatagtacctgagttctccacagggaatagtaggccagaagtcttcctagggtgtgtgatctttcagagaagataaaagggatgatccttaggacacatggttgcaaagccacgagagactgggaaaggagaactggggtgttgtccataagagtaaaaagtcatcacacaccatagcatggccaccacagcatcccctctgttacagtaagtgaaaggttaaaaccaggaaaagccttttatggaatgcttgggtaaaaagtcagaactcttacctagtctgtgccctaagtagccccccagtggagagtcaagaaatcttgtttctgattctggctctaccattaaccagctttaggtctctggcaatcaccatgtccttctctctaaagtaaggaattgaattgaatgaaccatggggctcttctggttgtcacattttaagaatctagaaatggaagcatatggaaagctattaggttggtgcaaaagtagttgtggttattgccattgcaaagcaatgtcttttcttcaatgtcaacctaataatttagtacaatgttagtcacaaagaccagtattttctatgagagaaaaggaaggaggattgcacgaatccttgagggatgacccaaacctggaggaaaggaggcagccctgtgcacagctagagctgaaatgtggtcaactaagtcctgaaggctccctagctttccagaagcactggcaagtctagaaggctgcctagtctcatatgtgtcacagtgacattgaagagtcaggtgagtagattcttcaggccccagaactggacacattcattttgtcacataagtttgaaaagagcaggtgtgagtgcctaaaggtttatcttgaataatgccatgaaccttaggacgtttctggcatatgaaaatgcccacatgccacagtccttgggggtcatggcattctgtcccatatatgtcttatctctcggggctgtttgctagacccacaaaattctatgattttgacaagtttgggtttcaaaggagtgagtgagtgagcgatcagcagcagttacatgaagctggcatcactggtatataggcctgagcagaaacactgggaataattagcatgaaccagattaagcctggaattttgaaaactgataagtgcaaatagtctacagtctttgtgagagagcagaaatttccactcctctagtctgcacacagattacaagtaaaatcaactcagcaagttctcaaaggaggaatatttggttcaggtctaagtctaaactccagggctatctgcctctagttcctgaaatgagcaatacattggaacactatcatgacaactttatggttacattattgggtttgtaatttgtgactaacatttttatggaatgatgtgaaaaattaacaaactgtgaacttgagccaaaaatgagacagtcatattttcttgtgctaggaaatcttagatcaataagtacaatttttaaaggttttgatttataaaaaagtatgtttcagtaaatgttctgaaaccatgaaaaatattttataataaaaatataaaaagttttcaactctagatcatgggatgagaaaaattagtttcaggctatacttaacccgtgtgtaccaatggaatcaatcatccaatgaatgtttattaagcagttaccatgtgccaagcagtgttcaataaactaggaatacagtggtattctacagcagtacttaagccaaagtcccagtcttcatcaagcttacattcccatggaacatacagtcaataacaaagtcaacaaataagttctacagtttgaggcaataataagttatatgaagaaaaataaagctgggaaggagtataaagaatggtggggtgctgctatggtttacatacgatttgtttgtccccttcaagtctcatgttgaaatttggtcatcaatgtttgaggtggggcctagtgggaggggtttaggtcataagggtggatccctcatgaacggcatggtgccatcctcattagtttgcactctatcagttccccagagagttttcctgaaagctggtgttgaaaagggccaggcacctcccttccctctcttgcttcctttctcaccatgtgatctctgcacacgccagccccccttccccttccgctgtgagtggaagcagcttgagcccctcaccagaagctgatgctggtgccatgcttcttatacagcctgctgaacagtgagccaaataaacctcttttattataaattacccagccgcatgtattcctttattgcaacgcaacaggctaagacaggtgggggaaagcaccaccttcctgagagtggtcctttcctagaggtgctccactaaccacccgagggaaaatagcccctgaacttctgcccatccctctctatcattatcaggcattatagtgtttatatatttccagagcctttagctctgaaaggaaaaccttatcaaagaagggatggggatggaggtttactcccttactttatatttgtattttgtctccattcttccaaaaacctaggatctcaattcctgagcttttgccaaactttgagtatcctatgcttcatttgtcataaccaaagtggagaaaacctttacataaatcaatgtttgatttctagtgcaggtgttaatgtaggaaagactcaaggacattttataaagcagacagaaccctgtggatggaaagcctctgtggctgtataataggaaagtgaagggtggggacagattattaagcaatatcaactttggctgttgatgtgataccaactccttagtgatttctgtaattctccaatctcctttgcttgggaatctgcaacctctgattgcactaacttccagctcattgttgaaatgggaggcttggttatggtacactcctcatcgtttcgtttctagagaatctcattaatcaaggttgattaattgtatcttggttgtggattgataaggtgcagcaagagtcaatggatgctatgggaacaataaaaataaaagctgagaactgggaaattctcccaaaatacaagcaaatgatagattaaaagtatgaaagaaaagttaatacacctgaagaatatatccagaaattctatattctgtttcatatgcattccaggtagagaaaattgagagaatagaggataggcatgaaataatataagagaatatcccttaatggcaaggaagagagatttttgctttaagcttggaagggtgtttcgagagatttgcagtggatagtgtggatttctggtaataaaaatttaaaagcttaattatgtcttatacttttaaattcaatttgtgaatattgttattctaagtctagcaaattttaacactcatttttaaggagtctttaatgtttgaatataatcttaaataattagatttccctttaagcatttcatattattttttttgtgggagactggagttttattattactcgtatcagtctccccgagtattcagggatcagagtttttaaggacaacttggtgggcgaggagaagccaccaaggagtgctgattggtcaggtcagaggtgaaatcatagggagttgaagctgtcttcttgcactgagtcagttcccagattgggatcagatgagccagtatatcaatgtgggtggtgccagctgatccatcaactgcagggtctgcaaaatatctcaagcactggtcttaggctttacaatagtgatttttacccccaggagcaatttggggagggtcagaattttgtagcctctagctacatgactcctaaaacataatttctaattttgtggctaatttcttagtcctataaaagcagtctagtccccaggcaagaagggggtttgttttgggaaagggctgttatcatctttgtttcaacctataaactacaagttcctcccaaagttagtcgggcctgcagccaggaatgaacagcttgcaggttagaagcaacttggagttggttatgtcagatctctttcactgtctcagttataattttgcaatggcaatttcaatcccaaaaaaccctttgggttttataacacctcatcttaaggtgttggctaatgaagatagaaaaagggcaaagaccattgtaacttcttcctgttgaccaggggcgtgtgggggtaggtgttgaccccaaggtgaaaggagtggaaccactttgcaactgtcaaagcatactcatgcagtcctggctgagattccaaggcttgcatgatagaggcattagtattgtcaactatagttttagtaccacatttaaggaaacagcatactataaggtaaataatgagtaccagaacaaggaatgcaattcccagttttaaaagtaaagatttgaaagcattagtttgggaacttgtagcctgccaagaatttagaatttaggccaaactgctggaaaaactcaagtacagctaacaacaggtatactataattttttgaaacatactttttctctctccagtccctgtttttattaaaaacaaatcatgggcaaggcggggtgactcatgcctgtaatcctagcactttgggaggccgaggtgggcagatcaccttaggtcaggaattcgagaccaccctggccaacatggcgaaacctcatctctactgaaaatacaaaaattagccgggcatggcggcacgcacctgtaatcccagctacttggcaggctgaggcaggagaatcgcttgaacccgggaggtggaggttgcagtgagccgagatcacgtgactgcactctagcctgggtgacagagtgagactccatctcaaataaaaccaaaaaccaaaaaacacacaaaaacaaatcatgataggacagatgtgtttacaaaataaactttagtcttattatacttgacctgattatttgcataaagtgcagcaagaatacttattttccacataggcttttaaagttggctttgatggaactctgttccataaggactctcagagaagacttttttaaagctgagcctagccatgggtttgtactctcaaatacttagaagttgggtaaattcctctcctcttgagataccaagataactcggggtttttgagcctgttagaaagtgacattctttacttaccacaggtcaggaaccctgtacagggactgcacagacagggtatgaggccagttttcccaaggggtaggtattggctctacaagtcagatttgattcnnnnnnnnnnnnnnnnnnnnnnnnnnnnnnnnnnnnnnnnnnnnnnnnnnnnnnnnnnnnnnnnnnnnnnnnnnnnnnnnnnnnnnnnnnnnnnnnnnnnnnnnnnnnnnnnnnnnnnnnnnnnnnnnnnnnnnnnnnnnnnnnnnnnnnnnnnnnnnnnnnnnnnnnnnnnnnnnnnnnnnnnnnnnnnnnnnnnnnnnnnnnnnnnnnnnnnnnnnnnnnnnnnnnnnnnnnnnnnnnnnnnnnnnnnnnnnnnnnnnnnnnnnnnnnnnnnnnnnnnnnnnnnnnnnnnnnnnnnnnnnnnnnnnnnnnnnnnnnnnnnnnnnnnnnnnnnnnnnnnnnnnnnnnnnnnnnnnnnnnnnnnnnnnnnnnnnnnntattcatgaacatttcagcactccatgagagttctgaaagttttgctctatcctaatgtcacaatctccaaagttatcagcaaacctgcatttaagaacacctgttagagttgtatagctgattataaaatcaccatttaaagaggaacagaccaaaataataattgtctatagatgacaaaaagtgttagggcagccacagtcaaagacacaattgacaaggaaatgtgttacctctgtagcacacaataatttcacataacgcaacacttataattattactgataccatagactgagttatatcagaattataggagtttcacataattttggaacatataccaataacacatttacataaacatagcccaaagaaagccaaacaccatttcttatttggcaatgcttactgtattatttttataccaaataagccaaatatatcacttttggactttagaggacataatatctaaaagattaattatgtcagaaaaagatatattttataatttggttttggaaagtttgtcaaatatcaaaggtttgaaacactggatatgacaaaatagaatcccaggtcactgtaagtcattcattagctaaaatggtaactccaaaatttttaaaaataaaaacctttactctgataggagatttagctttccaaacaacaagatccaatgaagacaggatgaagccaactgaatctgtttgtcctctctcccctcccttttttttggagtttactcaaaaggcaaacaaaaatctttcatttcctctcaatactacataaaaatttttcaaaagaggaaaccaaatttcatgtttgcattagtgcatctttaatgcttaagctaggttttaataaaattttataaatctatccagttttaattagtttgaccataaagtaagatttgcataagctttttagagccctttataattttctgttaaacagcagattaattttctaaacaaactctgctatttagacacatgggcccagccctgcattagtgtacttctactttaacattcaatctacagaaaaaagttaaataatccccttcaaatcctagccaacttgctcatgcccacagaactttctgcaaaagatcaagccttcataaacccttttcaacttgcttaaaccttcagttttgtcccattactcttatagtttaagacaatctttaaaaccctctgaactagacaaaattacattccctttaacaaaaaccatattcccatgtcttctttcatcttttaccaaaaacacattctactttccttacgtaccttgtatataaaactgtttctccagtagtctcaactatgttaactcttaggaacttttattttttacgagaaacctgataagcaagcggttttaattatgtactaaatgtggagcctaggacatcagacagaagtgcagacaaggcctgactccttccagcatagctaggggggcatggctaatttcacatgtccccaggccttatctagagtctctaatggctccaaagtaggtaagtcgaacaattttcaaaagtcaaagaagcagtttatgaacttaaagcatttagcaaacctgatatctgacctaatttagatcaaatgtctaaattttgaagacatgtttattttaccaaaaataattaaaactgtctttatttctgaaagattaccaaagtcacatgaagaagaaggcattaaaaagtttctatttttctgacaaaatatttgatttaagtgcttatttttctaagccaattagtcagaactcttttatctaaacatcacacaccctacacatataaatacacagacagaagatccagtagttgtaagatttttcatttgccagtttcttagttggattactagcttcagggtggagcccttggaggaacaggccaggaaagcacacagcttttagggcctaataagtaggcacagatggaaggaaaaatataacccccaaattaagggtgccatttttatgctgcatcctggatccccccaaaagagggaaatactacaggagaagacagtgcaatgcttctactgtgcatttcattgcaaagcaacccaaagccaatcagcccatcccccatgggaatcttatctcttagtggagggtggagatattttcataccttccaggtagccaagagcatgcttctctaatccaaacatcaaagagtcaagcatgccttctaactgctattagccatccctttaagtatatttcctacctggttattacacaccaaggctaaaagctgtcccataatgcaatgtaatttttgacaccccccccccccccaaaaatagaaaatgttaggcaacgtagtgtaaaacagaacagagccttagatttttgagaagggtttattctctttcaattcctggggttccatgaggaaaacagaagtttttcctagaatggagtctgtggcacctcctctgtttttccccaagagtcctaggctgttagaatttatcttaggttctctcatgtgggcatcaagagtggtaagaagacaaaatggagaaaaacaattcagtcagctgtgaagaaaaataagatccaagaagagaaaaaatcataaaggtcttttaaatatatttatagcttggatatccacttttaatgagctgatcttaaccacagagctctgtattagttcattttcctgctgctgataaagacataccagagattgggcaatttacaaaagaaagaggtttaacggacttacagttccatatggttggggaggcctcacaatcatggcagaaggcaaggaggagcaagtcacgtcttacatggatggcggcaggcaaagaaagaatgagagagaagcaaaagcggaaacctcttataaaaccatcagatctcgtgagacttattcactaccacaagtatggaattcaagatgagatttgggtggggacacagccaaaccatatcaagctctttaaaaaaattttttaaaaaatctcctatgcaaccataggcaaaatcttcttacttttgcaaaatgctgcccaatgagctgcatgagaaactgaattaacattttccatcccagctgaagcaaaatacacatagcaaaacagacactaatcacctcgttcagcactcagtatccacctggcaaggctgaaactttctcccattggtccctgttgtctttgattcattccaggtggagagggcctctgactggtaattcaatgggtggtctctgggcaagacaaagagcggacagtctccccaagtcaggcctgttgaactttcttcagggctcactaaatgtgaccagactttccaagttaggcctgctgaactttcatcagcaattccttcagagatcccatccatacatacaaacacacacacaacaaagacaagacagagagaaggtcttccaaaccaagatccctaaccaagaattccaggagtatccctttgaaactatcctcctattctccatctgagaaatctccccgaaatcttcctgattgagaagtctcctgaaccaagactcttcctaagaattagggagagccaactgagacccctcagaagctgagagaagacagacaccccacaatggggctacagacaaaccaggacccctgaaggagcggaaccgagacagacaccccacaagggtcctagagacagacaccccactatggggctacagaaaaactgaaacccctgaaggagccaaaccaactgggagaaggaaagaggtgttggcagcacctaggatatttaccaatccagacaccctgtaatggggctacagctatagatactccatgacatgactgagctacagacagacaccctataatagggctacagttacacacaccccaccatggagctacaggcagacaccctgtgatagagctacagttataggatgttttcccaggactctttctctattgcaattaaatccacgcacattgggtcagcagcacccctccagtagagacagtaccagagtcagcccccagtccaagagaactaggaggcctcaggatccattgcaggaggcagactactgaaccatgggtaagttgccacaagggcaatgctggactagcccccaaatttgtaactactcaatgggttcaccttgcctgctgcctagacagagctgatttatcaagacagggtaattgtaatagagaaagagtaattcacgcagagccggctatgcagg

SEQ ID NO: 147 - DNA, 1611 bp, Homo sapiens
gccgccgaggcccgtgccccgcggggggaacagatgaagcacatctggacagctgtgcggcctcctcgcgggccgacgtcagccgagcacgtcccccacgtcctctccttctcgccacttattatttattcgttttcccaaagaagcgactagggacccaagtttaaaaattcctccccccacccaatgcgagacgtggccagatcccatccaacacacggtttaattttcatggggctctgggatcaaaagaacagaaacagcaacaacaaaagcccagccgctgtctgattttaagctggcaaagtgggaaaaataaagtgttgagtaaacagaccaagttggatcatggggaatttcagaggtcatgccctccctggaaccttcttttttattattggtctttggtggtgtacaaagagtattctgaagtatatctgcaaaaagcaaaagcgaacctgctatcttggttccaaaacattattctatcgattggaaattttggagggaattacaatagttggcatggctttaactggcatggctggggagcagtttattcctggagggccccatctgatgttatatgactataaacaaggtcactggaatcaactcctgggctggcatcatttcaccatgtatttcttctttgggctgttgggtgtggcagatatcttatgtttcaccatcagttcacttcctgtgtccttaaccaagttaatgttgtcaaatgccttatttgtggaggcctttatcttctacaaccacactcatggccgggaaatgctggacatctttgtgcaccagctgctggttttggtcgtctttctgacaggcctcgttgccttcctagagttccttgttcggaacaatgtacttctggagctattgcggtcaagtctcattctgcttcaggggagctggttctttcagattggatttgtcctgtatccccccagtggaggtcctgcatgggatctgatggatcatgaaaatattttgtttctcaccatatgcttttgttggcattatgcagtaaccattgtcatcgttggaatgaattatgctttcattacctggttggttaaatctagacttaagaggctctgctcctcagaagttggacttctgaaaaatgctgaacgagaacaagaatcagaagaagaaatgtgactttgatgagcttccagtttttctagataaaccttttcttttttacattgttcttggttttgtttctcgatcttttgtttggagaacagctggctaaggatgactctaagtgtactgtttgcatttccaatttggttaaagtatttgaatttaaatattttctttttagctttgaaaatattttgggtgatactttcattttgcacatcatgcacatcatggtattcaggggctagagtgatttttttccagattatctaaagttggatgcccacactatgaaagaaatatttgttttatttgccttatagatatgctcaaggttactgggcttgctactatttgtaactccttgaccatggaattatacttgtttatcttgttgctgcaatgagaaataaatgaatgtatgtattttggtgcagacacctgaaa

SEQ ID NO: 148 - protein, 273 aa, Homo sapiens
MGNFRGHALPGTFFFIIGLWWCTKSILKYICKKQKRTCYLGSKTLFYRLEIGITIVGMALTGMAGEQFIPGGPHLMLYDYKQGHWNQLLGWHHFTMYFFFGLLGVADILCFTISSLPVSLTKLMLSNALFVEAFIFYNHTHGREMLDIFVHQLLVLVVFLTGLVAFLEFLVRNNVLLELLRSSLILLQGSWFFQIGFVLYPPSGGPAWDLMDHENILFLTICFCWHYAVTIVIVGMNYAFITWLVKSRLKRLCSSEVGLLKNAEREQESEEEM

SEQ ID NO: 149 - DNA, 1687 bp, Homo sapiens
gccgccgaggcccgtgccccgcggggggaacagatgaagcacatctggacagctgtgcggcctcctcgcgggccgacgtcagccgagcacgtcccccacgtcctctccttctcgccacttattatttattcgttttcccaaagaagcgactagggacccaagtttaaaaattcctccccccacccaatgcgagacgtggccagatcccatccaacacacggtttaattttcatggggctctgggatcaaaagaacagaaacagcaacaacaaaagcccagccgctgtctgattttaagctggcaaagtgggaaaaataaagtgttgagtaaacagaccaagttggttctaacgtgcctgatctactgagaccaaggatgaccaatgactcagaagggaaaatgggatttaaacacccaaagatcatggggaatttcagaggtcatgccctccctggaaccttcttttttattattggtctttggtggtgtacaaagagtattctgaagtatatctgcaaaaagcaaaagcgaacctgctatcttggttccaaaacattattctatcgattggaaattttggagggaattacaatagttggcatggctttaactggcatggctggggagcagtttattcctggagggccccatctgatgttatatgactataaacaaggtcactggaatcaactcctgggctggcatcatttcaccatgtatttcttctttgggctgttgggtgtggcagatatcttatgtttcaccatcagttcacttcctgtgtccttaaccaagttaatgttgtcaaatgccttatttgtggaggcctttatcttctacaaccacactcatggccgggaaatgctggacatctttgtgcaccagctgctggttttggtcgtctttctgacaggcctcgttgccttcctagagttccttgttcggaacaatgtacttctggagctattgcggtcaagtctcattctgcttcaggggagctggttctttcagattggatttgtcctgtatccccccagtggaggtcctgcatgggatctgatggatcatgaaaatattttgtttctcaccatatgcttttgttggcattatgcagtaaccattgtcatcgttggaatgaattatgctttcattacctggttggttaaatctagacttaagaggctctgctcctcagaagttggacttctgaaaaatgctgaacgagaacaagaatcagaagaagaaatgtgactttgatgagcttccagtttttctagataaaccttttcttttttacattgttcttggttttgtttctcgatcttttgtttggagaacagctggctaaggatgactctaagtgtactgtttgcatttccaatttggttaaagtatttgaatttaaatattttctttttagctttgaaaatattttgggtgatactttcattttgcacatcatgcacatcatggtattcaggggctagagtgatttttttccagattatctaaagttggatgcccacactatgaaagaaatatttgttttatttgccttatagatatgctcaaggttactgggcttgctactatttgtaactccttgaccatggaattatacttgtttatcttgttgctgcaatgagaaataaatgaatgtatgtattttggtgcagacacctgaaa

SEQ ID NO: 150 - protein, 289 aa, Homo sapiens
MTNDSEGKMGFKHPKIMGNFRGHALPGTFFFIIGLWWCTKSILKYICKKQKRTCYLGSKTLFYRLEIGITIVGMALTGMAGEQFIPGGPHLMLYDYKQGHWNQLLGWHHFTMYFFFGLLGVADILCFTISSLPVSLTKLMLSNALFVEAFIFYNHTHGREMLDIFVHQLLVLVVFLTGLVAFLEFLVRNNVLLELLRSSLILLQGSWFFQIGFVLYPPSGGPAWDLMDHENILFLTICFCWHYAVTIVIVGMNYAFITWLVKSRLKRLCSSEVGLLKNAEREQESEEEM

SEQ ID NO: 151 - DNA, 26635 bp, Mus musculus
  misc_feature (1)...(26635): n = A, C, G or T/U
gtctgcgctgcggcgccggcggaaacaatagtgcggatcggatcgtggcgcgcggacggtggcccgcggagccggacggtagaggtccttctctgagccgctctggtgctcaggaccagtgccgggacggacggacagacgagacggatcccacgccgtgccggacgcccacgatcctcgagtggcgtccccgggaccctccggtccgtggctgaagagtctccgacgtgagccgatccttcccgggtgtccccgtccccacgtgcgtcttgccgcggcggagccggggagccgggtaaccgagttagcgggacgcctccaggcgctcacccagaagttggcaaagccgcgtcccagcggctccttctggccacagcgaccgacccgaagttggttgacaggccgggtgtctgccggcgcgacccgggaggcgggtgtctcctgtggacagcccttttgctttttcgcagtaaaactgtgatactgtaactccaggtatggcgatgcttgcctgacagggctgttgcaaacgcctcctttttcggtttttgggggtttttttggtcggttactgcaggccataagcaagtttttgccgttgtgtaacttgctcctttctctttcctcataggggcactatgaacgaagaggagcagtttgtaagcattgacttgaatgatgacaacatttgcagtgtttgtaaactgggaacagacaaagacacactctccttctgccacatttgcttcgagctaaatctcgagggtaaggattctgcggttttaactgcgtgccgcgtactactttgtgcaacttaggctgagatgtttggaggtaacactgcaactgcttgaaagcctagagattgtcctaagtgaagatctgctaagggtttctggaaatgaagccagagttaacaatagttatgagtcgagggaaatgtttgtctttataacagaatgttaagctccttttaactaatatgaaatgaagtgcaggtattgtctgataaacatttaagaatcaacatgaccgtacacgtgggcagatataattttactcctttctgccaaacttagtctctatttttcccatcatgtggtgaattttaactaacttttatttttttaagttgtttatatcagattttaaataacttcctttaatattaataatctttttaaaaaaggacttttcaattctttcgatgccagtaccattgtgagaatgtgtaaaagaaacgcttgagaaattaaaccttttgctgaaggttgtgttgggtacacagataactgggtactagatgtttccaggaaacatgggctgtgagctttctatttgcactgtcacagtgaaaccccaagtcttttggggtatctatgagtcacactgaagaagaatcttaaaatttcccccaaaataaaaatttgtgtataacttgaattttgaggttctaatgtgtctgtcagtagagaaagatcttactagatactaaatattttgaaatacctagatgcttaagggcttggtttcaaaacaacatttcattttgtctttaaagactttcatgatttttttttttttgtcttattaagagggacaatgtatccttattgctaagcacactcctgtactgagatcatagactttgccattcctgttaggacttgttactcagaaatgttgtagcttccaaatggtgtctgtcttggcgcatcatggagtttctgtgggctaagtagtatgcttgttactctggctttagtaaattgtagtgattacacctagttttaaaagcgtgacttagaaatgacgattttttttatgtgtgtgtggagtttatatttatgttctctgtgccccagtgagagggcacacttctgctctttggaaacagttttttttcctgtgtgttctcacacctcctggaagtttacattttagaagggcagagacatcagacaggatcaacttgcaatctctgtgttgtctggaagaaactgaggcctggtgggtgggtgggctgctccaggttgctggagtggcgtcagcaagctgttcttctgtgccaggcaaatgtttgctgggagcacatctgtgccaagcctggccctaagcgtcttactggattatcttcattcaaaatagctctgggatgcctgctatgattacttgtttgaatgtgatggaatggaacatgagagacctaaggagtgcagtttgaaggcacatcgctagtaattggtagtcccaggcttcgaagcccggccatctagttcttgtggctgtgacctcagtcccactcatctactgtcaataggtagtgaactgtgggatagatgctggaaatccttcctcccgaatcctaattggtttttgattcagccagctttccctaattggtgcttcctgatacgtaaatcatcatgccatataacactttactgcagagacctcagttttcataattgctttcctggcccttctgaagctgccttttaactaactgtgagcattgtagctcttgatgtgtaaacatgaccccggtgctatgttttttgaaataatacttgtctattagtctaaaagacaaaagaaaaacggttctcaatccggattagaactgttttatcctctgtgttaaaggtgaagttcaaaaaccgcctcggtttgtcttgattgtcagttccttgtgctcacaaatggatttccattgttactgcgctgatgagctatttgttatgcacatttgtttagtttaatattgtcctactgctgtgggaagatcaagaaagatttccaccaaagtcagtttttatagcagtacccacccaagtcgtgtttttaaaaaaaatcagtggagggctggcaagatggcaggatgcagggaaagacactcgatgcccagcttcaggagctgagtttaattcctggatctcacagggtggaagggaagagccaggtccctcaagtcaccctctgacctccgtgtgtgagttgtggcactcaccacacacaccacacacacaccacacacacacacaacacacaacacacaccacacacaacacacaccacacacacacatttcacacgtttttaaaaccagtgggaaaaggtgaagacggggtatattcttcacctttgtcagtgacttgagttattgtagtctcctttctataactgggatgtaagagggacctttgaaggggacatttacaggtttagtatagttttgtctggattgtggtgatgttgctgttaactaagagactttacattttcctctcaaacattttttttttctgcaaagagcccacgtgaaatgcagtgtctggaggaccaccacagctgggctaggttttagttcacacatttgaaataaaacgccattatatacacttcagagtgtttacatgaaacagcactagcctcctaataatgagcctcttgttgaagagccatgtgctcgtgtgtacttctgcaacaaagacaaaggatgaaaggggattggcctcacacaggctgctcttactggagggactctgtattctaggcatggctctgagttgtctttttgctgtggtttcacactatttagaaggagggtgggtagtgactaactttcatgttcccaaagcgtggtcctgttcttcaaaaacctaaaaatgtctttcaagggacattagctgctcccaggggtaactttcgagcccataactcaccttcaggataatctatgcacttgggagctaaggagatgggcgcacaagcagagggctaggctcggatctagtcctaaggcactctaagatttggcatagtgttagtgatcaagtacacggagaggcatctagtttgttgcagtagcttctctaacctacgtaataaccaaattgcttctagtccctaaacagaagccaggtcttaggggcctgcaatgaaaaaaccgtaatgtacagaaggcagtaacagtccagggagtggatccccgaaggcaggagctactctgcttcccagataagtaacgtaagctttcttacagtgatagatacaactgtagataactaaaccagttcggtttccatctaagctggctttgctagctgacaagcaagcatgtgtctggcttctctgcgtagtctttcatctgttctccctaatctcttgttctttcaggaaaactgaagtaaattaggttcctgaatctttctaacaggaaaaaaaaaatctgtattttctccaagtaaatcatagatgagcccagtgtctgccttaactattcatccatcctgggtttcttaccataactttgttcatcactcgttggtatgacatccttgcttccacctgaaagccagaagtggttgtttagtgttgaaagtcttctgttcttcctccatgccctgctgtaaatgccagcgcctttctgctcaagcagacagatccactgcttgaggccaggaagcaacaaacttcatctgaccacagcctcttcctcttggtcccatcccatagaggcaacaccacgtattaaggttaactaaaaacagggtccggcgagatggctcaggtgttaagagtacgtgctgtttgctggtttagttatctaccgggtgttcactctaggaagaaagttgaagttatccaactggaaagccagggagtgcagagttttggtggcctgtacccacaagatggctcacaaccatctcacactctaattctagaggacccgatgccacgttttggcttctgtgggcaccaggcacatacagtgcacatacatacttgcaagcaaaaacccatgcacttaaaataaatagatgtttacaagataaacttaaaatgccatttttagttcatctaaccgtaaagcccattgctgttcctatattttctgtgatctgtctcttaactgctggggtgtttgtttgtttgtttgttttaatccccgaataaattgcctcaaaagtagctgatggtctcagcagctgaccatctccgaagagatacacagggagaggggagtcattagtctctcctgaacagaggcagaaagaatccagggaatcgtcccaagcttaaaatataccagcaaattactttggtttaatttcatttgttcttacccagtaataaatttctggggcactcctccttgggagttggattaattacggtgttttatggactgagctaggacaaagaaaaaaattgaaaatccttacagctttttgacaagaccccctttaagtatggctacgtgctggccttcacaatgcaatcattgttcaaggagctttgattgaagcatttcagccccaaggctgatgattgatctgagcactaatcgatctcaaccaaaatggaaacggttttgccttcaatatgatgaaacctttaatattgggggggaaagtatttgtataacccatcttattagttgcctccttaatacacactgtacctttacattgtaaaacatcagtcttacatggagcagcaactcttaaacgtaatgaacgtaatgtcaggaaatcgcttggtggcactcaggcaaggctccctttccacacaggagacactgttgacacaaccctttctcttctattggagaataagtaaataatggtaggggtaacctcagcctccctcccaggcttgtgacacaagcctgaaattggaaactatgtgttcagcaaagcaaaacagagagaaacaaaagcttgggtctttctgcccaaggagtagcgctatcaaccccagacttctaactcagcttctgtttggggcacgtgtttctacacgttgggttacacaggtgggcaggtacaggctaagggttgaggccaggggctttcctcagtcactctctaccttatttttggaaacagggcctttcactgaatgtcagtttccctgaagctagtctcacgtggagctcatggacaagccgcactgactggccaatgagacatggggtcctcgtgtctaacctctccagctctgggtctgagggccgtgccacgaagcctagcttttgcgatagggttcaaacatttctcatgcttgcacggcaagcactttactgacagagccatgtccctccccccaccacttgtttttatacgacaaatacccacggtccataatagttcactttcctgttacataggtccaaaccaaatcctgacgacgatgaaaccatcatgaccaagcaacatttgtgggtaatccagactttaaaacttaacctagactttcaaactgagactagaaagtcaaggagaaaagtttacgtaatgaaaataggtccactgtaagtaggtcaggggtaagaatgtgaacctagctccgcccatgtggggttcagttcagacaagcctttatcgtgcgcccttctgattacagctgcttttcttgggaaacatcctttgatttcagctcactttccactctcatctctaatgaggttcagctaacaaaaccattgcaaaagtacacagggatacacagtcctgagccgggccaacagacaggaatccccattgccgtgagactgagcccatctgaagtaagcactccgttacttacttatggagaggttcaccctcctctgcataggcaacaggaaatgagtaacacttcctctcactcagtgataaactgcagcaagaaaaagaaaagaagaaaaatgtggaaattggaaacccttaacattatgaactgatctcaagtgaaatctagcagttgttatagcaaacatagatttctcccatcttggccaagcagaaataattgtatcctcatctgtgtgtgacaaaatgaagggacccaagtggagttgtcctccagtctcttagaaagtaaaagacacactggagctcagacccaggtagggctccgtggccagccgctgatacagccgcagccaccgggtaaaggacgcttctttgactttcttctgcttgcgttgctttaactgtagatcacacactcagatagtggcaccctaaggccgtgaatggcaccttcactatggcagtgacattctctctataattagtgccaccttccctgtaatggagatatcctttctgagatagtgactggcactccttacagagagtccctcctcatcgggttttcccattgtctatagttggtccttcaggctgcttcccactgtgttgcatttgttttgttggataaaactatattggcgcattttttgccctagcccgcctagcctcacccctggtcttttgtgaccttgtacctgctaatatctagcagattgtcttctatttctctcccctcaaatcatctacatttgcagctaattttaaacatcttcacttgtataatttgtgagcacctgagactgcgaatctgaaggtaaattattctatgccgtatgtcatttttggactggaatccttcctcctgtctgctgttggagatgaagcatgggagatggtacagacttatacacctcatggaatgatgcaggagggttaccgccacaaaaggactatgcagtcaaagtcctttaaaaggttacatttctggtctgggctttgtggcttgcgcagataatttccatacacagaagtctgaggcaggaagattgtggtgtgtttgagactgagtttaagaggtggcgcacgcctttaatcccagcacttgggaggcagaggcaggcggatttctgagttcgaggccagcctggtttacaaagttgagttccaggacagccagggctataccctatctcgaaaaaccaaaaaaagacacagttccataccctgtctcacagaaacaaaaaagctccctcagatgagcagaccgtatgccatccccctcttctgttttattctctgctcttgtttcgggacgggattttgctgtgtaggtttggcgggcctgtctggccttgaacatgcagaggtctacctggctgtttcccacctaccaggattaaaggcgtatatatcgctgcccctgcttcagtatgaaccttccattacaccctcatcttcgtggaaacctgtccactttactgctgcagggacttgccggtatgtttgtctcctgcaccatttccttttcctatgtaattccgtaaagaccagcgaatgtttagccagcacagaaggactagcagaatagtgcttgagtggttaattggtgaatgaacatggaagaatgctaaggaccagcctcggcttggagaggttctgaggaaggggagcagtgaaagaaaggactcacaatcaaatcgtgggttgaagctggcgacctgtgttctgctggagatagcgtccctgcctgccatctctctgttctgcggtctttctctcttctctctgatctgctttctctctgtgttctgacgcttctccaggcagttctcttgctgttctaaaaaaaaaaaaaaaaaattctctggatatctcttctcttgcagatcatgaactcagtcttttattttacatatcaatccggtcatttactccaggtttccctttgaccatcctatgaatctgcatcccgtgcccccagccccctaattcttagaagacaggaaacccacattttcttttaacattgcaaaagaagtcagagatctgcctgcctctgttaagcacgtcagtaagctagctgggtgggacccagtcctgaaattaccttttctaacacacctaaatttctaaataaatagaataaatagacctaaatttcctccatcccaggctgaccttgaactcaggaatctgcctgcatttgcatctgcctgtctttgtatctttctgacaagccggctcatagtgtagctgcctctgtttctgtagatccgtggaaccctttattcaattcatattgcatccttatgtttttgcatagttgaaaagttatatatttccgaactcatgtccttaagagctgtgttttccacagccttaagggctgtcctgaaggtcccagcatttaccatcttgctaaaacattagccacaccttagcctcctggactgatgccgtctgggattatcatggccatcattaatgtgaaccggaaggacattccttgaaggactgtgaaaatatgtatattattacacagacgagccctaagcccatgtctcctggcacatgacattctgttcctactaaggccatgtcagaagaacttcagagaattgcctttaagatttttcttctaaagcgactcacaaggaaactttggtctatttaccaaattacctaaggactttctggagctgtgagtcttaataatagaaccaaagagctttgtcttcctttgagaataacaccacagtacagctagcactaacagttgtgtctagttattttagttgactagaagtataaaagcagtgtttgagcaggctgtcttggaatgcttttctaggctcctttgacacagacaaacactacttctggatgcagcagccgccgcgtgggcactcactgcagataatcttgactgctttgaaatcggtgatcaagacaagcacgtggactgcacaacccagagcactctattaataataataattgttattattattaataacaaatgcataaaaaagactctctagctcaaaatcatggtcgattcatcccagcagccaggagtgaaatgtgttacgagacatacaaaaacattgaatccaaacagaaagtactcagaattatttccagcagctgacaacaggtgtcatggttgaaatcatgaacaagtttccccagatggtagacagaagtcaaccactcgggattaaaaggtgatttctgttatcacaggcacagaatcatggcctgtggagaaaatgagggcaggaagtgaagagttagggctgaaatggagtcacagcactgctcgctgccttgcaccgcagcaggtgatagttctctcatttgcacaggcaagtcagctgcagaccggaagcaggcttctcacttccgcttccgctcctcctctgtcacggcattactccctcacgggttcttcagaagccatttattttctctcctctcgctcaccacaacacccgcaccgaggcctctccgtctgtacgaccaagaaaggtctttaaaacacaagcctgatcctgcatatgtttggttatgactcgtcaatgagcccgcccttgccatttcttcccggtcaagcttttagctcccggatgcagcgtgctaagtataacatgattagctacttttggtttagttaattcggagttcatagagagtattttttttaattagatattttctttatatacatttcaaatgctatcccgaaagttccttataccctccccacaccctgctccccaacccacccactcccgcttcttggccctggcattcccctgtactggggcatataaagtttgcaataccaaggagcctctcttcccagtgatggctgactcggccatcttctgctacatatgcagctagagataagagctctggggggtactggttagttcatattgttgttccacctatagggttgcagacccctcttatcataccccccttttacttttcttaactgttaaaattaaacctagtatctgacttgctctgtcaatgaactgtatcccacctcttgttttttagttttttggggtttgcttttttttttttttttttaattttcaggcgagatctcactagttttccaggcagctcttgaacatgcagtaagacaagctgacattaaacttgccaacctcctaaggcaacctcttccatagctgggatatatatatatatatatcctgtactaccaagcccaggattccaggagccctcttaactgctcacccctgcctttcattcctcctccagcgtaactctagactccattgccttcttcctgtcttagttttatttatgcctttagtagccttatgaattccctgtgccctaaatactatgtagctctcctccttgaatgtaattgctgagctcttggagtatgtatgaagtgagaaagactgatgaataagaccatgatgggagaggagccatgcttgggcggagaagaattggtggatctaggggtgtgtccaatttctcctaggtgttgctgttactgggttactaggccccttttccattaatacggtagcttcatgttctgtggatgttgaagtttgaattgctgaggagttggcctttctgtcccaggttttccacctctgcatctgaccccctcttcctgcagcagggccaggcagtgttggttgttttaagccgaaagcagcagacagtgtacgccctgttcacttagcaacttttccccagtgccccttttatttcttggctctccaccaaggattgacaggtaaataaaactcttgttttggttatgattttacttctagggggaatgggggtcgcctgtattcccttggggttaaatgttctgctagacgcagtgttagcagagaaagaactcaacaaaagttttcgtatgatatgctttgggaacgaatggggctgtccctccagtgccttcgtctttcttggcttacttagttggctgaaacatggcccagaacctaagcctaatctgtcttgaccaaaggaacgccggtgttcattctcagaccaaactgtgtttcttctcagaaatgtctgtggtgttttgaatttttcctacttaaaatgtaagcggcattgttcttctcaaacaaaatagtcaaaatacagaaaggaaagcgagtagagggattcataaccatccagcatgtttactgatctcagtgtttctggggcgaaggcatgtggggagggaaattgtacttataaaaggaaagttggtgcccacgccattaccacccagtatcttcatatacaacatgaggagcattcttcccaggcagtaggtcactctttacacatcagcgtttttaaagtattagtatggccttgagaactgcttgcttagtttccagtgtagcagtgctgagacactgtgacacagctctttcccttgcctggtgaaattcctgttgtgctgcagcttaaattcccaggagaagatgtgggcagtgaaggtaggcttatcgtgtgcttcaatgtctccccacaccactatgttgataccatgcactctgtcatttaaaacccgttcttgtttcattgtgcaatcagttgccttcctttagttttctcacctgttcatttagttcaaagttattttttaccctagaattatgatgaggtagtcatgacaaatagccatactacttaaagatggttatgccacccaagataaaatatatgtcagtgggccactgctccaacattaataggttcctgtgttcatctccgttgagatatgttataaaaagaaacacttgtatgaccgagcaaagaaaagggaagctgaatcgtctgctgccaaaataccacatccgtttggttcaggttggtctaaaacacaggtttagttttagctttccacagcataattgaaggatgttacagaacactcaaaaaatacttacctggaacgtgagggtctgtggttcaaatgtaagcaaagatacggagttgtagaactcctgttttatagtaataatctggggtcactttgtctctcctacctgttaagaaagtcagtttctcagtccaaaccttggctggagagacagtaactgagaagatgaaccacagttcatcttagtttctgtcttagctagggttttactgctgtgatcaggcaccatgaccaaggcaactcttttttttttctattacatattttccttaattacatttccaatgctatcccaaaagccccccacaccctccccccacacacacccctacccacccattcccattttttggtcctggcgttcccctgtactggggcatattaagtttgcctgtccaatgggcctctctttccagtgatggccgactaggtcatcttttgatacatatgcagctagagtcaagagctccggggtactggttagttcataatgttgcacctacagggttgcagatctctttagctccttggatactttctctagctcctccattgggggccctgtgatccatccaatagttgactgtgagcatccacttctgtgtttgctaggccccggcctagtctcacaagagacacctatatcacggtccttgcaacaaacgcttgctagtgaatgcaatggtgtcatcgtttggaggctaattatgggatggatccctggatatggcagtctctagatggtccatccttttgtctcagctgcaaactttgtctctgtaactccttccattggtgattgtttccaattctaagaaggggcaaagtttccacactttggtcttcgttcttcttcagtttcatgtgttttgcaaattgtaccttatatctcgctatactaagtttctgggctaatatccacttatcagtgagtacataatatcatttgagttcttttgtgattgtgttacctcactcaggatgatgccctccaggtccaaccatttgccaaggcaactcttaggaggacaacatttaattggagctggcttacaggtccctaggttcagtccatttatcatcaaggtgggagcatggcagcatccaggcaggcatggtgcaggagtagcagagagtactacatcttcatctgcaggcccctaagagaagactgacttccagggagctaggagtagggtattaaagcccaggcccacagtgacacacctactccaacaaggccacacatcctaatagtgccactccctggcccaagcatatacaaaccatcacagtttcaaatccacttttgggtctggctggcttgtccccattcatggttgctactacgaaggtgtatttcaggctatcttcaaataacattcatctttataattttagcattgagacactgtcaatcttctgaaagttaggatgcctgtatgccacatcaggggatggttaaaattgccaagtctgttgtacccagagctatgctctgttgctttataacttaattttgctttatatggtaacctcacatacaaaaatagcataaatgttagaacaatgaaatgaaacctatttagtgaaaaacttgaatatggaggattaaaaaacctggattgttggcttaaaacttcatatggtgtaattttatttaattgtaccactttaaatgatctgaatttagtgtgttttaatgttcttgaaaagcaaacccagttctttttattctgtgtggttttgaacttagtatatcccattacagtgacgctttcaaagagatggtagtggctttcacccacgttcttactaagtctcttttcttaatcagttgtctgtacatgagctgtcctggccaagtcagcagccttaccagtgcggttaaatttcaataagtgaaaatgaaataaattcagagtcgagtgcccaggtcacactaacctcatttctaatattaaatattgatgtggctgatggttacagtattgagtagcttaggtgggatataaccaccatcacagaaagttctgttggctattactggttaaaaaaaaaaaatagtaggaatccaaattagagagtcgaattgaatatgagatttttttgtactcttttagtcctaaacagttgttatgtaggtgtgttttcctaacttcccaactgttaaatgaaaaagtagacctcactgggagagaggatttttgtttgtttgattgattgatttggttttgaaatcgtcgcccactgtcaatacatgaacccactcctcctttggcttccctggtacttgatgttgcgctttgtattttaacatgacttctctgaactcttggcttgctgaagtccttcctcatagttttatttattggaagcaggctgatttgattatcagcttaatcctcttagcacataaaaacttgagcctggcacaaccagccctgagctgaatctgttcccttatagggccacctgttgtgtgtctctcctaagtcggtggtgttcaaatacactggacggtggctgagcccgtctgcgtgctgactcaacgtgaccgccaagaattccatctgctacccagtgcagagatgctgggttaccttgctttcaaatgtcaagaccttgaacacagcaggcttcatttagtcatttaagtgtcacttgaattagctaaacatgcgagagggcaaagaatagggttctccttgttcatactgctctgcaggcactgcaggcactgcaaaagctttctaagggacctgtactgcagagtttaggaaggacctattgagatccaggcctgccttctctcctttagttccttgataggatagacaactggaacactttggcagtgttcagcaacaattggtaatatctttttcaaccatagtttgcccaatgcttgctcaatggatgcatggtaatatagtcaaactgggtgtgtcaaacattgttctaaccacgccatccagacgaatccggctacagttgtaatatatgttaaagagagaacctttgaggtcacacagatatgtgaatccagtcaggcactggcatggactgtcttgatttgaagaatatggtctctgttcccatgaaattgcccgccttctatacaagctggtggctgagagacctgatttaacaacagcaatcaagaattgcatgtgagtgtagtgtttttttttctcttttaagatattcaaagaccaaacaaaaagtgtgtgtgtggtattgaccctgtgagggtgccacctctacagactgggctgctcttccgttccatttatcagaaatagttatctgctcctcaaaagcaaagaagtgcactttcgttcattttaatctgttctaccgcaactgtatacatacccagtcatttttataattaacagttgcttaaacaagcatggtattatttagcatgtgcaagtacttctctcgtagcagccaaggtgcatttatcaaaacaaatctctctgaattctggaaattatctaacctccaatatggacctccattttaaaaaaaaatggaagcaacactactgattattaccacacgaataattgttttgtttgaaggtgatatgcttaaattattttacttaatattaacaacctggaccttaaatcataactctctcaactgagtaaggaaaaaaaaaccctccacagtcctgctaataagaaaccccacaaaatcaaatcagggtccagttgataagtacactaggtagacggataatgtgactgaggaatacatgaggcaaagctgtgtggcatgtgtgagaacagtgtgtataagaccaggcttcatgacagcaccagctggcgtacctccaagaaaagactgcttagttgatttcactgtgagttatcataaataggaggatctgtaataggtaaggattaatggatggatggatggatggatggatggatggatggatagatagaactgatagatgaacacatggatggatggatggatggatggttgtacaacttattaagagttttggcaattatggcttttcaaaaaatgactttgggagtatcgtctctctagaaagaggcattgtattcctacaataagcagattaagtaaaagcccaggaatgccctccattttaagtgtgacagtggcagttacaggtaaatagtcacacttgactagtttggggccctctatgagccttgatataagcagttttattttaaagagagaaagaatgtgattgcgaggacaacatgccagatgggtgatcaggagagtttttagaacacagaagaaaggcttaagtaaaagttctgtgttgtggtttgttttctattgatttgtcaactctgtcaagttggcagctgaagctatgacaacccattccttgccagcttttacacagcactttaaactataacctttcctttcttgtttgttccccaagatcttatgataatatcatggtataaaatattgtacagccttaaaagtcttaggttttttttttggttttgttttgtttttaaaaagaaattcccatcactgaaaagttcaatttctctttaaagttacaaagtctctggaatgtgggctcctggaaaataaatccagagtcagttcaatacttccaagaaggaagaacaaggccacaagacacacttaaggaaaagcaaagtctagcagtggcattccgtcattgggtagctcagtgcctgactcacttacgaccttggccccagaggcctttagcagctcgacttctccagtttggcatccatagcatgttgatcttggaggctcaggacagctccattccatacttccggctgtccttgggaaatgccctctaatcctggcatctccaatatcccggggtctccactgcaaccaaggttagaccttcaccaacgcacggcctcagtatcctttcgaagtgacgtgcctcagctttctctccagtacatcttcagtcctgaggcttgtcatgataaaagtgcttacttctccaatgctaatttgaaatggtaaattggaaaaaccataatcacttaagatgggcacgttgctattatattgagacattttcttctatattaaaaatgaatgatataaggtcgtcatggtattattgttttactttttaatttgctatcaaataggataaagtatgcttacaaatattttcaaatcgaattttaaaattcagtggcgttaagtttttattagaatttgacctaaactgttaaaagatcaggtgtccctgaataagtgggaatcagcccttgttgtatatttatgtagatagctgtttaaaattataatgaagtaaaccttatgattttcttggcagactgatagcagaggaatctatttgtgtattcgtgccattcaccacttcttagactgtcagccctctggacttaagtatagggatgacgtcactgaaagatgcccttaattatcctctgagtaagctgcccagacttcccagtaccctttaagtaagatgggtaagaccacagtgaagtagtctatacgtgacaattggtaaaataaggcttatatatggttatcattgttgctcatggttttaaatactcttaactttctctaatgcatttaactactttttatggagtgccagaaactaagactccggatgcctatcagtaagctagataatggcccctttctacactgaacttacctggcaagaaaaaaaagccaatgaagaggcagtcgtaagaccatgtgtaagaagctaacctaggtgtgttggttagagaaagcttcttagaggaactgaggactagctaggtgtggataatgcccaggggtgcagtgggtgacgcagggtttaagatgtttacagatgaacacagaggaggaggaggaggaaacccctttaagatgagtagcagaacatctaaccatgggacaggagcagctctcagaacaaatgctccagtatctttcctgaacaatcaggggtttccacactcccagagtgagtggggtttcagtgttgagaatggaagcagaggagtttcgtgtcgacataatgaattcagcgaccctacaggaccatctacagcaaaagttgtaggttatacaaagcatgtatccagggtgtggggctgatgggctacccggcgtgggatttggggccagctgatgaagtcctggtgttgctagcattacacttttattccttccttgatagcactgaaacacaaatcttccactatctcgttactcaccagactttcaacttcaattaccaaaactacaacttgagcttttgaacttaggagagaataaggaatataacattttatggtccctgaaatgtgttttaatggtttttgtcctttaaacctcgcacctcagtgggtctcctggctctattttcatgcaaatttagataaaaatccttctggcaggcattcatttaaaactccacatgcgtgacttgccatcagtatagagggagcactgtttgacttgaatactatgtcttgcattataaaaaatataggactattttgaaataccctttgaatttgaaaaatgtatgctatattttgaaaagcttcaaaaaaaaacctgataactgtaaaaagggattcaaaatatttccattattcttagtgtgtcacgaatacctgtgagttaaatttatacccgctaatgtatttagtgctgtatgagtgttaattgtgtgagattcatttcttctagaagataaaattaccttgatcagttttaataagtgtaaaattgaactgcggaaagtatagacattttaatttcttttacaaaataaatgaaggagttcactatattggtaaggctttcattcatatatttacacacacacacatacatatatatgtgtgtgtgtgtgtgtgtgtgtgtgtgtgtgtgtgtgtgtgtgtaactagtagtgaagtcctatagaccctcagacattacaggatattgccattgttaaagatggcacatacttgagttgtagaatatagtaacatcagtctggtacaaaccccgatgcttcatccctgctgactatcgtcatagtgctggaaggtactgtgtatgctaccagaggagaaaactattaactactcttatccaactgtaatggctgccctggcaaaataatgcccactgttacaacagcggcaacagtgttataagagtaaccaatcttttttgctctgctttaaggccagttctgtaagacaaaactcatgcctggtaccaaagctcatacattgggcctttaaatcataggcctgtggatggtagagtctaggtcccagaggtgaagcctctactgtctgataaatgaacatagtatcaggccacctttctttctacctatattacttatctttctccctatagatcagtaatctgtcaaccctcatcagaaaggtttatttttgcaataggtggccattaacccagagacccaaaacctgtcagaagacagagggtaagagactgaggacannnnnnnnnnnnnnnnnnnngggtaggaagagctagaggcagggggtgcctatagtgaaatggtgtattttttcctttttgttgtttgtttgtttttgtttgggatgtgagagttcgacacatgaactcacagccgctatgacagcatgcacaaggttaaaccaaagtccagctgggtgggagagcggagagggtgtcatgatacctttcatagttgaagaactattaacaatagatggctggtggcagaggccattttcttcacataaagaaaggctgtgcccgtgcatctactagaagtattaagtgggcttgacatgagttttagagaaaagttagggaagaatagtggactagtggtggaagaatgggggagggattggaaatgagggaatggtataagagtgtggatttgataatacactttctataaggaatgcgattggcgtatatcctctgctttggttttctttttttaactttttattggttccttgtgagtttcccatcatgcaccccaattccactcctctccccctccccttgtacccaccctccacacttgcaacctccctgccaagaggaggaaaaaaaaatctggtttgggaagctgtagtgtgtcttatagttggcttgcaaatgttcatggaagtgagttgttggtgtggaacgaggcctctgagttctgtacaccatcaataccgggaagtcactgggaccctcagataagttgttgttgccctttgtcgtgcaaatgatgtccttttaaatctgggactccacacactccagccttcgttgatgggatagatgtggggttgggtcactcaaagcccggatttggaccttagctctctctgagcaggttgtcccaccaagctcttccacaaccacaccactggggagagcactcctgccctgcccgggctggcccatctaatgccaccgccagcaagggacagagccagctctgccaatctcatgccctcagagctggctcatcctcacccacaccagcagggtcagctctattgtgctgcccaggcaagttgcagggcttgctctctggactgttacagccagtgaggaacatggccagttctcttactctcatgactctggggccagctctgcagcctggattagcctatgtttttgttggggggggggggcggacatggttgagatgaacacaattgtgttcatgtgttcacatgtgtgcagattcctaagtgtatcacgtgggagtctgaggttgatgttcagtatttcctaatttactaaggccaggtctcctgatgagcccagagctcagtgtgcgttctgtggatctgaactcggatcctcaacgcaggaacgccaagcctgtccgccgaagcatctccccaacccccgagcattcttgtcattgaacgtgataaaagaaggctttgtaaatatgtacaaaggttaatgatcgctgggaaccatagtgtgtgtttttatattgtatgtattaaaatgtcaccggactaagactccaattgaatcagtacatttttcgaaagtcttttctggtcaggcaaacagtgctgctgagttgaagatgtggctcagtcaagtacggggccctgattccaattcctggaatgcgtggataagtgtgtgagggctggggcgggacatgnnnnnnnnnnnnnnnnnnnnnnnnnnnnnnnnnnnnnnnnnnnnnnnnnnnnnnnnnnnnnnnnnnnnnnnnnnnnnnnnnacacacttggttgaacttgggcctccacacatacaacatactagtgtatgagaacatgcacacacatgtggtgcaactgtacagtaactcaataacaatatctttaatataaagctaaacggaaacagattaggctacatttagtatttatctgctccaaatttgcaaatgaattctatcaagacttcactaaaactcctttgtacttaaactaatgttttcttaagaaaatgtgaacatttttttgagtttccattgtcttgtcattttaggagtgccaaagtcgaatcttttacacaccaaatcagtgagaggccataaagactgctttgaaaaataccatttaatagcaaaccaggattgttctcgttccaagctttccaaaagtacttatgaaggagttaaaaccatcgtgagtaagaagataaactggattgtgcagtatgcccaaaataaaaatctggatttggagtccgagtgttccaaaacttcccagcatcccctgttgaatttcaggcataagccagagaagaaattgctcccacagtttgactctcaggtgccaaagtactcggcaaaaggctcagccggaaacgcaggcagcatctcaagctatgcgcagagaatcctggagcacagagaaaatacagacttcgggctgggtttattggaagacgcggatgcattgtggactcacagtcacagccaggcacagaaaacagaagagacaagctctggtccggaggggactatccagacccagaatccacattacagccgtgaagaatgtgagtagtgtgtgacgaagaaaggtgaagagtttgtggtttgatctttttgggggacggttgggtggtagttggtttggggtttgtttgtttttctgcgcatgtgtgtgtgtgtctgtgtgtctgttgtgtgtatggaattacaacagcggattacagatttggtgaacataatattttaagtgacattttgacctcaacaaaagtgagatatcttaaaaccttctttggagggttcttgaattatatcattacataccgcatttcattgccactatcatttattttgcccttattagtgaccaaatcaatggaatcggcaaactgattggaaatttcagggttccttctgtttatgtaactggaactattggccggtatacactggcctgttgctaaccccttataagactaactggccaggggtggtcagtttaaacacagacatctgacaacttacggaaagcctaaaaggtaacacgggcgtttgttttcaattttaaaatgactgcttttgcctgcatcttttctacaagatctcactaaggtgactttaattggctgaaatgaagtgattttagatccagaagggtccttgactatgtctttagacaacttcttgattcttcatgtcaaggttgttttgctagatagacatttcacatgacttgattaatgcctaataaagtcggtgtggatggacagtgactgggacctcagaagatggaagtaggagagaccagaatccaacgggcacactacccacctttattttttcaagctgtttcctgtggaagatggaggtgttccagtatgtgtttcctgtgagggttttgtggttacaatttgctacccttttaagaaccaatgaacaaaacctggggttcggttgaatgttgaatgagggacttcactgcccgttctttacctaagaagcgggcaggcagcttgctctccgaggctgtgtgtggtaacagtttctgtgttttcatatttcagtgaattcgatgactcttgctgaagtagtacaactgagtgcgaagctccaacagcgaatccaaggtaaagactcagcctcaatgcttgttatgtggaaaaatgtcggtaccgactctcccctgtgacgggacattgttagcatctgcagcattgaaattagggagttagacattgagacctgttgaggtttgggaggcaaacagtaaaggttaagttctttggggccttcaggaaaagcaacctaagtagaatagagactgcagctaacctctgcctttggccatcatcgacttcatcgagggccactcacggcatcgggcactctgggatatacgtcctgatagttccttaaggcagtagtactagccctggttatctgtataaactatgtaccatttgaaacccatcaaacgtagtaagataacttcctatggctatctgatgcaactattactaaaacatagctatttttttccttattccctgtttctgtctctctgggcccacctcagcacacctgcgtggaatatttgagattcccaacaaaacatgttattttgtccataaagacatcaggattttctaaaataataataataataataatctgcattaattgtcatttcttccagcttccttccatttaaatgaagcagttagttatactttgaagatctttaagtcacttccagagattatgcgttcagacagtaggagactcaagtgcaaagctttaagctcacagcttctgaaaagcactaaaacttgcactgacaatcccaggtcacgcaaataggacctcgtctgtgggatggccacatttatcaccgatcttacccataatagaaagttcaagtcctaggtctggattacttgcctgactcaggcacatgcctaatagtaagagaccgggttttaaaaatccagggagtctgttccaagtctctgaggagtttctagacctggatattaatggacatttatgtcatagatcattatgtcctgattggtttattggttatggtggagagagatgactcaagtggtggccgctcttcctgcggtatatacttagaatctttcttgcacttggtggagtggagagcagacagcatcgcagtttcctctatgaagtgagatagagtgatcaacactgataggctcagaaggaagcattccttattaaaaatgacttgatgcgttgtccctgtgtttactgaaggtggagccttagcgttggctttctgtgcactaaaaacgaaattgcttttcaaatcttcacagaggtttttgaagagttaacacaccaggtgcaagagaaggactctctggcgtcagagctccatgtccgtcacgtggctatcgagcaactcctcaagaactgctccaagttgccatgcctccaagtgggacggacagggacgaggtcacacctacccatgaaccactgaagggaccggagctgtcctgctttcatcctctactgctctgctaagcatatggaccgagaaaacatgggaaggaagtcatggtccatttttatggttgttgtgcttgcaaaacctaagataatactcattatctttatctaataaagcagatcactctagtccagggttactcaatcatttggcttcatcgggggacttcttataattactaaatgcccctccctatcttttaccatatgtgactacttaaatattctgttatagtgtttttactgaccaatttttattgtaactcagttgtcaaaaacaatagaagcctagtaaggtcttatgttcacctaaactactagagagaatttttaagagggaaatagaattcgtaatatcaccttatttatgagcaatattttaatataaaattttatatagagaattgctattttgggtatttttcattgtctttataagtctgtatttgaatggccatgtgtatttgcacttcctgtgtgaatatgttcacctctgtcaagatcgctgcattttggcaatacggtgtttttataacttatctttctttccaaagatacatgtgtttcggatagtattcggagaagcagtctacctagctgagctgttttaactacttaacagaatatgaaagtggaattaatcgttcctttaaagcaaatatccaagtaaacaaagcagcagattattgttttctaatggaaacagtgctgaattcgcttaggaagaaaagactattctagtttgtatgtgtcagtctccataaaagtagtggccctgccctgcttcttaattctcaacactttcttggatgtgttagttttggacaaagtaggtcaactatcttcagactgcactggtcttcctttgggggaaaaaataaaattattatgtgtgccacttcacatggagttcccgtaatctacgaactgtccaaattctgctatccacatcactgaaattagtccaaaaaataataataacaaaccattaaagaaagaaaaggaaaagcatttcaaggtacttttctaagttttaaaactctaaagggatagacgattatagcaccaccaccacccaaaaaaaaaacttcaataaaaaggatagtataagctactttggtttcatattcttagctactaagttaatgatgacacaaaagctagtgcaaaattaagatgaactctttagctgatgcttagaatgtatttgtgtggctgataggttttgcctgcagaaatctaaggaaagaaaacccattcattcacttggcagcccctcacttggcagcccctcatgcataaagatggtttctgccttgaagtcggcaatctgtatctgggcatgggtcagactttaatattgaacataaataatatttgactaagcaaacagctgcctcactgtagaaaaagcaccttttcctgatgctaggatgtgttaaactggcctggctgtgtgcattagtcaatgtcccattggttttgctctgtcctgaagaaaacttacctttgaagctttttggaaggagtttttggggaaaa

SEQ ID NO: 152 - DNA, 2946 bp, Mus musculus
gtctgcgctgcggcgccggcggaaacaatagtgcggatcggatcgtggcgcgcggacggtggcccgcggagccggacggtagaggtccttctctgagccgctctggtgctcaggaccagtgccgggacggacggacagacgagacggatcccacgccgtgccggacgcccacgatcctcgagtggcgtccccgggaccctccggtccgtggctgaagagtctccgacgtgagccgatccttcccgggtgtccccgtccccacgtgcgtcttgccgcggcggagccggggagccgggtaaccgagttagcgggacgcctccaggcgctcacccagaagttggcaaagccgcgtcccagcggctccttctggccacagcgaccgacccgaagttggttgacaggccgggtgtctgccggcgcgacccgggaggcgggtgtctcctgtggacagcccttttgctttttcgcagtaaaactgtgatactgtaactccaggggcactatgaacgaagaggagcagtttgtaagcattgacttgaatgatgacaacatttgcagtgtttgtaaactgggaacagacaaagacacactctccttctgccacatttgcttcgagctaaatctcgagggagtgccaaagtcgaatcttttacacaccaaatcagtgagaggccataaagactgctttgaaaaataccatttaatagcaaaccaggattgttctcgttccaagctttccaaaagtacttatgaaggagttaaaaccatcgtgagtaagaagataaactggattgtgcagtatgcccaaaataaaaatctggatttggagtccgagtgttccaaaacttcccagcatcccctgttgaatttcaggcataagccagagaagaaattgctcccacagtttgactctcaggtgccaaagtactcggcaaaaggctcagccggaaacgcaggcagcatctcaagctatgcgcagagaatcctggagcacagagaaaatacagacttcgggctgggtttattggaagacgcggatgcattgtggactcacagtcacagccaggcacagaaaacagaagagacaagctctggtccggaggggactatccagacccagaatccacattacagccgtgaagaattgaattcgatgactcttgctgaagtagtacaactgagtgcgaagctccaacagcgaatccaagaggtttttgaagagttaacacaccaggtgcaagagaaggactctctggcgtcagagctccatgtccgtcacgtggctatcgagcaactcctcaagaactgctccaagttgccatgcctccaagtgggacggacagggacgaggtcacacctacccatgaaccactgaagggaccggagctgtcctgctttcatcctctactgctctgctaagcatatggaccgagaaaacatgggaaggaagtcatggtccatttttatggttgttgtgcttgcaaaacctaagataatactcattatctttatctaataaagcagatcactctagtccagggttactcaatcatttggcttcatcgggggacttcttataattactaaatgcccctccctatcttttaccatatgtgactacttaaatattctgttatagtgtttttactgaccaatttttattgtaactcagttgtcaaaaacaatagaagcctagtaaggtcttatgttcacctaaactactagagagaatttttaagagggaaatagaattcgtaatatcaccttatttatgagcaatattttaatataaaattttatatagagaattgctattttgggtatttttcattgtctttataagtctgtatttgaatggccatgtgtatttgcacttcctgtgtgaatatgttcacctctgtcaagatcgctgcattttggcaatacggtgtttttataacttatctttctttccaaagatacatgtgtttcggatagtattcggagaagcagtctacctagctgagctgttttaactacttaacagaatatgaaagtggaattaatcgttcctttaaagcaaatatccaagtaaacaaagcagcagattattgttttctaatggaaacagtgctgaattcgcttaggaagaaaagactattctagtttgtatgtgtcagtctccataaaagtagtggccctgccctgcttcttaattctcaacactttcttggatgtgttagttttggacaaagtaggtcaactatcttcagactgcactggtcttcctttgggggaaaaaataaaattattatgtgtgccacttcacatggagttcccgtaatctacgaactgtccaaattctgctatccacatcactgaaattagtccaaaaaataataataacaaaccattaaagaaagaaaaggaaaagcatttcaaggtacttttctaagttttaaaactctaaagggatagacgattatagcaccaccaccacccaaaaaaaaaacttcaataaaaaggatagtataagctactttggtttcatattcttagctactaagttaatgatgacacaaaagctagtgcaaaattaagatgaactctttagctgatgcttagaatgtatttgtgtggctgataggttttgcctgcagaaatctaaggaaagaaaacccattcattcacttggcagcccctcacttggcagcccctcatgcataaagatggtttctgccttgaagtcggcaatctgtatctgggcatgggtcagactttaatattgaacataaataatatttgactaagcaaacagctgcctcactgtagaaaaagcaccttttcctgatgctaggatgtgttaaactggcctggctgtgtgcattagtcaatgtcccattggttttgctctgtcctgaagaaaacttacctttgaagctttttggaaggagtttttggggaaaa

SEQ ID NO: 153 - protein, 288 aa, Mus musculus
MNEEEQFVSIDLNDDNICSVCKLGTDKDTLSFCHICFELNLEGVPKSNLLHTKSVRGHKDCFEKYHLIANQDCSRSKLSKSTYEGVKTIVSKKINWIVQYAQNKNLDLESECSKTSQHPLLNFRHKPEKKLLPQFDSQVPKYSAKGSAGNAGSISSYAQRIHRENTDFGLGLLEDADALWTHSHSQAQKTEETSSGPEGTIQTQNPHYSREELNSMTLAEVVQLSAKLQQRIQEVFEELTHQVQEKDSLASELHVRHVAIEQLLKNCSKLPCLQVGRTGTRSHLPMNH

SEQ ID NO: 154 - DNA, 37351 bp, Homo sapiens
aaacaaataaacaaaaatgaaaatctaccatctattgtcatcacttcatgaaagaaagaaaaatttactattcccataggaaagacatactctcagaacaaagaacaattttattgatgaataaattctatcctattaactagcttaccacattgcctttacgtgtctcattttccacacacaggagccagcctttaggaactgtgctggaggtgacccaacttctgattgtgtgggagaactatcccactgttactcctaagagaacattctctcccaatagctcccccgatatggaatgtgacagagtaacaagatgccaaaatatatagacctctttttctttctacaacataggtgctcttaaacagtatgcagaggattgtgtagctgcttataataggagccaggctgacacagctctcttttctcttttgtcacaggtgatcacagaaatagcttgctgtaacagcacctcacagtttcctcttaaaatgaaaccacattttctttgtgccctttcagctcagttctgctgttcatagaggggcttgggagattttccactgtaggtttcttaaaattcattatacttgtagaatgttagagctagaaggtcccctaaagatcataaagttcaatttcattttttacagatgagaaaacagaggctaagagaggtaaagaggtgcttagttgtggcagaagattagaagagaagttcctgcatgtcggtttagcaatcatcttgctcattacaacttcctcttctgccttaatcacttttcagttcagtagcctctttcctctagaatagcccttctgtattcacactgccttttctttgctttgaagttacagatctgaaactcttgcgttagctatgctatggttttcttccacattctgtacactgtactgaccatcctcttataaacctcttctcttctaggttaaagatttcttgacttccctctggtgaagcttgataccaactgacctataagggcttggttttcacaacagagtcttagtccaccctcgccatcgcaccaaatactgagagaacaaataaaattattgcttgaagaaacgaagtaaagactatagtattcatatttttcccacatgccatttgcagtagcttttcatatttctcatctatcccacactagaaatttcatctattggcttttgtaaattttctttttgagccacaaatttatctcagtttcagattctaatctattttcagtagtgctttcagtttagtttactcccatttcaaaaatactccgtcttgttctttacagcaataaaatccaaatgcaaattccgacaacctcagccaatggtgagtcatggtccctcatttccacctcttctaaacggtcatggttgctcattttcactcttctaagcacctcttctttacagcaacaaaatcagaaagcaaattcaggcaaccttaaccaatggtgagtcatggttcctcatttccacctcttctaaacccctcctctgatggtcaggacccttctcattcctcaagtagtaactattcagcactttaccacttcccttgaatctctgacccattatctttttcgtctttctcacagaaaatagaggcagccatttaagtactttctcaacttactctccaacaaatctgattcaaatactttcatctgtagttttaccttctctctagtgtcaaaacctgaggtaatcctaaacctcttcaaagacaagtcattctcggtgtgctactctgttctgtgtcttcaaactgggctcctttgattattgctacctctctatcgttagcctttctactggctctgtcctcttagtatttattcatgttcaagtacttcccaaccttaaaaaaataaccttgacccaacatcctctttacctcaacttcacttcataaaattttaaagacatcatacctcaaatccactatcctacctgtcttagtctattttatgttgctatcacagagtactacagaatggataattaataacaaacagttattgatttggcttacaatcctggaggttgggaagtccaagggcatggtgatagcatctggcaaggtagcaagacttcatgctgtgtgataacatggtggaaagagcaagaggatgtgagcaagcaaacaagagggggctgaacttgcttttataacaaaggcactctcatgataactaacccactccgtgcataacattaattcatccgtgagggtagagtcttcatgacttaatcacctcttagtagactccacctctcgatgctgttgcttttgggattaagtttccaacacatgaacttcagggaacacattcaaatcatggtactacgttgcatccatattacaatctgttgtgatctacttttgctcccacaggtccattaaaactgtactccatgaatttctggttgctaaatacaatgaacattattcaatccttattctttcaatctcttggcagaatactttccagttgaccaacagagtcttgttggcttttatatcccttagacccaaagacttacagggcttggcagagtttctggcaacataacgaaatctgaaaattgacgaaagatttagaatggaaaataagtggatgccaaatggtgaaggctttaaatgctaaactgtggggactggcttttgttttgtaggcagtgataatctagaaaggtctcttagcaggaaagtagcattaccacatcttttgggaagtaaattctggggcagtttatggtttggagcagtggtttcctttttctctttttttttttttttttttttttgagacaaagtcttgctctgtcactcaggctagactgcagtggcacaatcacggctcactgcagcgttgacctcctgggctcaagcaatcctcccacctcagtctctgccccaccaagtagccaggactacaggcctatgccatcatgccaggctaatttttatattttttgtacatacagagtcttgctacatcgctcaggctggtcttgaactcctggacttaagcaatctaccggccttggcctcccaaagtgctgggattataggcatgcgccaacgtgcccatcctaaagcacattcttaacaggaaaactgacatctgcattaccaagaggtttaatttctcttcagaatcttcccagcagattcagttgactcaaaaggcagcccatgtggctgagggttagtttagatatgcattggctcttagcagttcacctctggaaatgaatttcataagatctcagagtagaacacaggacatagacccagtggaagaggttaggtttaacaagagttctgagttgcaagctagagaaagcaactagttgacttaggctataaaggaatttattcaatggggagagatcacccagaaggctgggaaaccacgcaggaacaaaggtgatgtaatcaactactaggatcacagtctaatgtacacaaggcaatggctattcaaacaccaatgtcaggaacttacctgttgtactcactggatatgggataatggctgttgtccctgctgacagttagccattgatgccctcaacacaggccttctcctatccagtttctttgctttaccagtcagggcgaggtgcctcagatacacaggaggttgaagtttttgcttctagaggtggtgacttgtgccatccgaacactagaaagggattcagacgtggaagaacagcagaaaaccacaaaaccaaaatcaaaaatagaaaataaaacccaaagacataaacttgcaaggatccaatgcatcacttttatcagattctaaaagcaaaacctttcgaacaggtttttatgaatttagagtatcaatatataaaacaggccttgttctgcctgcagctccccttcctattctatccatcatccacgtatgacttgtcggcctctaagacacctgcaaagaatttctggtcctatgatacattaaaaattaggggagaacaaaccattttacaaatagtttgaaaattcccaagaaggctgggaaactgagcatgagcaaagcctaacaaattcaggcttagaaaagttagtttctcttaatgtcagttagttaaagctaaacaggagcacttcatttgtagtctggtactctttccaaaccagactcttggtctccatttcctctcctgaaaaacaaagcagtatgactattagactttgaagagactttcaaaaacgacagattcttctagtaccccacgaaatgtttcaattctccagcagtccttattttgtaatttgcctctgagcttttgtaaaatcatctgtttcctagttttaaactgcttgttgccataaaagcatcatataaatgactttaaaaatcatttgtggaaaaaaaactggtaatgtaatattcagattcgtaatgctaactaaaagtgaccttgaatattttgttgtattcctattttaatatttttaaagccgatttaaaaatattcatattcatataagccccaaactaaaaacaactcaaatgtccatcaacaggtgaataattaaattatgatatattcatacaaaggagcagtactcagccaaaaaaagaaaaaaaaaaggaaatgaactatgaactattactgatctttgagctaacatggatgaattttaagaacatccagtggaatgaaaaaagcctggagcaaatgagcatatgctgtatcactacatttatgtaaagtttttaatgcaggcaaatgcaaagtacagtaataaagatcagaacaatcaggccaggcgcagtggctcacacctgtaatccgagcactttgggaggctgaggcgggcagatcacctgaggtcaggagttcaagaccagcctgggcaacaaggcaaaaccccgtctctagtaaaaatgcaaaaattagccgggcatggtggtgtgcacctgtaatcctagctactcaggaggatgaggcaggagaatcgcttgaacctggaggtggaggttgcagtgagttgaaatcgtgccactgcactccagcctggacaacagagtgagactccatctcaaaaaaaaaaaaggatcagaacaatcagtggaagggaaataaaaagtgaagtgactgtgaggggaaccaaagggagtgatggctctacagttgcatacatttgttaaaattcaaacaatacagtaaaatgtttgtgcttactgtatataaattacaccccaattaaaaaaaattgcatacacatctagtaagtcacaggcaacttatttcctgcttctgtattgttgggaaacagagaatattaagtatcagagataaggtaagattattacaagaaattgtcagataagatcatttatagactccctaaacctgcaaagcaaaaccatatagacccactatttaaaaaaatatagctacttttcaaagcatccactcaagctagcagataacaaaatacttattttattgttgtaaaattaaaaatagtagacaagcatatatacagttcccaagcagagcaatacaaatatataaattattgcagttttcaaagaaaatataacagccaaataattgcctacttttttgaaacaaacttggtttttaccacagcagtttcattttctttttccaaaagtcttaacacaattttgtaaagtaaatttctaacaccagagagattaagttcaatgaccatagtatacgctactgttttaaagcaaggttcacacacacacacacacacacacacacacacacaaaatggaactgaacaaaagtcactacttaatactttctaaattgcctcttttggaggtacggtgaaagaaaaacattctagatgcgtctgaaagaaacaaggtacacacacttactaaaattcccctttgctttaggtgtagttgagggaagttcaactaatctttaaaccttttttgggagagggcaatactcatcttcatgaatttttgtttactttggtaaacttaaaattgtgaaataattaaatattattaaaatgtattagtaatgtggactcaaactaaaaagaacagggaaagtgtatgttaacaaactagatgttttggagacttgatataatatggttcatatcaatgttaccatagccagaagttgcttaataggttagactgcaccataatcaaggcaattatgaaaggatgaagtgaaatgaaaatactgagatgcaagcattatagccctcctccaagttacctttattttgtgtgagggctctagtattctggtaaataaactcttccctgccccatgaccacaaaactttacttggtaagaataaactgttgggggttttatctcttactaattctcaccacaaatttcctcaaatagttactcccaccaacgtaaaagttaaaaatacaatcatacactgaaacggcatcaattatctttgccttacatctgaacaaaaagtattaacttttttatagcgtattacacttcttaataagcacttagtaacaacatttgtcagtaaatgaactggcatacatcagaaaaagttgacaatagaagaattttacatggtaccatttcaaattttcatgtacaagtaacccactttatggtcactaacctgaacctcctaataagctacacaaataatttactctttaaaaattcctactttagagcatttacattttataatttaataatgaaagcagattcttccaaaacaaaacaaaacccaaactgggaaacattaaaacacaaatagatctaaaagcttactttaaaaaaactacaaaaatggactaacaagccttaccagtgtaaacactaaggtaaaaaatatataaacaacataaagaaaacacaaaaccattttcagtcataaatatagtaaaatgaaaaaccaaatctcaagatgcctgtcaagatatatttgactatatattttgactatatttctgaaatcactaacatgaacttgacattgaaaaaataatccttaaatgtatataaaaatgggcactttgtggtaaaatgaacatgtgttttgaaaaactaagaatgtgtctttgctccaccattgtgcatagtcaacgacacaacaaaacactattctgctgcctgaatcatctattactggagtctcaagtgcatgccttttaaaaaagactaatttagatattaatatgaggatcaaaggataagatgataatctcaaagtaaaacataattgatttttagcttcattataaggctgaactttaaagagaacaacctgtgtggtcaaaaacacttttctaatttttaaaactcaatttaacgtgtcaaattataaaactgaacgtgaaaaagatttgtcttatctcactccccttaatcatataagctctgaaaatttagtaatggatgactggcagtctgttttgccactttttaaacagtagtacatgagatatgcttcaaaacattctcaaaaattactaacaactgtagagaatagccaagtgtggaaaacaatatttgtgatatttcatgttctcttgttagaactcaactctgtacctgatacttatatttgcatacacagtaattgcatatttgattaagaaaactaacataggactaaattataagtttaccaaacatttggataaactgctgtgcaaaatacttcaacaaaaagttttttttactaggaactcatccaaataaagtagtgtgagtaccagcaccacaaagttttttttaagagcacctctcctttttagagcttaagtagaaatatctaaatggaataaatcagagtcccacttaagaccttagcacatgcacacgttcatccacttgttccgtactcattagcaaagctatgtatatttgtcagaaaactcctttctttggataacactgttgtattcaggactgcaacttatggctcatattctggaaatatgctactattgatatcaaatgcaacatatccccaacttttatgactgtccctaactcatctaaacacaaacccaaatgtgtgcaaacacactggctggtaacaatcttactgaattacgccaaaaaagagtaaagtcaaatttgaaaatgtgggaacaattaagcactaagatattaatcaggaaatgtatttacccagcttgtaagtttgaatattttgatattgcacacatttaatttaaagctcatcaaaactaaggcaatgcatccatactccctggattttaaattcattttgcatgacttaaagaattgagagaaatcgaaagcatctttcaaaaattccctccaaaaagtaatgttatacttcaaagaaaaacaaaatcaacagatatcaattaataccctcaggccaatttaacacgtcagcattacaaaaagttgttttcaattaaactgaagtgtttctttgcttaaatactttcttgtgttcaacaacaaaatctgacccaagccagggtaggctgccaaatttaaggcaaatgtcatttatatctttatgcatgaagctgccacgttactgggcttttcagcagatactttcaagcaaggatctacctcataagtacattctaaacatgagttaaaaacagaatttagagcccattttaattctgcattggttatagcctttactgtaatacattattaaaatttatctagctgtttggcacaatctgttagataaaaactctttggaagcatcataggcaacttacgagaacattctcttaatacataggtttatttttttttaattaggagttttgcttttcttctgtagaacaatcctatatttctctatagagtctaaagtttagaaaaatacctcacaatgctttctttgagcactaagttcaatgatggtgataatacaatttggacagtttaagtattcttgaaactttacccaaagtggcacacaaaataatcttacttttttttttcaaagacagaacaatttcacagcacactcaatttgaagatagacattatatttgaattggaagtgaggcttgacttactctgtccaaattctaatgcatcacagtcactggtgtgaagctaataatgaaagaagcaagaggaggctttcatttctatggagacaaattgacatagaagccagattagtcttttcttcctgaactaagaactgcttttgttagaaaacaaaataatgtattgtatttacctgaatactgctttaaaaagttattaattcttcttttacaagaggtattagaaattaaaacaactcagatttctaatccaaaatatatttatctttggaaagcaaggtaaccgttgtgaaaacattgtattaagagaataaaatgcagtgacctgaaatatgggtgaacatattcacacatgataatgtaaataaatatacagaaccactcaaatacacatttataaagagaatggcaaagtacctaaaatagcattttcacatataaaatttttatattaaaatattgctcataataaataagaggtgatatgaattccatttccctcttaaaaattatctctagtagtttacactaaggagttaatctgttgttttgacaggtgaattaaaatgtttaataaaatgacactgtaacagtatatttaagtagtcacatgtgataaaatttgtttagtaattctgggaaaaaagagtccccaaatgagccaaaatgattagccctagaagactagagtataatgatctgctttatttgacaaagatgttaaatactgccttatgtttggcaaatttaatgaccataaaaaaacggaccacaactttcttcaaacttcttcaaagtttgcatgtctgggagaccaataaagggcagggcatacgaagtaagtctgtttaggtcagttgtttatgggtaggtgcgacttcattcctgttcgccctacttgcagacatggtaacttagaacagttcttcagaagctgttcgatggcaacgtggcggacatggagctgtgaggccaaagaatctttttcttgcacttggtgagttaactcttcaaaaacttctgtaaaagatttaaaaactttcatttttagtatgcagaaagccggtgctatgatttatatttcaagaactctaactgaaatctatgcattgggcaaagtgtcacaatgaaactgatttgataccaaggaaacagttctgttctctacaaagcatatcagttctgatcatcctaggcatctgtatactttacatagccaaatggaatttggctcttctccatcaagtgactacagagatacacagcaaaaatggtggttgctactgtagctgagctacttttctcaattagaatctataaacagattcaattagtacataatgtgatttatggacaagaagtgcctgttagtattcaggtctggaaccccctctaagaggctttggaatcagactactaagagttttgaatccttgttcctactcttacgtgcctcaggcaagcaacttttggtttcaatttccttttctgtgtaacattaataatgatagtaagcacttcaccaggctactgtaaaaattaaatgagatcatatttgtaaagtactcataaatttctactacaactattattgtgattatttttattattctgagaggctgtgtggttaagctttggagtttaaatccttgatctgctactgattggatgcatgatctctgtaagcaacttaacatctctgaagtacaattttctcatctaaaaggaaataaattgaaaaggagacaactgcggaatctgaacattacttgttagtgttagcattatacttgatgacgttaaggaattattaactttaaatggtgtgataatgagactgtgactgttttttaaaaagttatctcttttagaggaaatcctaaactatttatggacaaaaaacagtgtgttagctaggatttgtttgaaaataatccatgctactggtagtgcaatgggaatggatgcaagtagagatactgattattatgcctttgctaacagttgaagctggtgaaaatggcttaaagggttcactatactagtctcactacttttatatatgtttgaaattgtttataatttaacaaaaaagactaatatcacatgccttaaagaactgtttgggaggactcccacatagtgcctggtgcaatagtgggtagtcaataaaatgttagtaagaggtggtagtttccattttcacttagaaaagaaaaatgtggctgggcgcagtggctcacacctgtaatgccagctctttgggaggctgaggcaggaggactgtttgagcccaggagctcgagatcagcctgggcaacatgatgaaaccccctccctataaaaaatagaaaattagctgggtgtaatgacagtaagtcccagctactcgggaggatcaccactgcactgcagctagggtgatgaagcaagattctgtcgcaaaaaaaaaaaaaaaaggaaaaatgtatttcctctgcagttgaaagttgtttctttcttattctttttgctctggaaactctaacaggtttgaatatctcatttccaaatttaaatgtagataaagccagtggtgtcctatcatagatgattttctatgtcaaaatttgtcacacacaaaaaagtactgacagtgattcttaccctggatttgctgtaggagctttgcattcagttgctctacctcaccaagagtcatcgaattcactgaaacatgaaaatgtattcactattaccacaacaacctaggaaaacatgctgcttacatcaccaacacaatatcctatttttaaaaatcagcacttaactgccaacacaacattcagcagtactccagtattcaaccattaacgctcgtaagtgtggagtagaagttttcaaaccctgaccacaacccatggtaagaaaattttatttttattcttttttgagacagggtctcactttgtcacccaggtggcagtgcagtggtgcgatcaatggctcactgttgcctcaacctcctgggctcaagtgattcctcccacctcagcctccctaggagctggaatcataggcgtgtgccaccacacctaatttttttattttttgtagagatggggtctccctgtgttgtctaggctggtcttgaactcctgggctccagtgatcctcccaccttggcctcccaaagtgctgggattataggtgtgagccactgtgcctggccagaaacatattttttatcactcccagtacatcaccaccctccaatgaaataaaagtttcaccaaaaaatagtagtaggtccaatgaattctggtatctcctattcggtttcagtttttaaaaagtgttagtcactacccattaagcttattttgattaagcattagatagtttataacctgcagtttgaaaaataaatttgtctgtctagatgtagaatcttaaataattcacatttagaatcaagaagttgtataacaagatagcagaggtcccttctggctctgaaaacatgatttcaagacaattaaaatcacctcagcttctgtaaatttttgtagaaatagatgtagagagaatgagtcaccctttctaactttacaataagtgcacacattacctttggcctttagtaaaatgtcacatttttgcttctgaaatgccaccaccagtcaattagtcttacagggatcagcaacatgacaatgtgtattagccaacagatgaagctgtacttctaaactatacgagtcctagatgttccaattcacagtttgttgattccatttagtgtaatcattttaaatggcaaaacaaacatggaaattgcttaacttcaatgcttagaagacagaatcccagtgaatgaaaaattttaagatgtctcatttttgctaaggtgaacctgttaaatacaatgtttcccaaatctatgattccacagcaaaattcttgacccattacacatctatacaaatgtacaaaaatcccaaaccacccaacttttacttttctccccattttacttacattcctctctgctgtaatgtggatgctgggtctggacattagcctctggactagagattgtctcttcttttttctgtgcctggttgtgactatgaggccacaatacactgttacgacataaagtggcacctgaatcttgtaacatagaaagtccaaagtctgtattttccctctgctccaaaattctttgtgtacagttagagatgccacctgcacttccatctatccattttgcagaatattttggtacttgggagtcaaactgtgggagtaatttttcttctggcttatgcctgaaattaaacagatgatgctgggggtttttagaacattcagaatctgaatccagatccttattttgtgcatactgcacaatccagtttatcttcttactcaaaatggttttaacttcttcataagtactttttgaaagcttagatcgaggacaaccctggtttgcaattaaatggtatttttcaaagcagtctttatggccccttaatgatttggtgtgcaagagatcagactttggtacccctatggaaaaaaaagagaaacaaaagacttgagaaattttgttttctataagtcactttaagaacatacaaatcttagtaaaatcagagtccctgatagtctgtgaattagaggaaaaatgctaaagaatattagtattaatatacaatgtggcctaataatttctgcttcaatattcagtaatattaaattcttatggatagcaaaatctttctaagaacttaattattcaattttaatcctagtctagagatgttactgcacgatataaaaaaatactactgaacccagcaatttacctttacagattcttggcctttacattatagtgctttcttcatgaaaccttctgaagtacacacttgcaaaaatatctataatattatgaggttcaataacagaaatactgaacaagttttcctccctaaaacacagtaaatcatgttcttaaattatgtttattgaaaaaaaaaaaaccagaaccagaaaaatgcaaataaaagtcaaaaattcaataaactatttagatttatttttaaagaaaatcaaagcatctaacatttttcacatttccattttatagttactaaaaccttatcaagataattttattttctagaagaaatgcattatactcaatcattttccatacagcagtaaattcaatctgccaagatccaacagccagtaattcctcaactcacaaatgttcattatataccataaataacagaaatattacttttatatctctcaacttagtagagtataagtatgctacctcaattgttttttaaaaatataaaaattataaaaatataaaacattttcaaatatctaatacatttcaaaatacagaatatattcacacatttttataagttcaagccatgttattaaagttaaacagcgctacttttatgctgaaggtgaattaggaatgtggacctgaaaatttatgtctgccagaattaaccagtttaaatctgcttagcttttcaaatggagtaagcggagagccactcaggagctagtttaaaaaaaagttttagctgattcatcagaaaaaaatacattttgtaattcctcctttcctttaaaaattgaactcatagttattttatttgaactccaaagtctggctaaaagaaagataatgaagcatttgtactttaatggtatgaaataaagtattagcatacttgtgaatattaatgtttttaaaaatatatatagtatcagccaatggtgggacttgatgagactgtcaaaaccaagtgttaaattggttatcagttccctcaacagttactgtaagctatgtgaacacacctctaaaacattaatattgtaagcacatgtaaacaactgctctcatgaggtaaactcaaatatctgagccttgttttttccaatgagtacaaaaattgctggaaacttaaacagaatttaatatacatcttatttatcactttgctccttgtactgcaattgtgagcacgtatacatttctaccagttattatctgattaggtcaaatttccagcaacattagaatatgtgaattataaatctcaaagctttatttgataatagagtatacatctttaaaaatgggaaactgacataaaaaggaagctcacgagctctgctttattaagttttattattacgcattttagataataagacaaaacagtagttatcacaagttatacaccaaaggaaaaatggttccattctgctatctgattccaatgcttagttttctgggaaacactggtatgcagagagaacctgaagcttgcctattactaactgaaacatttattaaagagctcccctaccctctgcaaactcttttaggtcttgttgccaacagatggttagctaatccctcaaaaccgtaaatggtctcattctcagtgcactgcctcagctctatgtagcaatgaaattctttagcatataaaaaaggttgtgaactaggctatggaaagtaattaatatttattgttatattttgtgggttttttagtatttatacagaaactccgataaaaaagtacattaaataactaattttctgatgtactctagagcttcaacaataggtcaatataatagatatctatttgaagaataatgaggacttgtaatgtttatctactgtttcttcttaatgattcatataatataatttccacttagatgtacctattggctcctcgaactcaccttactgaacacttaactcctttatctctctcaccacacaactccaaaactgatccccttactgaatctggcatcaccaactaactgctcaaggaagaaacctgggtgtcctccttgaaagctcttcactccccgcaatcccagaggttttgctgaccgtcttaacagatttctcccccataaaatctagcacctacaacatctgaaatccttctgcttcactcaagcaccactcccactacaaatgtgggtcatgatcatcatcacctcctgtctagttctcatttcccctaagaagccttgtctaacccaaatgtctgggttagtttatcacactagattttacaattgcctctttcgcggcctgtatctcctgacaaaatgtaggttctgtgaaaaatatggaccatgtctatcttactcatatattctcagtgtcaaaatgccgggcacatagtgggtactcaaaagtagttaaatgcataaaagaaaattaaaaatatattttaaaacaccaaaaacaaatcaattatcactcaaggtcccttgcaaggtccctcctagcaagggaactagaatttgcagttctgccaggctactcagcgggtaattaaaggtgtctttcagtgaagttactcctatatttagtctaatgggctattagtctaaagaacatatcagtggcactgatacagaaatggcattcctgtggcatcattcaatctgtcaaagaaaataatgaatttctactcaaatatatatttttaaatagaaatttacatacagaaaatatacaagaagatggttttatgttaactgtagctcattcatctagatatatacctctaatttctttagttacatcagtcgtactaaaatttaaaaacctgactgagttttaaagttcaattagaaacatttgttttataaacatatttaaaaatatcctgtgcagcagtagcataggaaacaaaaacttctataaaacactgactacttcatatacttgaaaaaaattactttttaatctagaaaataatgtgagtagctcacttaatttgcatcagtaatacacatatcattttataaattcttgaagtgatttgttgtttctacctcatcagttcaaattattatagcagaaacaaccattgctatttcaagagatcccagtgagtttcccaactgacttatcaattttaaatgcatttacaagcgtaaacagctctgagcactaatttgtttcctaagcagcttttgaaagggaataaatctaaatgcaacacaatcaggtgatacttttgaggagctgagttataataatttccaaaccagtccaaccaagattgtactacaacttgcttgctaatacaagttttgaaggccaacgtaattgacttcctattataaaaacatctttaagatacttcaaagatatccatgtcacttttttttaaatcataaagtcattattagagaaccaagaccttaattggcaaccaaaagtcttaatcttatttttttttaaagtatgggtttcttaacagatgctggagaggatgtggagaaataggaatgcttttacactgttggtgggattgtaaattagtttaaccattgtggaagacagtgttgtgactcctcaaggatctagaaccagaaataccatttgacccagcaatctcattactgggtatatacccaaaggattaaaaatcattctactataaagacacatgcatatgtatgtttactgcagcactagtcacaatagcaaagacatggaaccaacacaaatgcccatgaaagatagattggataaagaaaatgtggcacatatacaccatggaatattatgcagccataaaaaaggatgagttcatgtctaacacaggaacagaaaaccaaacaccgtatgtttttttttttttttagacggagtctcgctctgtcacccaggctggagtgcagtggtgcgatctcggcttactgcaagctccgcctcccaggttcatgtcattctcctgcctcagcctcccgagtagctgggactacaggtgcccgccaccacgcctggctaagtttttgtatttttagtagagacggggtttcaccgtgttagccaggatggtctcgatctcctgaccttgtgatccgcccgcctcggcctcctaaagtgctgggattacaggcttgagccaccgtgcccggcccgtatgttcttattcataagtgggagttgaacaatgagaacacatggacacatggaaaggaacataacacactggggcctgtcaggaagtagggggctagaaacatcacaaactggggcctgttgggggtggggggctaggggagggataacattaggagaaatacctaatgtaggtgacgggttgataggtgcagcaaaccaccacggcatgtgtatacctatgtaacaaacctgcatgttctgcatgtatatcccagaacttaaagtattaaaaaaaaaaaagggtttcttctcactagaggctatttagaaatgtatataggctgtatttctgtatgaatagtagtattttaaaaagctgttcctattcaataattttatttttcttttatcttttcccattttatctgagtttttatactattattctgtactttgaaaccctccctctaacccatctggcatgctatccccatctctatcctttaagttcctctttaaaataaattgctttaagaaaacttggttaaatccatcctaaaagtgcaaagactactcaaatgtttagatgtttagctctagttgccatcattactcttatttttttgagacggagtctcgccttgttgcccgggctgaagtgcagtggtacaatctcagctcactgcaacctctgcctcctgggttcaagctatcatcataccccagccccccaagtagctgggactataggcacgcaccaccacacgtggttaatttttgtgtttttagtagagatggagtttcaccatgtcagccaggctggtctcaaactccccacctcaggtgacccacctgcctcagcctagcaaagtgctgggattacatgtggcgtgtaatcctgggatcacagtggcgtgagccactgtgcctggcccactgttacccttttaaaagaatgattagattgtgtttaattcaccaattgtaggaacaattttttttcgtaacaaaaataatactccaaatggcactaaaaaaccccacgaatatcaaaatgcttaaagttctaccacatgtcccatgatcctctgcttttacccctagcctcttgaggaagacttgatttataacttggtagtaataagtaagctaggcaatcttttcctgatgattcaccagctggtcctgtcaaatagcactgtctctcagctgtctatgctgatgctgaatgcctttatacttcacacattcttgaatcatgtcatctgactccctcacactttttgtggtcaattagactatatgttgaattggattacatattccatttcccaaccaaaggactggctttacataacttggtgctccacagggagagcaaatataatacaaccatcagtggatgtgaagttgtaatatgcattatcacatcagtaggagattggaaagcactaagaaagcaagcactccaacctttacctcaaacttagagcagaattagggaactgggagtatgggtttgctaaatggtgggcttatgtgttctttcttgatgtttaaataaggcaaaaaaattaagtgtccagttgttaacatgctgtgaaaaaattttaagcacactgccttaaaacatgataaatgtatttgtgcaacaatacatgcagtattgcttcaaaatattttttggccaggtgtggtggctcatgcctataatcccagcactttgggaggccaagccaggtggactgcctgaccccaggaatttgagagtcgtctgggcaacattgtgaaacctggtctctagaaaaaatacaaaaattagcccagcatggtgcatgcacctgtagtcccagctacttaggtgggaggatcgcttgggccagagaggcacaggctgcgatgagccacgactgcgcctctacactctatctagcctgggcaacagagtgagaccctgtgtcttaaaaaaaagaaaaaaaagttttttatggaggctcacatttggcacagcctaagtaattttccaagagtaaaggtgtttttctttttgtgatgatcttatcttggatgctaagaaacggggtacaggtacttgaatatgtatgtgttgtccatattaagaaacagtaatcttgtgcttcaagcaagtgttcactgtaaaaatgggagggtagccaaattccatgttattaggaaagacaatggatgaaaatgttacttgtttctgaggcgcagacaaccattcctgataaaaggaataaaggaaaagccctgtgggtagaagtggcactcccacggactgaaagctggatccacactacaggtaagttttgtttagcccacaaatattttaaagagaaaaattaaaaacaaaatgagaggatctgacaggaactggctgctgaactgggtatgtgctcttcaattccaaatagttcttattatttccttaatgaaagcacttgtacctgtgaccctgcaggctccaaatccatgtccggtcacctgtactgtactgagactaggctggattgctgcagtgtaaatactacttgccccagtgatgattttgtgctcaattcgactagactaccatgcatttgatgagcaagcagtagccaagccataattcaggaagttattaccattattatctattgccaagcactgccactgagtgggaggatgctcagtttgtctatcctgtcatgtgaccaaggcagaagattagactaaaagtgggaaggcaaggatgaatagttggagtatctacttcccacaaaaggacaggcttctgcctcttaaaatttttatcagttgtcctaggtgtcttagaaagtactgtgataaagagtacctcatttcctcaccctcatgcctttagctaaatcaggagccacttaaatgactaaatagtctgccatattcaagtacccaacataccgtttaaaagtaaaaggtaactgcttatctctgccttggtagcagatagaatattggcaaccacatgaagccaacatacagatgggttcagaaacttgcttccgcacattttgagaattactgccctaaagaaagatttatcaacaggtggcctttagatggcagatttcagcttagagatgtgcatgccattttaaagttcctgtgtgtgctaaggattaaaacagttaatcaaagcagcttaatctaataaatgaattgtaaaggaaaatttcaatgagctaagagttcagagagacaatgataaacctcaccctcaacctaggaggccagagcagaactgagatcttttactgatagatgtatacattgcaaatgacttgtcaaaaataaaacctctctcagtgaattctactttttcattctaacagttggaaagttggggaaacacacctacataacaactgtttattactaaaaaggcacaaaactaatccaaactcaattctactccttaatgtagctacctgttttttaacagcaacgcccaacagaactttctgtgatgatggacaagttgtatgtataactgagctatgcaataaggtagccagtagccacaaatggctatttagcatctgaaatgtagctagtctgactgaagaactaaagttttaattttaatttaaatgaattcaatgtggctaggctactgaattggacaaggcagcttgtccataggtaactaagcaaaagggtacttggaaagagaacatggatagaagctatcaccatttcttttaaaaccgtaatgactgactgattgattgattttagatggagttttgcttttgtcacccaggctggagtacaatggtgcaatcttggctcactgcaacctctgcctcccaggttcaagcgattctcctgcctcagcctcccgggtagccaggattacaggcgcctaccaccacacctgggtagtttttgtatttttagtaaagacagggtttcaccatgttggccaggctggtctcaaactcctgatatcaggtgacccactcacctcggcctcccaaagtgctgggattacaggcgtgagccaccacacccagctagcgtactgatatattaatatgggatattacactcacaacagtacgatatagaaaggtaaatttgtttttctggtaaagtaaatcaaatttggactataaggtttaattaacattatgttacaaaaaattttaagccaataatccaatggacccaagtaaccctctacttgttccatattcccctaaaggatttaagtgaatgtactgacatttattctaaaaaaatttttctgcataaaattgtcataagacatctaaaaagctattcaaattaactgtaattgaattactagttttaaatatccacttacatggggcatatggagacaccaacttacagcaaaacaaaaacacaacaaagtttcctatgatagacaagggtaaaaagatgttacttaaacaaaagatagccttaaaaatgccttcataataataaccagatgaatgagggcacactattatgacaaagcaaatttaaggtttgaaagcaagaaatgtgataactctgtctctctgcctttcatctcctcaactgccgcctgctccacttaagttctgagaaagtgatctatgttcttacaaacaagacatcagactttgaaaattaccataacacgaacctgcttactgcctagatagctaggtgatcgctggtgagagcaaaagagggtggcaaattagagggcacgaagaatagttgggaggagaaataagagaccctaaatgaactgctctttaaagaactatggcttaaggaaaaaagggaaaagtttttttccttgactttttcttttaaaatgggagacatgaacatttctgatatgctaatcattcttttggccaatctgccaggttacatagaaaataactgtaggttgccaagctgatgagttagtaaaaaaaaaatggaggagagggtaaatagatgaattaagagggggaggctgggcacagtggctcatgcctgtaatcccaacactttgggaggccaaggcaggtggatcaccctgaggtcaggagtttgagttcagcctggccaacatggtgaaatctcatctctactaaaaatacaaaaattagctgggcatggtggcaggtacctgtaatcccagctactcgggaggctgaggcagaagaatcacttgaacctgggaggcagaggttgcagtgagtcaagatcctgtcactgcactccagcctgggcaacaaagcgacactgcactccagcccaggcaacaaagcctgggcactccatccaaaaaaaaaagaagagtgggaggtagaaaagacagaggctgtaagaagtgtgaaagaaattaagctggtctatattcactctcaactgagaattgagatctcccagaatatctatgactgatatttatccaatacactttgttaataaataacctggtaatctaaaactgacttttctggagaactttctaatatgtaggaattatattttatctatactgtatttattctactgtgtagtagaaataaaattgatatggtttcgatttgtgttcccacccaagtatcatgtcaaattgtaatacgcaatgttggaggagggcgctggtaggaggtaactggatcatgggagcaaacttccccccttgctgttctcatgatagtgaatctcacaaaatctggttgtttaaaagtgtgtaacacctcccccttctctcaccatgtaagatgtgcctgctcccccttcaccttctgtcatgattgtaagttttctgaggcctccccagctatgcttcctatacagcctgtggaactgtgacccaatctcaggtagttctttatagcaatgcaagaaccaatacagaaaatcagtactgggaatggggcattgctataaagatacctgaaaatgtggaagcgactttgtaacaggataatgcgcagaggttggaacagtttggagggctcagaagaagataggatgataagggaaacttcggaacttcctagacacttgttaaattgttgtgcctaaaatgctgacagtgatatggacaatgaagtccagtagtaggtagtctcagatggagatgataaatttattgggaactggggtaaaggtcactcttgctatgctttaccaaagagactggtggcattataccccggtcaagggatctgtggacctttgaacttgagagtgatgatttaggctatctggtggaagaaatttctaagcagtaaagtgttcaagatgtggcctggctgcttccaacagagtatggtcatatatgtgaacaaagagatgatctgaaactggaacttatatttaaaagggtataagacttcagaaaatttgcagcctgaccgtgtggtagaaaagaaaagctcattttctggggaggaattcaagccagctgcagtaaagaggagctaaatagccaaaacaatggggaaaatgccttgaaggcatttcagagacctttgttgcagcccttcccatcacaggcccagaggcctaggaggaaagaatggtttcatggcctgggcccagggccctgctgccctgcgcaaccttgagacactgctcatgtcccagccacttcagctccagccatggctaaaagggcccaggatatgtctcaggcctctgctccagagagtgcaagctgtaagccttgggggcttccacgtggtgttaaccctgcaggtgtgcagagggcaagagttgaggcttgggagcctctacctagatttcagaggatgtatggaaatgcctggatgtccaggcagaagtctgctgcaggggtggagccctcatggagaccatctactaaggcagtgcagatgggaaatgtggggttggagcccccacaaagagtccccattgtggcactgcctagtggagctgtgggaagagggtcaccgtcctccagactccagaatgctaggctagattcactgacagctttcactgtgcacctggaaaagctgcaggcacataaccccagtttgtgatgtaacctcactgtatcttggaagtaactaacttgttttttagaggcttatagacagaaaggacttgctgtctctcagatgagactttggactgtggacttttgagttaatgctaaaatgaattaagtctatgagggactgttcataagggtgattgtattttgcaatgtgaggaggacatgagatttgggaggggccagggacagaatgatatggtttggatttgtgtctccacccaaatctcaggttaaattgtaatccctaatattggaggaggggcttggtgggaggtgattagatcacgggggcagacatctcccttgcagttctcatgatagtgacttctcacaagatatggttgtttaaaagtatgtagcaccttcttcttctctctctcttcctccttctttggccattaagacattccttcaccttctggtataattgttaagttttctgcggcctccccagccacgcttcctgtacagcctgcagagctgtgagaagattaaacctctttcttcataaattacccagtctcaggtagttctttatagcagtgtgagaactaacacaataatgaaaatgttgatttatcaggataaatggaaaataatttgttcagccaaattaacatggtcaaaattatgaaggatattaagtaaaagaaatgttctcaaagtaaacagtaatataaaaactttaaagtattttctactgtctaaaatacttaaagatactgaagatcctctttaatatttgaagatagcagtatagaagtatgaatgaaggagtattccatgttaatcttgaaacactcctcccaaataacacaaccagatttcctcaatgtatgggctctaattttcaaaacagagtagcaattatcattcattaagttcatggtagatattattccaccagtatacgtttaggacagatattaaaaatgtcattaagtatatttgtatagcacttcagaaactggaaggtgcttttagtgtctattatacttcatagtggcaaataatcctttattacattccaatatgctatataatttatttattctattgtctttttcctcctctcatgtaagcctcatgattttggggatttgtttatttttgctaactccattatctctagctactagagaatttctgacacttagtagttgctcagttagtatttattgaaggaatatgtttaaaattatggtgaaatcaaccacagcgctttcattttgagattcagatttatgggtacacacaaatcattattttgccttactgttgtacaactcagacagtaacagcaaagagctaccagaaataagatacattaattgaaaattatttataaacagcagacactgtccccttgttaaaacgataaatccaaagctcagagtttaatgggtttattctccttatcaaattcctaacagatggtatgacaaattgaattagaataatgtaaattcactccaaccagaactgtggttaacattttgataactctgcaactttacttagctactttgatttcaatcactcatacatttttcatgtcttgccttatttaaaattcacatttaatgctcatttcccataatatagtgattaaatgtaacagcaaaatcaccttccaacctctaagtgctatacaaatataattatagtttttaatttatattcggtaataaacatggaaaaatttttcttaagttttaattttgaactgtaaacagaggaacagtatttctaaatatgttctaaatatttctaaaatgttctattgacatagttagtttaatgctccttatcttctaaaattcagaaactaggaagttcaacattaatgaacactttcttttctctcaggttgtcccagcatcagctattgaggctgataagcaaaagggagctgctatgcaatttcaggattggtgccgacatcttcacctgtgctcacactgtctgcttccactcactcataatcctgttctctctcttgaaagaaaggctaattaggataaatatgctagtctgccttacttggatggtggaagaacagagagcagtgttagaatcactgtttcattaccagctgacatctgcatggttcttctgggtaaggaccagcaacaagactgtcttgtgtgtgtcctttttcttcctagctcctcccatctctctgattaacaccaatccaataaaaatttctcaaaactatattatgttggcatattattgtttgtttagattacaatctatatggaaattgcatcaccccactctcttaggtcatcagaaatgagtatttttggctattccacagaatgtgtattcattaaatatcgtgagtagaaattatttaaaaattaagcatgtcttaggacctaaactttagtccttgcttgaatattcacatttgtgtaattcatttccaatcttgcctaaaagttacttaatagctcctaaattcctaagagtccatgtcattttctttggaagcataaatttaggcacctggacattttggaatcagagacccttggtctctaacctttgtgatttttggaatagttacccagactctctactcactttccttattcatcaaactgggataacacagaacctacttcatatagttgtattaagaataaaattaaaaactgtatgtaaagtgtacaatacctggtaaataatatccaactattatttagataagagacttacctaaaagtataaattccctaaatatttactgagcataaggtggactagtttcttccaactagagggtgacacttcacttcctctaaagtagagataaatctatctttgtcttctttcttcacaggccattattatttgcatgtaataagaaaaattacacttttagcgtctattatacttcataaaggcaaataatcgtttctggagaggtgatgtctctttatcagttttccagtaacagttactgtaagttatttcaacataaaaactgtatctttgagaatatttttgatccaagtagtagagactttcaatctagatttaagctgttttcatatagctgataaaacatttcttttcatctctgttagactattgggataaatgaactatgactctgaaacagaaagtcatttctatgtattctaataaatcattttaatttataattatgatattcttattaacaggatattctgggttatatactctgcttgttttcaactttaaatcactgatttaaaagaacacatttttatcaatgacttaaaaagcactcaagatcatcattatgaacatatatatactcctctgttgcagaggaaatatcctcacaaccaaaatttatgtgtgatctaaattttaaacgcaccctagacaccctaataaagttaggcaggaggaaaaaaaaatgaggctaccatcaataggacaggtataaaagtctggaaaccagctcctcatatatgggttgttagttaaatcacaagtctttaccagatattgttagcctagtttcaatgatttttctttaaaaatattctattatttaaacttatcaccaattaagcctactttcactctcacccatccctactcctgttcaaataaagtattactaccagagccatttttaaagtgttcaaactaaatgatattaaaaggaagttaagaaaaaaaaataaccttgagcttttattttcaagttgctatggtgtgaatgtgtccctcaaagttcatgttttggaaacaatccttaaagcaacagtgttgggaggtggggtctaataggtgattaggtaatgagggctctgaccaaatgaatgaagcaatgtcattattgtaggagtgggttagttatcttcagataacttttgtaagaaaccactgttggccgggcgcggtggctcacgcctgtaatcccagcacttcgggaggccgaggtgggtgcatcacgagctcaggagatcgagaccatcctggctaacacggtgaaaccccgtctctactaaaactacaaaaaattagccaggcatggtggtgggcgcctgtagtcccagctactcaggaggctgaagcaggagaatggtgtgaacctgggaggcggagcttgcagtgagccgagactgcaccactgtactccagcctgggtgacagagcgagactccatcttggaaaaaaacaaaaaaaaacaaacaaaaaaaatccacttttgttataaaagtgagtttagctctctcttgacttcctgccttctgccatgggatgatgcagcatgaagacccttgcccaaatgcagggccctcaaccgccagaactaagaaataaatctgtgttctttataaattacccagtctcagctattctgttatagcagctcaaaatagactaagataagtatattaaagatcaccaagctaaagttcagaattcccattaggctttatacttcaaagtgcaacttttagttaatacatgatgtttgccattacaggatgggaaatgagaaagaggctaatgccagattgaattagctctttacagcttcctgatcacaagtggtggggccccttacttaagtggaaaaaagttagtgtcagaagcaggacatagaggaacagtttatgttcccttcgagtaataaacaaccagttctaacttccaaaccaaatcaagaatttcatattgagattcaaattggtccctgactactgaccacaaacagtatatggtaaagacacggagaatcaaggaacagtaagattaaacatagacactaattcatctacgacttaaccaagattacagatttttcttgttggaaagattgctaaggagctgactttgggtctccttctagaatggttctagaaagaactaactgaaagtaatccaagaggctctacacagagagcagccagatacatacttactcatcaactagcaaggtcaacttacactgaaaactttgtttggtacagactgaatgtctcttatctgaaatacttgagaccagaactgtttcaaatttcagattttggaatatttgtattatacttactggttgagcattccaaataacaaaaatctgaaatctgaaatgctccaatgagcatctcctttgagcatcatgtaggtgttcaaaaagttttagatttttgattttgaatgctcaacctgtgtaacaggaattggtccaatcttataaaaaagttttagctaggtgtaaggtgatacacacctgtaatctcagcttcctgggagactgaggtgggagaattgctcgaggtcagcctaagcaacatagtgaaacccttattttaataaaatgaagaaaggaaaaaaagctaaacaaagctaagctagcttaaaaaaaaaaggttttttttcctctatggaaaagaaagcaagccaattataggaagagagaaatgctctaagaattatttgtacactattttggcacaagatgaaaactgatagtatgaaccaacagtattgaaaccctggatctcttcctgcttaggtctcactttgggctttgttaccttacagttgagtttcattactagctcctgaccaccctgggctgccttcctctttgccattccttagggaatggtagtgagttggtcattaaatatctttagagattttagcagtttgaactatgatgcatattagagtatttgatcactaatatgtatgaaaaagttcatagtgtcttagggtcaaggctgtaagtatttaggaagtttatgcacctgtcttctaatctgagaagcagacaatttattttaatggtgaattagtccattcttgcactgctataaagaaatacctgagacagggtaatttataaagaaaaggggtttaactggctcacaattccgcaggctgtacaagaagcatggtagcatcagcctctgcggaggcctcagggaactcacaatcagggcagaaggcaaagagggagccagcacctcaactgactagagtaggaggaagagagtgagggggggaggtgctacacacttttaaacaaccagatctcatgataactcactcactgactatcatgagaacagcactgaggggatggtgctaacccattcatgtgaattccgcctccatgatccgatcacctaataccagtctctgcctagaacactggggattacatttcaacatgagatttaggtggggacacagatccaaaccatatcaaatggtgaagcataggttaaaaaaaaatcaaccttgtgaacattaaaaaatatctgagtcctcaaagtgtgtttctcaggtccttaaagcatatcacctgtggcttggaagtacataaaatgtaggctcctctttctttttcattattgtaaagtcagagaaaaagccaacttagagccatgcccacagtacaaaatctgttcaacaagattagattgtcttttgttatttcttccttcctttgtcttcattttataaacgtatgcatgcacacagcttttaaacaagaggctaattgattaggaaaccagtgttgatttgatgtaagcaacaatccaaaaagtagaaaatattattattgtttactacaaatgtatggactcaaaactagcttaactgttattattcctcaagagaatttatttttactcagcctcttctcggagaagagtgctttagaccaaagctagcaattataaagctaagaaatcaggcaactgcaatactaccaaactacaaaaaatttacactaaactagtaaagttaaatgtcatttttaaaaagcccctcttacattctagtctattgacaggcattgtgttgggaacttggtagaggaaagaaaacttcaaaaatattttaaaagatttaccgacaacaaatataccttgttatttttctagtatgtaattattattatgacttttttcccccactgatttctaaagacccgtatactgatataaaaactaaaattttgtgcaattcaagatcctcatttccctcctcttttctaaaataatttttttttttttgagacagagttttgctcttgatgcccaggatggagtgcgatggcacaatctcagctcactgcaacctccacctcctgggttcaagcgattctcttgcctcagcctcctgagtagctgagattacaggcatgtgccaccatgcctggttaattttgtatttttagtagagacggggtttctccatgttggtcaggctggtaccgaactcccaacctcaggtgatccgcctgccttggcctcccaaaatgttgggattacaggcatgagctactgtgccggcctacaaaaatcttaaacaaaaaagttgtaatacactagctgatcactgtagtgaaaatgaaaatgcgtatttgtgagagctgagaaatgacaccagatagagaagaaattatttgactctaatttttcttacaaagattaaattgggattttaatatataaaaccttgaatatacatagaatattaaacgaaatagttctaattcaaattgagaattgtcttttacactgaagggaactatgatttcaaaaacaaaggacttattccatgcttacatgctgagatattatcagagctgaaatgttaagagatggtacctaaggtaatatttgtatattctctatataatgactgagaaccagttaaaaggcttattttaaaaagctagaaaagcaattacgaaaatttagggttctgtggaaaaattcgatcatggcatgaactccattaatgatgatttgccagcaaacactggttagaaaaagctggctgagagaatagcaaggataaccaattaggattagaacatcagccctattgctataaaataactattgacagtagatcaatggtattaagatcacatatactagaaccagactgccaggctttaaagtccaggaccaacagttatgagctgtgtgacttcaaactgtatttcttaggtcgccaaggttcagttctatcacatttaaaatagaaaatgacagtagtcattccaaagctatcttgagttaaataagataatccacataaggggtttagcacagtgcctggcacataacaacagcttgccatcaccactacagcaaccctgggcagtccaactttttggctgtttccttaaatgtaaaatacagggtttggactagataatttctaatgtctttactcatctaaaattaaaattctacaatgtatcaacaatatacaagccaactctatttccaaagaacataaatttggattttcaccccagcatgatttaagtactgtaaaagaaacttatttttaagatatccttttatttttatttaattttttagagatggggtcttgctatgttgcccaaactggacttgaactcctaggctcaagcaatcctctcaccttaacctctggagtagctgagattgtaggaacacaccactgttcctgttatgtcatcttttgaaattagctataatcactacatttattaaagctgaagttatagatattctatgtaatccacaagaaatccataatcttccatcacatactgtttggtgaccataataatttctgaataacaagtcctaacaggaatttcaaggtatataatcccccactatatttttttaaacaataagaacatttcataccccatacttagtaaacagaaaataaagatcatgaaaaatttcaaatatataatacagaaaaaaggaaagaactattttgaaactgtccaaaatctagaggtttaataaagtctctctactgatatgttacaactcaaaactcaaattacaggccaaattttttttgcaggaatattaaggttttttttagtatgactcataaatatctaaaccaaaaatcaattgtaatatgacaacactaactgcaccaacccaaataaatccttccaatagggcttttttttggggtttctttttggatttggagaatttttcttcatatatcttagggacattattaaaaaaattttaaaaaccttttcaggttttaaaaattaccaacagtgtgtgtgatcactgaaaagaggttaatctaaaaattttaaagtatttttccagataataagatcatactggtgagaaaagagttcgggctcatctcactcaaatacttgcataataggctcgaaagaataaaaaaattgttatgttacttcttaatataaaaaacacacaggtctgttaaaatctgacaattcaataagctctcaaaccagaaaacacgtttcccagtcaacactcatacttatttctgtattaggaaaaatggggttgttgcaggggtctttaaaaaaaaaagatttctcttaaattcgtaactctgttaactgcaccttcatttccagaaaccttatctttaacaaatctctacactattcatacttagcacaatttccaatcattgaagatattttagttttaccttacaatcagtacaaagcagctgtgttaaattcattccataagatcaaaactatactgtgtccttaccctcaatatttagctcaaaacaaatgtggcagaaggagagtgtttctttgtctgttcccagtttacaaacactgcaaatgttgtcatcattcaaatcaatgtttacaaactgctcctcttcgttcatagtgcccctattaagaaacagaaaaggaaagttacacaatttcatgaacctgcctttggggtagttccctttactgggaacttctaggaaataaggatgctgttcagctcatttaaagcaaaagctccatcaaacaagcatcgccatacttgcactccaacattgcacttttcctgtggaaagacacaaagctagtaaaacttaaagccaggccataggtgacactatgtccgtgtcttttttgtcctatagttgattgggttagtggcacctgaaggaaagagatttgccggcattctagtcctcctccttcgtcccccaacctcgaataatcagagggcttagcagcgaggccttttcagctaccaggttctgtcaacctagttaacgctgtgagaaacaggaaaaacgacctgcacgggacactgctttgctaacttcattgggggaacctcagatgcgcctcgcgaactcggagttgcgaagcttcgcatcgaacggagatcggcggcagcaaaatgcacgtgggtaccgaatacccggggagggcgtcccgccgtgtccggggcaactacaccgaaggccgagcggcggcttcacggtaccggccgggcaccgccggaggggcccaagccggagctgggagagccgcggcatcctggagcccggcgggcgggagagcctcgtcccatcgctccgggattcctcccagagggaagaaagcgtccgagggccacggcggccggtccgcccagcctcagcgtctcggggagccgggtcctggcccggccttcggcgttgggggcgcgcggccgcccccagggagtcgcggacccaagtccgtctttccgtcggtctgtccgtcggggcgcctggcgcgcagcagcgcgaggggccacggggctcggaactcgaaggaggcggaacgatgggactgggggtcggggctcaggtgggatgggagcagggctgcggggtctttaccgtccggctccgcgggccaccaccgccgttccgtgcggctcgggttcctccactattgtttccggccgcagcagaggcggccgccgcgcgcctggccccgccctctcccgccggctccatcccgtaaaggctgcggggagggtggcgcggccgcgggcacacctgcgcgctcgccgggctgctgtgggtccgcccctccgctcctgcaccgacgccgcaccttcgcctcgagttctcctgtgatcccgtgtttcctggccggagtttcttaccgttctctggaacgtagctcctcacacacccctcctcgaggtgcgtagatagacgaatccgttccacctctcccttcagcctagtgcaaactactgccccggggcgggggccgcaggcggcgggggtaggaaagccgcgggtggatggcagaacgggagaggtgcgtgggtggcactttgacttcaggagaaagaagcagaatactgtcactgaacttatagttaagtgccagttgaagtatctaacgaaggaaaagttcatattcaggtgtcatgatagaggcataatttcaaatacagaatcttttcaaatacattatttgttgtggggcgcccctgcccccaatatggtacatccctcaacgcccacgggaaaaatcccgaagccccacctcttatttttaggtcctgcttggttctcaaattctttgcttgacttttgtttaagctattctgttttttttagggtatggttcttgcagtactttcacttacattttccattgtagtcctcacagtaacctacagaggagaaacaggaactgttctctcatgttgcagcctacgagtaattgacccaggttatcacagttggttagaaaaaggctgggacttgaaccgaaggctactgacctaagatcaatgttattttctacagcatcatatgtatgtgttctggttgcactcacatagaaagagggctagcctgtcaatctacatgtaggcattcttgaactgatggttaggaatggactgtctagatcttggaaacttctgggccaaattagcactccagttatggcatttgtgcctcgcaggagcgatctgtgtccttgccacctaaattgtagtagatgaacaaacaacattgacattacttggtttcctgttagaaatgtagaatctcaggccccactcgagatttcctaaatcaatacttgcactttaacaagaccgccaggagattcctatgttcatcgaagtttgagatgcactaattgaaatgaaaagcctgtgctttttctcttcgaatttctcattctaggtaactacgactaagataccttgcatgttggattctacccatcttttcaataaaaagcattcttttaaaaaggactcttttaaagtgattcaataaaagtgttctaaaatcactaaaatttaaaaattgaaacaagttattttcacttctcagaattgtcttccttcctatggcatttcacattgtttacttgctattcttaaaactcttctctcttgt

SEQ ID NO: 155 - DNA, 415 bp, Homo sapiens
ttcagaagctgttcgatggcaacgtggcggacatggagctgtgaggccaaagaatctttttcttgcacttggttgtcccagcatcagctattgaggctgataagcaaaagggagctgctatgcaatttcaggattggtgccgacatcttcacctgtgctcacactgtctgcttccactcactcataatcctgttctctctcttgaaagaaaggctaattaggataaatatgctagtctgccttacttggatggtggaagaacagagagcagtgttagaatcactgtttcattaccagctgacatctgcatggttcttctgggtaaggaccagcaacaagactgtcttgtgtgtgtcctttttcttcctagctcctcccatctctctgattaacaccaatccaataaaaatttctc

SEQ ID NO: 156 - protein, 134 aa, Homo sapiens
  VARIANT (1)...(134): Xaa = Any Amino Acid
MATWRTWSCEAKESFSCTWLSQHQLLRLISKRELLCNFRIGADIFTCAHTVCFHSLIILFSLLKERLIRINMLVCLTWMVEEQRAVLESLFHYQLTSAWFFWVRTSNKTVLCVSFFFLAPPISLINTNPIKISX

SEQ ID NO: 157 - DNA, 113106 bp, Mus musculus
  misc_feature (1)...(113106): n = A, C, G or T/U
caaagtccttgcttttgtatagattcaaagtaagtgcggagagaatgctgggttctggaggtaaatgagttgtctcaggaagccggaacccaagtcatgtgagtgtggtcctgaggggactactcaggcctaaggtgggggtcctcctgagaagcctgagctgagtaaggagaccggaaggtgctggcatagagctgaacatagagctggggtggggtggggagtgtgggtaaaatctaaaacagcgtaatgtgcgagcagcaagtatttcaactgccgagctcagggaaatgtcttagatgctgtggggtcatttgaccctgcaggtccctgacctcctatggacacacgccagcagcccaaaattattacaagtgggatgcgtttctccagccctgagaccgtttttcacacagcccaggctggccttgaactcgcttaaccttgggtcgacttgaccggctcctccttcctccaatcagagtgaagggagcgcaggtgcgctcggcctcacctcactctgagccctggttctctgctgagaggggatctcgctctgtagcccaggccttccagccgtcgccctcttgcttaattctcctgaggaaccggaagcaccatccagcccgctggttgcctaggagttttgagcaagcaggtgatctgtcaccttgtgggtaggatcccgatgactgccatgttttcttcctgggatctgctgctcccaggttccctaagggagagtgagggggcagagctggtagaagggacaaatggttccccgggggagcaaggcacccgggcctactgaagccatgcaggtggtggaacacgggagcctgaggcttgcctactgctgccttgaagactgagggttaaagtagcagggtagagtttggcgcagtcagttaggggggatattgaaccagagctgctgcctgccagccaggaagaaactggtatgccttgctcaacctcaggtcccaataataactaggcactctgagaaatagcagtggccaaggccatgtgtttcacgccataggtttctggaaccaggaagtctttcctggtgggaaacaggtaggaagggctctcaggattggagctctgagttcttgttcatcagaaggaccctgtgaggactggggaacccagcctggtagcatctcagcgtagaagaaccatccggctccctggaagctgagaagcagaaaagggatcagaggcagggggcctcactgagggtcatctgttctcaggagcacagggagctgtgggggtccccagaggacagcaaggcagtggccatgttggagcacttctccatgcttggcttggggcagagagatgtttgctttctggtgtctgtctcattctcctgaaaactctatgatccttgtgcgtatgaatcgtggacatggacattatctggggtcctgcagctgggcaggaagagccggagcctggcctgagaaggagcttagttcctgggtcggcatcgccatctctctctctcccttttccccctccctctttttcttccttctttcgcagggtctcacatgtcccaggctagccttgaactcacagtgtagccaggatgactttgaacacccgattcccccccacccccgccccgaatccatctcctaagtgctgggatcacaagcctttaacaccacatctggtttctgtagtgctgtgggtaggacctttgcacgtgccgggcagggtagctctcccattctcggtcccatcccttttatttatcttttgtgggatttccgttggcagtggaatcagggatgatttagactggacgtggaggagcgtggggagggaaggaaggaatgttctgggatgctttgagtcacggatgcggatggtccacatagtgatcaagatgcccttagacagcaactcaccgactgacagagaagctgctaagctcaggcctggcttaggcttttgtatgtgtttttgtgaccattttcagctccagtgtccctgagcttagacacagtcctacctttctggagcagacccccccccccccctcctgctcctctgtactgtggtctgcctcctttcgaagttttagcttgtgtgtagatttcttcttgcaagtgaaaggaatagcgtgtagcagcaggcctggagctaagcagctaagcacgctggggcatgtctatcctctgctgtgcataactcaggagcccctgaggggccccagcaggggtgaggttagagacctgttagaatcttctctggctaaggggtgaaattgttacgtgaataggtttgttttgttttgttttgttttgttattgagatagagtttctctgcatagccctggctatcctggaactcactctgtagaccaggctggcctcaaattcacccacctgcctcggcctcccaagtgctgggattaaaggtgtgcaccaccacctgccaggctacatagaaagggttttgtttgtttgttttgctttttgtttttgtttgtttgttttttgttttccaagatagggtttctctgtgtagccctggcccccctggagttcactctgtagaccaggctggccttgaactcagaaatccgcctgcctctacctcccaagtgctgggattaaaggcgtgtgccaccacgggtccggcttgttttgttttgtttttttaaagatttatttattttatgcatatgaatacactgtagctgtatagatagttgctgggaattgaactcaggacctctgcttgctctggctccacttgctccaacccaaaagatttacttattattatatgtaagtacactgtagctgtctttagacacaccggaggaggacgtcagatctcattatgggtggttgtgagccaccatgagattgctgggatttgaactcaggaccttcggaagagcagtcagtgctcttacccgctgagccatctctccagtccccatagaaagggtttttttgtttgtttgtttgtttttgtttttttttgtttttgtttttttgtttttttgagacagggtttctctgtgtagccctggctgtcctggaactcactctgtagaccaggctggcctcgaactcagaaatctgcctgcctctgcctcccgagtgctgggattaaaggcgtgcgccaccacgcccagctctggcccaggttttttttttttttttttttaagatttatttattatatgtaagtacactgtaactgtcttcagacactccagaagagggcgtcagatcttgttacggatggttgtgagccaccatgtggttgctgggatttgaacttcagaccttcggaagagcagtcgggtgctcttacccactgagccatctcaccagcccctggcccaggtttttaaggagagagaaaaacaagtctcaagtctaaggagactcacatgccagtaactgggcaggatctgtaacccttatctcactgtggagcccaggctagccttcccattggctctcataggcagtaaggaggggacctgggcctactccttccctagcaaggctgactccgtggcctgcctacatgagtccagagagatagcaggaagagggggatagctcatgggtagatagaggttggggtaaggctgtagagcttcagggctggtcttctggagggaagctcccagggtccagtatctgggacctgtagagatctggtgaggttgattcctggggtcagtgcgactttggatgttgaagttcaagaatatgaatgagagccgggcttggtggctcgccttcagtcccagcactctgcactcaggaggcagaggcacacagagctcgagctctgcgggttcaaggccagctgagtttgcgtaggaagttccaggacaaccagggccatggagagagaccgtgtgtcaaatccaaaataatgttgaggaagtctgggaggttgtacttctggtccaaagcttggctctcgtgggatgctgaattgataagtagatgcagaactctcatcttcaatatcctgaggggctgaagtctgtgtctctgttggacgaggctctttctcattattctgtttcccacaacttcctcaaaaacaactgaaggctgccgccgcccctgtggctgcttcagcctgcaggtgtcaggtgaaagcaagagcctggaggattcatgaatgtcttgggttacaaagtgagcccctcttaggaatcagaaaacacatggtgggctatactgggtgctctctctctctctctctctctctctctctctctctctcacacacacacacacacacacacacacacacacacggtagagttctggctcagaaagggccaggtttatccctagtagtagggagactctggtgtgtgtaaacattgaacggttgtcccttctgccgatttcataaactgctccaatgttacataaattgaatcatttattcattaagttctggctagtcttgaacttgtgagcctactgtctcaacctctaaaactggcccttttgattctttccctcctcccatagcaaatttctttcttttttttttttaaaagatttgtttatttattatatgtaaatacactgtagctgtcttcagacaccccagaagagggcatcagatctcattatggatggttgtgaaccatcatgtggttgctgggatttgaactcatgaccttcagaagagcagtcggcgctcttaactgctgagccatctctccagccccccatagcaaatttcaaactgcatctttcttttctttcctttcctttcctttcctttcctttcctttcctttcctttcctttccttttctttttctttttttggttttctgagacagggtttctctgtgtagccctggctgtcctggaactcactctgtagatcatgctggccttgaattcagagatccgcctgcctctgcctctcaagtgctgggattaaaggcgtgcgccaccactgcccggctgcatctttctttacattgtgtgtgtgagagcctttgtgtgtgcatcggagagaacaggacagcttacaggaatccattcctgctttccaccacgtaggtcctgaggattgaactcagcgaggcaggcttgatagcaggtgactttacccactgacccacctcgtcagctttcagtaaattagaactgtattttattataatagctgtatttttattacttatttttgtgtgaatgtatgtggggctgtatgtgccaaggcttacatctagaggtcagacacagcctaaaggagctggtgagcttttctccttacaccggatgcgtcctgggaatcaaattcaggactcctgccttggcaggagaacacctttaagtgctgcacatctcttggggcataataaaagtgttttgttttttttttttttttgtttgttttttgtttttgtatgtgggttttattctttttcaaattttatttattttatgtgcatttgcattttacctgactgaatgctatgtgaggatgtcggatgccctggtattggagttacagatggttttgagcttctgtgtgggtgctgggaattgaacctgggtcctttggaaaagcaaccagtgctcttaactgctgagccttctcttcagccctgattttattatttttttaagtgtgtgtgtttatgcacgtgcacacgtgtgtgcagaggtcagccttttttaaaaaaaagatttatttattattattcataagtacactgtagctgtcctcagacacaccagaagagggcatcagatcttgttaagggtggttgtgagctaccatgtggttgctgggatttgaactcaggagctttggaagagcagtcagtgctcttaaaggctaagccatctcaccagccccagaggtcagcttttatactttgtattctccttccatcaagtgatccagggaatgggaaggttgttaggtttactgcaagaacctttacctactgagccctcttgcaggcctggagggaagctttgagactgattgggggcggggcacaccattaatctcataggtggacctcttgagttcaaggccagcctggtctacagagtgaggtccaggacagccagggctacacagagagaaaccctgtcagaaaagaaagaaaaaggggaaaagaaaagagattgagcccaacaggctaggaaactggccatgggctggctttgttggtttaggtgggtgtgtaggtgaggaagtgtgggccggcaggattggagaccttgcctagaccttgcagctggtggtgagtggagcgcctgcgattcacagccgtcagtcagtctgatgctggcagccgcacgcccaaccactgcgcctcttgatgtggggaagagaggaaaaggtgaacaacacaagagaaatgggggccctggctgcactggggcgcagaggcagacctcggtcggtctgcagggaatccattctttttattcttgaggtgctgaggatggagcccatgaccttccaaccacagagctgcatcttcagcctttgggtttgggagacaggaacttgctatgtagcccaggctggccttgagttcagcctcccaaaggacggaattaccaccacaccagggtttggaggagtcctttctgaagctggacagaacagctagacatgttgagagccagaggagggagatgacctcgtcttagggttggggaagcagagagatgggctgggggtgtggggtggaggattggggtggggaggtggaaagcagagctggaggccaagtgcaaaggccagacgaggggccggatgtgctagcaggtggacagaacagatgggcatgcagagcgaaacgaggcaccgagctaggggcgggcacggagctggtggggacgggtggtcagccataagacgtgagcttgtgctcttagagaggtggcagtcctggatgggtgttgaggagggacagaaccagggcaaggattgctgatgtcctgggttgtgtgtggtgtgttctcagcatctgcaaggacaggaatagaggctttggtagaagaccatggttttctttccttccttccttccttccttccttccttccttccttccttccttccttccccctggctgtcctggaacttgctatttagacccgtctagcctagaactcacaaagttttgcctctcccaagtgctggggttaaaggtatatgtttatattcctggccctattttgtggtatgcctgttaaacctgtggatagatggtttacagtttaataatccaggactggcgctgggttctgttttgggcactgtggtgatgggctctcagagatcttcaggataaacattggacccgggcttcgtttctggctgcttcgctgtcccgtgcagtatgggctgcaacccagtgtccctagcctctccttattccatacctggagcatctgcaccctcagctcctagctgtggcaatccagaacctcttcagaggttaccacatgtcatttgggaggtgaacgctttcctccattgagagccaatggtctaatgggagggagaggcaaacagcaaagcaacagggacggcagcaaagcagctctgggtaatactgaactgtcttccttctgactttgttttgaccctctgtcacactgtctctctctctctctctctctctctctctctctcacacacacacacacacacacacacacacccacacccacccaccctgtgctgtcagccatctgcctgatggggcacaggctgttcgtcttaccacctgccctttgcccccacccttcctattctccctcttgccactgatctaattctgccaaccctttctagaaggaagtaaaaccatgctctctctctctctctctctctctctctcacacacacacacacacacacacacacacacatgcacacactcctcccaaggcagacatcttgtcttaaggaggaggcacaagttttgtctgcctctggctgtaacaggatgctgtcagtttcgtccttaaaggtgggccctgctgtcactgtcccctaggttggctctggttccagttagccaaacagaaacgacacaaaaccaggatattttaaaccccatccctgcctcagttccccctcatttcaacgcagacaagaagcccgctgcttgcctgcttgcccgaggcagataagtccagagtgcctgcttcctagttgctgcctaagctatctggggatgcagcttgcagaggccgctcctgctgctgctgctgccgccgcctggctgcctgccagaggctttgagaaccatctcagggaggcctggcctctgctaagtgaggcgcaggggaggcaagctggaccagtctctcctctcctccgaggctgtcttgacccagcgaggctcccggaacaccaggttctgaccttgtgagagccacagaactgagctccgtgcataagctgctgcttatggctttattctgagacacggtctcgctgcatcggccaggctggccttgatctcgccctccaagaagcttaaagccagccttggactttccagcctcctaagacagtccctcactccatcgtccacccagtagctgggattgcaggcctgcaccaccatgcctagcaaaagagacaagttttaatgtaatttcattagctcattatttattaatatcactgaggagcctgcttgtttaggcctgtgtcgcttttctgtgcaaagcattctggttaggtttctttttttctgtcgttcccattgcctcggactcccaacctcagtacagtgtacattctgggtctcaaaattcctggcagtgctggcgggggtggggtacgtgggggtgggtactcctgcagtgtttttattgtatctttggtttctattctctgggtgtcagcagccagttcttctctgtctgtgacagcccagaagtctccatttgtcacttccattggggggacgacggggacagattttaagaattataaaaagcatcatttgaggtggcaatctaacaggaggcttggacaggacagggggcttccccggcttctcgtctgtgatgggaggttgcatcagttgaatccgatgtctctcagctctgtgcctcaaagcaaagcccacctaagggtggattgctaagaggaagataaggctcaacattgctcctgggaaaaatgggcctcagcctggcctcactcccgtggctttctccagaggctcagcgatccagggttactactagtgtagatgtcagatcacaggcatctgctagctgtgtgaccttgagtggtgcacagtgtcacttctctgggccctgttcaaggtgtaagcaatccctgccccgatgaacttagcctctgagcaacccagatgcggcccctgagcccaggcttggagaagtagccttgcttctcgcctgtcagccacattccattaggcactggatcagccttggttggtaggcggacctcccggcttcctcctccatcggtgttcttcccagaatcccgtctgcagccttacctttgtctcttgtctccagcccagttacatttcccagataacctcagacaagcctgaatggcagcagcattcctcaaacaaagctgccccaataggtcaccagcatatgccggcagcttcctgctctttgccctagaaaacagttcaagtgatcagagcctgggagagagggagggagggagggaaaagggagagggagagcacgggagtacgtgtgtgtgtgtgtgtgtgtgtgtgtgtgtgtgtgtgtgtgtgcgcgcgcgcgcgcgcgctcccgcttacacaacaagctttaatccatgcgctcccctgctgtgtatgtattctcttttccaattgggaagttaggtgtccccaagacctatcagcaactccgtgtgttgtcgcctcccctcaccccccaagccatacttcatatggctgatagtagagtccgaagccacatgaaggggagggtgcccggatcaggcctcaggttccctgtttggtcccagtaaggtttccctccccagtaagagccgacccttccctttgggtgaagccaggcctgttgtcctgagtgcctttgtcagacctagtggctctggagttgtcccctgctgctatcggcctcagctggttcaaacaaaatcctgtctcctttccaaagccagggttttgtcctgcagtactgtgtgtttagattcctggctgggtctggagcctgagagcagattccccagccagggagagtgcacactggcctgctgggcatctgttgtccttggggggcagggagagcaagccatcagctcagcccttcaattcctttgaggaaacgcctggggaggcaggaatgagtcctagtttcagtagctgagggggactttattgctttctgggtccacctcctggtgtctggctgcatcaactgccggcccctgaagaaaggtgtttatttagcgtcttttttttttttttaagaatcttgttaattaaggatgttgttgtttttaaaaaaatagctaagaataggagagagccttggacagtttttgattctcctctgtgccttttctacaaatgacagtttttaggaaagaatcaggcactggtctcccacccagcaccatcggggagaattctaagcaggtctgaggaactagttaatattttactggggagcagagccagagatggggggagtagggggactgccaatgtgaggctgtgtgtgtgaaattgcccttccatctgccttaggggacgaaaagaagcagttctctgtggaaataaattgaagcaagaagccttacgaagcccaggggatttgtctgcccaccaaacagggcccagtttccccccagaacacacatacaggggcgattgtggcagaaagggccaacctgtgggtgtgtaggcctgactataatggacgggcttgtttcctggcccggtttgacatctttctctgtccctctggatttaaatggcttctctgactgagaggcactgcctgtatgccctggattcacaaggtccacgcctccttgggaagcagaagcgagacagcagctagctagctccctctctctctctctctgcatctgcccggagagctgcagctggtatttttccacaggcccttttctacaatctcagggcctagtttttcccagcgaggcccagagtcccagagagggttaacaggcaggaagctgaaggcatcacagactaagacggaagtcagatttttgtttaactgacaggtttagcaggcctcatcggtggggggagggagcagagggagggaagacttaaatggaggcatgtggcctgctagcaacgcatttggcttttcttagggtaagcctggagagggtatctcccttgccatcctgacagagccctttttggtttgtctttgaggatcggctgaggggtggcggtgagaggttagaggtctcccagttttgcaaatggctctgtgggcctgccttttttccaagagccactttgaccatgactaggcaaacttgatcgctccacctcacagcaagctgcacctctcagctccctggaacctgggtgccccttgctgatttgttggggctccctcgggctgcctgtctcactccccgcgcgcgccccccccccccgcccccctcagaggcctgcgtctggccttgtccctattgcttctgcctccctggggctctctccacccctaagctcgactttgtcctttgagacccactcaagctggcttgttctataaaacggcctgctcgccttcttagagaaggacttgtgtgtgggggcaggcgtggatgggtcagccagcccaccccaaaagggcccttcccagtggcgcgctggcttcaggctttgctggagcaggtcaggctggctgcacgggtttgcctggcctgggggatcgagccagggggtgggagaagtgcttgtggaggcccctgtcccaagttttccctcctgcagaaggcctagcttagcctgtctttttctatgcacaggatggctcttgctcacccgagcctcacaaagataatcgctcaggaagtgtttcagccaatcggcggcggctttacactccgattggccggggcagccaatcggggatgagcttttattaggcggccagatcatcagccgaagtgccaaaccctttttctgtgagaactaggagcctgtcctccatgttttataagtattgacattacacagttaacaatgcatccacagaggtaagctcggctttttaaccatcttttcccccctccctccgagtcatcgagtcgtggactagcagtgtgatttctctgtagcctggctctgccacacttccccccccagagcacttagggtaacttgggactgtttagagagattttttttttcctttttgggtcacatggctaagtagccattagccatagcttgattttacagactggtgagggcttggaatacctttattttgaccaggacaaagaatttctggactagtttgaagctagatcctggtatgccaaaagagaagctattatccccccttcttttattttatttttccctcccttcctctcccccctctccctctctctctgaacagtcctccccctgcactgtcggccgctgtgtgtcacatgcctgctgggggaagaaaatggaaggtaagccagaagccagaaggtcttctcccagcacagttcaggactgcctgtggcagagagcagagcaagccagcttgcttctccagagaggttctgggaaaggctgggctaagttctgacaagagaggatgcgtgtttgcaccagaagtcaggcctgaacaagaacagtactcagggacccaggctggttcctgggcctaggtgggtggtggcgtgtggactgtcatctcttcctctccagagcttcgcactcgcagcaacattgttcagggtttttttttcctccccccgacttagcttggtacagaatgttcttcaagtcagcctacagccagcaaatggttctgaaagtgtttcctagcctctgagggagtttttggagtaggcttggtgcctggggggttgggggtgggtggggtgggagtggggatggggagagattttgaataacatcctgaaggggggaaaaaaagagatctgtgaagactctgactcctttagttttatacttcttgcatgatttttccatgggctaatgtctcttttatccttgtctccctccccccttttcaaacattctatcatcttctgtcttctgtgatacagtgcaggggacatggctcatacatacctgaggctcatgacagcatcccatatccagttgctgggttgtgttgttgtggttgttgtagtggtggtggtggtggtggtggtgtgtgtttttaataataccatgtaactgtttaccaaaaaaaaaaaaaaatttcctttttgatcaagtcccaaatctgccagcctgtcctctcctcctaactggggaaaagtgagacggttgcttgaacgtgtgttgggtaagtaaacctgcctcctctgcgaacgtggatcaagagtttggtgaacctctggggtctgtggtaatgggggtggggagagggtggcttccagagagtgtctttgagtttaggtgatggctggaatccactgttgttcctgctaatctgcagttagggctgcagctctcacttcctgcttactctccgctgggggcaggaattactgggttccttgtgactcgcagctagaccttggattgtgcttggctcttctgaactctgggtaggtgatctgcttgtgaaatgtgaaatgtgagcaaagctgttttgtccttccagggttccagaggcccccccccccccacacacacacagggcatgtgcctgcatgtgcgccttgtgttttcatatgtaagttttatggtgtttacatctagaacagaagcctagccactcccaaactaggtttggcttagaacccactgaccactagatacagccttcacctccctgaaagtctgggccacacacccctgtacatgttggctttgcatttgccctacttttgaggctgcagctagaatcttaaagtcctcaccttcagggtccacctggaaactcaccacatctagttcctgctttgagacccagtcaggctgcatggaagggctgtctctgagcagtggttatcctaggccaacggcacagactcttgactttttttcttctagtgttcaggcagctgaagctttgacatcagttgaaaaaggttcacttagtaaagagagacggactaaattatcaactgggcagtctgtgtggggcaggccggtgtcgccgagtcaaacacaggtggggtataatgttctttaagcagtgccttggccgcacacaagttctgttactctctttattcttatctccttgctgtaagtggaaattacaaactgagtttcttgaggcctctgcagatccagtggctagtcaccaacctcctggtttgcctctctcagcctttgcgtaacttcttgggctgaaaggaaacttgagggcaaagcgtttgtcctctaagagcacgcattaaaatggctcctacaggtttgggaagccaggatctgtttgtgagtgtgaacctcagccaatttcccagccctgactcaagctggctgcttttcctcgtggccaccacagtgcctggggttggtaaaaagttaattgctttcgaagtagcattcttttccagttactaaagggggaactaaaaaaaaaagtctgcattgcagttggaccgggtgggatcttagtgcaggcccacagattagcccaacggggttcccctttcttcctgttctcttaagccagcagatttaggggaaaggttaaagattggcatttgcagtggcctgagtaaggacttctggaaatttctaccatttgttgttgttgttccttttaggaaaagcaggtggccaagctgaggagtctcttgcattccatccttaggactcccccatcccccacttcgctttccctcatccaggtggagggttcaacacttgtgcagattgccgaggcgaaaaccaaacggatgggctgttttcctttttcctcctgccttcttggtccccaaagaggatgcacagctgcaaagggacagatacagacactgatgcacgctcgctctctctctctctctcccccctctccccctccccctccatcccactctccctccagctcccctactcaactctctccccacccccacccccatctccttctctccctctacccccttcctctccctctcttctctcccccccccctttcccttcagtgactccctccctctcacctctcagccttctccccaccctctttcccccgtttaagaccttctgagatgggtacgccattctgctttgggagatgaagtggcattcatgtggggggaggggagcaactgcttttattagctccagaaaatggtcagtgctccgtcttaactaggaattaattacatataatcactcactaaactttcttcagggtttttttttttctcccttcccctaattgtagagcaagaacattgcagaaatgttgcagccaagtctagctactttaataatcgacgacaaagatttgagtcagaaagaaagcactgagttcccttggattataaattagagataaaaagaatggccttcctctttcttccagagcctgtgcagcatccggtcctaagtaaaaggtgtgtgtgtgtgtgtgtgtgtgtgtgtgtgtgtgtggtgccatattttagaaggctgggtgctggtggtaaccctggaggcaggctatgtttgggaagtccaacctactcaaatgtgtgatctcttttgtttctgtttgctttctttcccctcctggctcctctgaccgaggcacccggttgccagcccctggatctctttgcctctggttgaccctgagaagaaagacacattcaaggggccccctctccatggctcagatgtgaaaggcagtggtgggtttagaagccttcatggttgttcttcaaatgcaaaagcaactcaggagttacccttggcctcaggttgctgggctcagtcgggctgcccttccccctcctcggcttcagctctcccttccagacaaacagggaggccctgccaacgctgcagctcgcaggctgccaggccggccttcctacccggatcacctacctgcaggccggctcccagccagcggccaggcctcgcccggctcagccttgggcatggcgcccttctttctcctaggtgctgaaaaggtgtcaccttgaagctccttgctcctagtgctagagggattctgaaactctcagaccttagcagtcaataacattggccaccatgaggctattattaatagttcggcctgtgaagggggcttttacaagatgcattgttacccctgccccccgactctgtgtgtgtgtgtgtgggggaggtggacagaaacctcttttgtgagagtcttccgtggacttgggtcagtcctctgtagatttgagggctgtctgtccttgctgatccccggcttcaggagtggctgctgttatttggtggtggcagattttaggctcacagactttctacatttttaccctggcctcagacagaggtgcagccctgtagctttggcgtcttagatgcctgctgttctgggagatttcttattcacctggagaagtgatgtggagctgtgctgctctggactcagaagggcacacgagcttcctcccgctgcagcctgctctctaggacagatcagccttgcagagacacctgtctgtcttcacattatgccaggggaccgcgtaattcctaaccttccactcacctcagtgcagggtaagggggccccagcacagtctcccgaggaaggctggacgcctgaaagggaaggcttttccttaggaacctgtgacttcactaagtctccctgccactgactgcagtttgttgtttttttttttccccccttccttctttttttattcttcaaacgttggattgttggtgtcctttggtggagcgtttcctagttctgatgtttatgaaggcggctttggagctagcagggctccttaaacatgagctcagctattgaacacactgctaccattttagttcaatacaggaatgaggcactgttgccagccgccattttaagaatcctgcataaatagcttagctccgatgactgcccgttttaggtgagtgattgcagatttgctaaccgtcccccctcccccaattaaaggaatttctttgcagattgagaggagcatgcttggtttgtttttgtttttgttccttcccccccactttacatctcgatgctgacggtggtgacatggggggaggatgctgtggcttgggtatcaactatttcttacagtctggacccttttggtctttttgaatgaacgtaaaacctaggggaagcgcttgggactggttgcatgatttcctgaattgctgtgtgatattcttctgactagggcagcgaggtcttgtgcatgctggttctgtgttcttgctgccttacagattgttataaagtcaagccgtaaggacacttgggagaagcaggatctgcctattgtatctccatccaggatctcccctaacaccctgtcacatagcgaggcttttccttctctcttacccttttggaaccaagtgttgaaggggtgagatgcctgggaaacccggaccatccctgagtcctcagaatgaagaatcagaagggctaaggcttcctggaaggacaggagtgcagagtagcgcatatgcaacttttaattgcttctttctccctccccagtgcgtgtaggtttagaagcccagatttcttgctcagggaaggagttatgtgggagtcttctttttgggcaaggggacgagatggacttgaccgtgttggcaggttttggttcttctttccggtgcctgaaatgtagcagtttgtggatccccccagcaagtgcgttgggtaaatatgagcttagtcctgatgctcgtgcctatacaatgtatgcaactagttgataattttttttttcttcttcttggcttatttcgctctgttctctatgtgtccattcaccctttaccagacctttacaaaatagaaatgtcagtttggaaatgggacttgtgtctttgtggatggaaatgatcagggttgttggattctagcagtcggggcagagggcaggctgtgtggcaaacaggggtgcgggcggggggggtggggggtgggggggtggggtgnnnnnnnnnnnnnnnnnnnntgggaggggagcggctgcatatgctaagacttttaatgtgttaatggcaaaagttcaaagtattttctccagctgcagttttctttctaaagattgttatttggctgcccgccccctacttccaccccacaatctctaaacagctcttaaactaaattgcccaagatctgtgggggcatttggaaagatacgactctttctcatcagcacttttgatatgattatttatagttcttcctttccagtaacacacccgggcttaaccctgagcaacaacaacaacaacagaaagaaaaagcaaaagagaaagaaagccgagattgtggtgtgggcaaagggtaggccctcagatgtggctgttcaaaatgactagttttgaattttggtctttgcttttgtaaaccaagtattctttctttctcttcccccaccccctttaaattcagacactgcaatcgtcaatgtagtcaaatacaagttgtgcacttgtgcgtgcatgtgtgatgtgtgagtgtgtgtgtacacatgtactcgcacagatgggggttgcctttgaagggatggcttgcagttgtgggaaaaagatggttttcctcagtagtgctggaagattctaggctcaaaaattgatggtgctgttgctaagtcaggtggctgtggcggtcacttgtgatgcttggggagatgaaacagcttaccccccacttctgtttcagaattgattatcttaaactcagcagccaccacgaaactgctttgcattttccttgcttctcagctgcattcctgcctgaagtattcagccacgtaattgttctcttcagtgcgggtcctcttccttgatcaatacacctttgactgtttccatcatagcagaaatccttcaagtgggtctccagtcttttgtgtgtgtgtgtgtgtgtgttgtatgttagctctgagattcataattgtttctttccccactggtacttttcagttggagcacaaattagtgttgtacctcatcgctcgttcaaaatatgggcgggatccatttttcatgcctcatgctagagagggcaacagaatgccagttgctaggaagatcaaggttatgggctgtgcttttaaagttaaccatctacctcacctctggctgcaagaaccgccctttcagcagcacccaggcagatgaccagtgtggttcaggcagtgtttctgagttgcaggtgttctcctgaagctggagtagaaggtgcatcttgtccatgtcccctggattgttccatgttggtgacatgctcaggtctggcaatcaggcttcttttgagaaggatcacctgtgaacaatgtgtcattatctccttggtgatttgggacattggtctctctacagatagatgcagactaaatgaaattgttacctaggctctgtatcagaatgctaagtgtgttaattttcaaatttagacccaaactaccttcctctctcttctctcttgggactagttaaagtcaggggactctcagctcctgtcgtgtgcaataatcttttctttttctgcctagttcctgtcttgagttttgtcctcccctacacacctggagctctcccaaacaggactccatcttaccccaagcttccaggctggaggctgcctttctgacacagagcacgggacgcagacagcacagccttctcagctgttttcctctcttgccttcccaatggaaaattccagccatgtccattggtgatgcgcctattttcttcttgctgaaccctgctctgctgggatggcacctagagcggctgcttagcatctccctaaagcagcatcttggaatgcctgagacattctagcacctgcctataacagcagctctatctgcttttccttctgcttggcttgtgaagtgttaggttgacagggcctgctctgttgaacctgtgttccaacggggaggcagagaaggttctgggtgacagaccttcctagctaaggggggcctgcctttctcctttcttagcccagctttccactcagcctgtgtcctttaaataatccctcctcattccactctctgtgctgaagtgtaattagtcacagttcagaaggaagccatgcctggtgggattgagactgcccagagaccctagggtcctgatgcctgtgataaaggctgctagaatctggccatgtttttctactttgtaatttaaccggtatgtctttcttttttttcaccccatgttcctgactcactggggagctgttcggttcaggatggggggaggcagggaaccactggtagaattctaggtgcctccgaaaggtttctctaacctaccttccgtggctccctggtgttagcaatgagagacttgctaatttgaaggctgggctctttaggattgaagctggtaggtggtacttgagtttctaaactaaaaaccacgtcccttacaacctcttaatgaattaggtacgacgactgaaatattaatttgactttttaagaacgtatttttagtattctggtattttaaagaagtcctttggcatctttgcacttggttgaagtcaggtgtgtcccctcccccaccccccaccccctttccataaggaaggatggccctgagagaaggcggttttgctctctggcttcgcagcagctgcccccacagagaccatttgcagcctaccctaacatacataatctattctatttcagcttggctgaagaggaaataaaaactgagcaggaggtggtggagggaatggatatctctactcgctccaaaggtgagtcaaaaatctcagattatctactgcgacctccaggagagggggatttcttttgttgttggagagaggtgacacatggctctctgagccgccagccggccgagacactgtagggtcttttgatggatggacctaatttctggagacatggttcagtctaacgtccttccctgccctgcctgtgtaggtgtgccgacttgcccggcattgccctgtggtaaattttgggtgtgtgtctggggctgtgggtgcctgcccgccagtctctttcccagagcgattctcacaggagtctaaatgtgctttctgcagacgccactgaggtctgcagctgtggcaggcttcctgatggtaacagcaggcctctgggcaatcggtggggtggagtggaccagcttcattggaaaatggtggccttggttggcaattacaagggaatgaggaggccagtgcctgtgttgggagcaaaccttggtctcttctctgtttattctgtttgcggggtgggggtgggggagcctgtagtggcctgggcctgccttgctgctcagtgagagtttgtggggcaccccaaggggggtatttgcttgtgccttgggcgctctgaccagcagccctttggaggactgtcacgggtttgccacaatagcctagcggctgtgctgagctggtctgttccctctgctgcagctccaggctgtgtctgggaggtgggaggggctgcggggagggttgttacagatccttccaggaggaggctctcatctggccaggaagtcataaaatagcacttcctagaggcgcctgaaagaaaagagagcatcctagagctttaaaaaaaagaaaagaaaaggcggtctattatttgggtcaaactaggggtcaggtggtcacacagagctggctgggaggagggaatgggaggaggaggaagaggaagaggaggaggaaagaggaagaggaggaggaggaggaagaggcgaggctcattggcttgtcccctgcctcagctgtcccagcatgtataggtcatctgagtttcattgttccaagtggcgaggaacccagggagctggggcagggtgtggcttcccaccagagcctttgcagacagtcggtcaggactgactgaggcagccccttgaaggcctgctgctgtgatcaggattggcctatgagacgtgttctgatgacacgggacagagaagagaggatgagggagagagaatccataaagaggggggccgggtggtgttgggtcttcatctttgtctgtctgtccatctgtcttctgtttacttccctttctttttctttttggaggcagggtctcacgacacagctctggctggcttagaactcactctgtagatcctgttggttttgaactcacagaaatccacctgcctctgcctctgcctctgcctcctgagtgctggagttaaaggtgtgtacttgctatctcaggtgcctcctacctaaggctgtctaggataaaggtactggtatgtttgaaggcttgtgggacaacacaggagccttctagtgtttggcctgtctaatccccttctggggtgagtggtaccccaccctgcaggtgagaacaccagagtctctaatgggtgttcagtcagggaggctgtgtcgagacttcctcattcctggactctcctcaggaggcagagtaaaacctcctccagaaggaccacagtcataggccaccaacttgggaaaagtccccagggacctgcctgtcttgcccactgtggagaccttttctgtcattacacaccaagaaatgcctgattcgtaatgaaatgctgttttccctttgtctgcttgccagctctggatgacttccccagggcactgaggaccgttctgtagggctgaggggatggctcaagtgggaaagtgcttgctgaggccctgaggtcatgtccagaacttatgtaaaaatcctgccttgagtctctggtctcagtgtgaggcctctggggaaatacagtgggtggacagacagacagcacctgagtaaggcctgaggttgacctcgagactccatccgtgtgtgcacgtgtacacaggcacctgtcctcactcaggttatcttccctccacccaccttctcatatccttctgcttgtcgtcaccaatgtcaccaggacctgcctctccatttccctgtgacacccgttcacctgtaccatctcttcccagctttgttccctgtgtccttctgtttgtccttgggagtttgtgcctctgtctttctggaacatgctgtcctgggtcctggcagcctgctccggatcacacagattcaacacagatgttgctagaaaggctttcggtggctgtccattctgagggagccgttctccccttttgagtcctggttttagagtaagctcattttaagagttttagatttcaagaatccttatgcagccctacttcaccccacctcccttcacccctctctaggctgcctgcttctgtgcgacttggcatatctaaatgtcctggatttataaagcccacactggatttggacttcctcagttttcctggcaaaggccccctttctcttctggaatgctcttgtgacgctctgtgacactgactgtctcctcagtttctcagacctttgtttttgttgaccttgacattttccaaattgtactaaaaaaaaaaaaaaaaaaaaaaaaagtgtgtgtgtctgcctgcctgcctgcctgcctgtgtgaacagaggctcatggtagctcatgccagccttaaacttgccatgtagtcaggggtgatttgcctgagtgctgggcttacaggtgtgtgccaccatgtgaaggttatgtggtgctggggacgagacctggagcttgttaatgacagtgagtgctccccacagaatattctttacaaggaaatcactgagccacatcccatgagcatgggggttgcacccctcctccaggacagcgtgtgacggcgttagaattctgtacagtggacatgatgttcccttatgtctgtctctcccctcccacccaccccaaaaaagggttatttatttatttatttttaaagatttatttatttattacatgtaagtacagtgtagctgtcttcagacacaccagaagagggtatcagatctcattacagatggttgtgagccaccatgtggttgctgggatttgaactctggacctttggaagagcagtcgggtgctcttacccactgagccatctcaccagcccttatttatttattttatttgtttgtttaattttctgtgtctgggtgttttgcctgcttgtatgggtatgcctgtgtaccttgtgtatgtctggtgctcacagagaccagaagagggtgttggataccctggaactggggttataggtggttgtgagtcatataggaatcgaacccaggtcctctctggaagaaccagtgctcttaattgctgagccttccctgcagacccccccctaggtgcttcatcgttcttctgtgtaattgcagacccaaggatcatgcatgagctcttggggttcatccattgctgcttactactgattgctttcactgggctgctgggagcgctctgggttggttccgggtatccctgggccagcttgtcttcacggtctctgtctatttatgaccatttatgttctggcttcgtcatctttatggtctgctttgggccctttttgagacagtgatcttagaaaccaagatccaggtgtgctgggtacgtgtgtggatgctgggctgtctgcttctaggttaacagggaagctgtgtgttctcacagttgctgctcctgtctctgtgggtttttttatttctatattttgcacatgcctttctgtgtctgtggtggctagccatgagttcatgtgctttgtctccaaaaaaaaaaatcgatatctattttgcagttttgcgcgcatgtgtacacatacacgtgcatgttcggttatacatatgtagagaccagaagacagcttgctggagttggttctttataccacgtggtaccctggggatcaaactcggatcttcagttttggcggcaagcacttttttacccaatgagccagttcaccggcccttagctcctttctgttagtgtgtgggccacttgccttccttagtgtggccatctcagcactggggaagctggctcctcaggtttgccttttgtgagctgctttggagtatttttaggctgacctgcagtggacagtgaagactgctaactcaagtgtacactcagtagatcctgacccactcaaatcaatgggggcatggggagatgaagagatggctcagtggtcaaggtatgtggttgctactcttccagagaacccatggctcacaactgcctatgactttagctgcttgggatccaatacctttctggtggggcatatacatgtgtcatatacacactcagatacacacatacacacacctacatttaagaaagatacttgactatctccagctctctagggctctctgtcattattcctattgctatcctgggctcttctgcctattgctattcaagagcacaccattttctccagaaggaccttgacctccaagtgcatctaagagcaagataatgtggcgcgcgcgcgcatgtgtgtgtgtgtctatgtgtgtgtgtgtgtgtgtgtgcgctgtatgtgcccgtgcacttgtctgtgactaagtatggcttgttgaggtagctttggagatctttctcttgttctccatcttacttttggtgacatgggatgaccgaacctggagctggccattttggctagactgtctgaccatcatgctcctggttagtgtctgcctgttttcactctcccccatgatctggggttatatatccaccttcctgggtctggcttttcacatggcactttttacgggttgcctagcttttgctgtgagtactttgtccactgacctcagaactttgatatttatttatttatttatttatttatttatttatttatttatttaattttggtggggtctcacagatcccaggttgccttccaacttgttatgaaagtgaacgtgaccttgaacgtctgattatcctcctgcctctacctctcaagtgctgggatctcaagttttcctatcactgcaccataccttagaatgtggagctgccaactacatagagtttttaccccaggccagagagccagactccttggttcctgcttgcccctgccagagcagagctatattttatggcttagttttccctaagtgggatgggaaagttcaggtgagctttgctcgcatagggtgctcagaatggtatgtgaacaggagagcgcccccaaatcccagccacgatcagatagacggagaacagggagatcttcctggctatatttttgttcttgctctaagaagaggctgtggaggtagatgtgtccagccagcttggtaagctgtgtggggctgcccagggttagttacctgggaaccgggaaatgtctgtctgtgtgtgcatgcggacacaactccaaggacggagtgttgttcctccattacagtggttcagcctgctgacctgctggcctcgtcccggcactgctcagaatctgagggagaggccctcttgtttctaagggactttgtgccagccctttggtggtcctcctttgtggagaggggcctgttctggttgctgctgttttaagggcatctttctcttaagatattcatttcttttcaattatgtggatgtctgtttggtatgagcaaataaatgtgtgtgctgggaaggccaggagagggcttcagatccctggctctggacttgggggaccgttatgaattgtaggtattacagattaaacctagcttctcagcgagagcggtatgtgctcttaactgcggagccatctcattattaattactattgttattattttgagtcaggtcctctggaggtcagaccggtcttgaattacctcctaagtgttggtattaaaggcgtgtgctcccacacgaggcctcagtttgcctttctgagacccagtttcctataacccaagctaaccttgaatttactttgtagtgctttgtagtggagggtggccttgaactctggatcttcctgacttctgttcccaagggctgggattacaacacctctgcatccacatcagtatgtatctggacactcctctttctcagtcacctgagtgtcatttggattttacagcctgagctttgacctggggcactgaggttcatagagttgaagtctgttgtggccaagctatgacatttgtgatgtgttggggacaaggcttatccctcttccaatcctggttatctcagaggtccccagtgtggtgatccaggctatgaacactaattgtccctttaggccacttttcgtgtggttctccatgttcagtatttcagtccccaaaagataagtaattaattaacttgaagagagaggaagaggggcacacgtgtgccatatcccccccccccccaatcgcctcccaacccctgtaccaccactgctaagtgtgtgtgtgtcctgtgtgggttctctctttctgttatgtgcagcagaagtggtcagttgtctcatggcaggaaggctgttggttgggtgtggctggctggctcaccagcctcctcgggaacaatagggtacaggccatgtgtcctgtggctgccctttggctgctgtctagacactccgacccaccctggctggctccacaagtaagaacaaattcctccggagatgaggtgggccatctggagaagctcaggtcttttattcagggcctgatgctgtgtgaagtccagctggcactgggacctcagagtctctgataggaattggtagagaggcgactggttgagcccaaggccttgtgctttctaggcaggtgctcagatttcctaaccccctccctcttcagcccccagctgagagtttggcttcttgcattgattttggtgtatgtgtgtgaatgtctttgtgccacattgtacgtaccgaaagccagaggagactttgtgagatctgcttcttcaactatgtaggccccaaagatagaactcagtccttaggcttggcagcaaacatctttatctcctgagccatttccacagcccaagaacataagagctagcataggctttcctcaagcctgccacagatctccaagagttaatgctttcttttctttctttgagctgagatgtttttatgttgcccaggctggtcttgaacttacatgcttaaagggagtagggacagtgtgtcaacatactttggaattctttgtttatatttttgttcagaggtaggctcctaccgtgcagcccttctgggcatggaactcaatatgtggagcaggctggtcagtgaggtcctcccaacttggtctctgggggggttggatggaaggcaaataccaccaaccctggtgtgtttacttactcggacaactttttctccttctactctgtggtctgtgggtctcaggacttgggaactcaggttgggtggtgggagaagatgccctcggagccatcttagctgacctagctctgaattctcaaatcctattcccgcacctcgtctgcagggcttttaggttctctgaatatcaatcagcagctctcttcctatgtgatcacttattattaatagggtagttcccgagtctattgcttcctttatatcatccttggcattttccagagcgcgcacttctcaggagacaaagccttcaggctttcaagatgccagggtgacatttgtgaccgagggtgacagtctgctgtaagccattcgtgcataaatcagaagcaccatctaccaggagtgctggcacagtgagcggctcctgaggtctccccaggcgccgggcagtgtttccttctcacctcaatgattcttagctcactgctgtgacgagtgtattcccatttcacagtctaggacactgaggctcgtgaggatgaatgaagtggccaagtagggctggggggtggtgtggtatcaggttttgtcttttgctttaaacatctgagtcacatcccttcagggccagcagggatacccataatggctgccagcatagggaaaatagggggctttgatggttgggtgggggaatctacttcactgctcagcgccaggaattgggctcactgtctctttgctgggatgaacctgccattttcttgcaacagtagctcatttagatgcagagatgtttctctgtgtagaccagtttctcaaagattgttcatgaacccagaaagtcacatcaaggggacggaaatggcccagggctgtcattttgcattctctgtgcaagactggtcacagcacacttccttgcaggagtttggccataactgtgtgagtcagacaaggccctgcctcagaggccagaaacccggagtctgccgcagcctggtgtactccctggatggaggctccctgttctttaggccgcttgcatcttgatcctgctgcgtgtacattttgtgggcagagtgctggtgtgcagctgtatggtgtctgcattgtgtcaccaacgcaggggaacggtcccctcggaaaccgggcgcagatgtagcggaagcccaacatattaaaatcccaaacactgtcattctttgtgagacttgcctgcgggtggatgtgtttacagagccaggatgctagagaagtacagttagaacaatttgttaaatagtcccagaccttgattagcacaggaccctctatctttctctgttgtgtgtaaattaagactttcacaaagggattgaatgtgagcaaggctgtgagataagagtccttctgtcattttcaagggatctctaagaaaacaaccatcagtgcttttaagccatggcgcagaagcgccgctgtgaggtttcctttcaagaaacgttggtagtttaaactgtcctgactctgacatctctgagatcccaggaagtgccagccctgcagtgtttagtggcaagtctgtgtgagagaactctcctccctaatcaggtctaaattatcccaaaatgctgaagctctgatcatggctttcagactagagattggcggcctcctcttggcaagagcgaccctgctgtgtccttgtctcaggagcatggagattacaacctgctctttacaggggcggtgctgatctggattcccatcctcgttgtttagcaaggattttactcactaaaattgcccggctgatgcagttgagctctgtggttgacacagggaaacttcacctgccccatttttgaagccccgctcatagtaatgtccagtttgtttgtttgtttgtttttatatgagtacactgcagctgtcttcagacacaccgcagaagagagcatcggatcccattgcagatggttggttgtgagccaccctgtgtggttgctgggaattgaactcaggacctctagaagaggagttagtgcttttaagtccccgaagtttatttattaatggagaagactgtcatcccaaagtgtttccaccctaaaaagaatgtcctttttcttcctccaaaggtcttagaacaaatgtaccaagtggagggcctgtctcagcatctgggcctctcttaccaaccagacattcaagtaatcgtttttttttgtttttttttttttttttgttttgtttttttttccggcctcactcactctggcccctgctccagccatatttatttcatgtatgtgagtacactgtcactgtcttcagacacaccagaagaggacatcagatcccattacagatggttgtgagccaccatgtggttgctgggaattgaactcgggacctctggaagagcagtcagtgctcttaaccactgagctatctctccagccctcaagaaagactcttttggttttttgagacagggtttctctgtgtagccctggctgtccaggaattcactttgtagacctggctggcctcgaactcagcaatccgcctgcctctgtctcctgagtgctgggattaaaggcgtgcaccaccatgcccggctctgggagtgagtcttgttgctcaggttggactctcgaggtttgtgggatctgtaacctaaacatttgaatgccaggtgcgctttgacttggaatcctactgtcttagcctccagagtatctatgattacgggattgtgctctgaggctgggcaagagagcctgaggtacttgggggtggggtggtggtggtggtactgaggccttctacgtgttaggcaaatattattactgagctacatcccagaccaacttgtgggctcatgtgatcctcttgccccagcctccagagagctgaaactatagagcaaacccattgtaccaggcctctgctgtctgtgaaaggctgagctcatctcttggttgaaagacagagtcatatctgcttatgatgttgcctggaacattctggagcattcctctatgtgtgtgtgtgtgtgtgtgtgtgtgtgtgtgtgtgtgtgtgtgtgtatgtgtgtgtgtgtgtatgtgtgtgtgtgtgtgtgtgtgtgagagagagagagagagagagagattggcccatggccttgtgtactggcaaacctccctggttactattgatgggcccattgctgcaaccctcatcgctggccctggcctgctgggctcactgctctcctgctcccctctgtgcccgattcacaactgacctttcacattcccttgagagccatttctggctctcgggtgttatcaacctctctcctttccaggtttagtttttcttttaagggttacatttgattgtttattttgtgtgtgcagacatgggaaagtcaggcggcctgcttgtgggagctggtaggcagttctgccttccaccaggtgggtcacggattgaacccaggttgatgaggcttggtggcatgcgccttacctgctgagccatcctagttgtcccccctttccccctgcatctctttgactccccctccaggtttaaggcctcagttgagactgcacccttttgtggctctctttccgtgcacacacaataggcacactgagcctgactttgtccgatggttggaacttctaccctagatcatgaaggcaaaggcaaagcagccttttggctggggaggtggcttcttctctagcaaaatctagtgcctgtgagtaattagtaggccccgataatttgtccctgaaatggtcagcctctctgtccctccagagtcactgttctctgggacatggcccctcctttttcccagtgatcaccggtgctctgccaactctctcttccctgaagatgggctttggagcagggacttaaggtctttccctgtgttgctaaccccccacttccctgttcaaatcacagtgttcctgagcacttggccctcctctggctgcctgcaggtcctgttacctgctcttgtctttgtgaccctgccatgctggtctctgaggaccaccttcttcttccctttcttgtatctccagatacctaggcgtgtcccctctgtccctgtggtgtgtgtgtatgtgtgtgtgtctaatgagtgcttctctagccttttgtttacacctatacctgtcttgtgatcaggaggaaatgtggcatggtgggaaagtaggtgttccaggattcaatccccagcatggtagaaacagccctaactaaaaacaccccaaaacataaacaaatccaaatgaacttgcagactcccgtaggctccaaagtcaatgcttccctcaaaggatcctgaaaggaattagcttcgatctgaatttgtgtacatactacagacttgagaatgtccaaggcctctcactgacttggataaggtcatagagtctctcaggcacataggatgagtgggtactttctccagtggcctgtctgcctgccaggccctctggaatggcagctgctagttctgtgtgattgttcagagttgcctaaggacagccacctttcttttctcagtagctccagccccatgtctagtgtgtgggggctaaacacggcagacttcagtgacgtccaggaggtacagacagtgtacgggacaccccactgtcgctgttgaaggctatattgccatgctggggtctccagggagcactgtgctggggtacaggtggggacacctgggcaggtactgcagggaatggaggaagcttctggtttcttggtcagatgtccttgtgactcctcttatttgaagtctttttcctcgtctttccaagtgggcagggcttgatgcttttctaaaaatttaaaagtagtacccagctatggatggaatgggttaggcagatcctctcaggctcctttctccctgacatggcctgatcccctctggtttgtgggtctctctctctcagcagctctgagctccattatttattattcgacttgttattgacccagcaggagcccctcgtcctctgcagtctggggattgcctttcaaaccatattgacacagggccactccagcattatgaatgctgagacaggaggatcatgagttgaaagcaaacctgggctgcataattgtagaaaccccgcctttattaaaaaatttcctcccaagccaggctttatattctagtgcttgggaggcagaggcaggtggatttctatgagtttgaggttagcctggcaagacaacatatgttgttacagataacataataaaacaagtttcaggccagccagaactgcactggctgagttgtgagaatctgtctcagaaaacaaaaaaacaaccccaaaataatttttctcaagatttattttataaaaagatttatttatttatttcatgtaagtacagtgtagctgtcttcagacaccccagaagaaggcatcagatctcattatagatggttgtgagccaccatgtggtttgctgggaattgaactcaggacctctggaagagcagtcagtgctcttactcattgagccatctctccagcccctcaagatttatttttataatttaaattatgtgtgcatgtgtggggtgtctgtgtgagggtatgtacacatgagtgggggtgctatagaggccagaggagtcaaaccccctggagctggagttacaggggtttgtgaactgcagtcttggtgataggacctgaacttaggtcttctgggagagcagccagtgctctagccactgaactatctttatagcccatctcagagtttctttacccacctccacttgtcactgtgcccagtcagtcagacatccatctttcaggcccctgtcagccaggctgtgtgccctgcaaggcagctgagaccaagctcatcatgttctggaggagacacaccgaggctgcgcatgtgagccgccacagagggtgtctgacagtcctcaggaaggagagtcgtggagaatgaagagcccacaacttcagggtatgggatgaggagcctgcaggctggggtgtcggggaaggcccactgggaggtgacatttgagccaaaggctgattgatgttaacgactgcggaggagactggctacagaacatggagggaggggcgagctagatgtaaagaaagcatgactgatttacccagaagaaggagtttatgagggcattggatgaacggagccggattactttatccacggcctggggctgtgaggggattggacaactagagccaagcatacttcgtcatggcatgggctgtgaggggattggaggagcagcgtgagtttggcgcatcactgcatgggactgtgcggggattggacgagcggagcggaatagatcttacctcattgtggcacgggtggggtgaggctgctatgcggggattggacgagcggagcggaattgatcttacctcattgtggcacgggtagggtgagggtgctgtgcggggattggacgagcggagcggaattgatcttacctcattgtggcacggggttgggtgggggtgctgtgcggggattggacgagcggagcggaattgatcttacctcattgtggcacgaggactgtgaggggattggacaagcagagctgagaatatctcatcatggcatggggtagggatgacgactctgactctgtagcccttaggtagcctagaactttctgtagcccggggtggccttactttaacgaagatccccctgcctcagcctcttgaatgctgggatcacaggtgtgagccaccactcaggatttaggtttagcattctgaatgggtaattagaagtctggagcgcagagagtagctgcctctttttagtttgttctctcatcaggagcctcctgtgccttgagaggagcacgcattcagagacctccatctggggaagagtgggaagggtgggctgggatgatggggcatagaagcggttcaatcaggtcaggaatcgagtcctgagcatgcaggggctttggtgaaccgaaccggcctgtgaggttttaccagacgggcttgctcttgcaagccatggtcgggacacagcaagttttggggaaactggtttgaggtttcccctgtctacgggggtggggggcggggggagtgacagcagtgactcatggtcttctccgtgtagaaaggctctctctctctctcaactctcttttaagatttatttatttatttgagtacactgtagctgtcttcagacacaccagaagagggcatcagatctcattacagatggttgtgagctacaatgtggttgctgagaattgaactcgggacctttggaagagcagtcagtgctcttaactgctgagccatctctccagccctcaagactcttttgggtttttgagacagggtttctctgtatagccctggatgtcctggaacctaccttgtagaccaggctggccttaaacttagaaatccgcctgcctctgcctcctgagtgctggaattaaaggcatgcgccaccatgctgggctttcaagaaagactcttaatagttgtaagggaacccacagggacaaagagaccaagtaactttggattcagtgctgaactagatggcgtagcctgcacacccagagctacggctgtgtgtgcgtgtgcgtgtctgtgtgtgtgtgttctaagcatggttttcctcatggagcattaactggtggtacacagaactgagatagccaggctctgcctgggcaggaagggtttagagtgccacctggccacggtgcctgctgggatcagctgtagtcccatcctcatgagattcttgtgtcccctcccttccttccctggattgaactatgtgagccctaccactgaattatgtcctggttctgggggaattctgaaagtagtctttcgtaaataatagctgtgatattgggagcctgaagagatggctcagtggattagagcactggctgctcctacagaggacctgggtttgattcccagcaaccacatagtggtttacaaccactggcaactccagttccaagggatctgatagcttctcctggccatagtccatgtggtatatgcaccccccccaacataatataaacaaattatttttaaaaatagccttggcctaaaatgagctcattctgggtgagaaatagagaaattactctttggtcctgccctctctccagcctgtatccacaagccctggtctttctcctgtctaccctttttaaaatccttcctctgtcagtctctgaggcatctgggtttactagttagtttgtcctctaggcctcagttaccatattcacaaaatgggcatactcagcctacctcctggcagaaggagctcccaggtgagaggtgtccagtgctgttgctgccatctttggctgtagtcctgagatagcagagccttcctttcctggttgtccaaatacctgagcttggattccctggatctcctataatgctggagctgttgttacatcatgttccatgtgggggttgtgaccccagtgggacatgtgggggttgtgaccccagtgggaggaggggagtgggggctgggaagaggaaaaccccgaagctttggcatacacagcaacaaacaggagatacacacacacacacacacacacacacacacacagtacatacacagacacacagatagctaaatgagtgaatgggattaggaaaaggaatctgtttcttggtttcttaagttttcttccaggctgcaaactcgggttcctgtgatcccttgttgtgcactctgcttagttcctggcctttctgtagggcctttctgcatgccctagcccacgggattccattgtctggctgcatctccctgctgcttcctgtgtttggctgctccaagctttgctgcagggccactctcacacccaagctctagggacccaaaacatccctctcaccgggataatctgggccacattctgcgactaagatagcttgcccagatgagcacggcaagctgcctgcagggcctgtcccttcttccttgttttctggcattttccttgtcctcattagggcgacttttggagcctgaacccttctgtgcttgtggcgagcatggcctggctcccagcagcccttcttccttcttcgtctgaccctatgaatcagtaggccctctcttgctgccacccctcccccctctgtagtttacaagccacaggccccggggcctagctctggggtgggatgaatgtgtttggtatcaatcccagaacctgtttcagagccagcaatgtttggtgggcaccaaaggaaggacctagctaggtacccatgctggaggaagtcttaggactgggaggtgtgcagtactgactctgtctctctctagcctgggacacttccctcccccccaaagctgaatatgaggaaggcccaagctatagccactagtctggtggttgagggttaaacacaatttgtcagcctcttttcttggctgatagccatttctgtcctgcttggtctttttggtggttggcatttcacatattgattcgatgcctggagagggtggggggcactgtagagacagatccgcaggctttcttcatggctgaaagagcgtcacaactaaagggagtcggaaacccctaaccaaaaaaaaaaaaaaattaagaacatgttcaaaatgcaaatcacctcccttctcccacagccaccatgtcctcagaaccacagcggttgtgtgtatttattccagtctcccataataaatggctcttgggcgccgtgcacggatgacgtcctgcacagccacacggcagccgagggtgatgaattagatagatctaaggcctgtggatacgaggccggcccggctcttcctggcctattgcaaaggtgtccttgtgttgccgggctatctaatgagtcttaagaccagagctggcctggtaagtggtgactctcagcttgtgctctcggcttcctcctccccctgggagaggccgccgagcagccgccggaagcaggaatgtctgccgccgggagcttgctactgtcctcttttggaacagaggagccaggctctctaagcggccaagctgcctctatggcgggtaagtgcccacccccctgagccatctgatcctcacttgctggtgtggaagccgccaggtgaagggacatttttctcccaagctgagtgtgacctctctcctccttccacgcacttcctggttctgggtgagaagctgctgggcctgcttcctgcagaggctgcttgcctctggctccagccctggaaggcctgcgctggtacagcctgatcctggggtctctgagggcctaagccgtgttcttttgtgagagatggggtcatttaaagagctcttgcagtgctctgggtccaccttcccaccacagtctttgctagagggacagttttaccccagcccccatctttgcatctgctttttgccaggaggaagttctgggctttttgtgtctttatgatgtaattacccattggggagtgccagagattcctggggagggaggcccttttgggtacctgctctgtgtcttctggaatagctttggaaatgattaaccaggggctcagccttgccacttctgggagagctggccgcgggtggtcccccttttgaagtaggcagcattgtggctggtagtttctgggagttctgcctatgtgggcacttgctgtgccccagctgctttagacccagaggcctctgcggtatccaggatctctccagcgtgtgcagagtgattggagtcacgtacaggatccattttgctttccacttgatggaggccgacatttttcattactttgaactcgtgggattgatttaggacgctctttggaagaaagctagctccttttagactgggtagtgaagggagaggaggagggacaagaggaggagggagaagaggaagaagggggaggtcttgtttcttaaaaaagacattggggctttagagctgacacatcagataagagtgggtgctagaaattgaacctgggtcctctgcaagagcaaaaggcgcttaaccactgagccatctcctcggctccttttccaaaaacaacgacaagacaacaaaacaccaaaggactttttttcagaaagttgtttattggcatggggccagccatgtgttgtcaacctctgtcccactggtctttgctcctgggtgccagtgggcttactatctgcatcattatggaaatttgacacccacaaaaacacacaaagcacccagtttttaagccgcagtccctttccccctgggaaacccagctccctgtgaagtgtgtcgctgtatagaccctggggcattgggggtgccctgactcaggctcagggtgtggatgtgagcgtgggtggtgcctggcacatcgtggtttcttaggcttagttggagatgggaaggacagttgtagggtagggttcaggagtctctagtctcataagttaggatctgacacagcctgataaggtgaggaggtgtgtggcattcccagagaccacctttgagatagcatcatattggaggctcagtttgggcggtccgtgctcgcatccctccgcctgcagttggaaagcaaatgggtgtatgctagaggcacggactccaatctggtgcaaaggccttgtcccgcagtacttaggaatgtctgctttggaaccactctactttctgggttcgtatcctggccctaattcttggttatagctgtatcgtgttggaaatacatttgaagtagtttgaacaggtctttgcttatagctgcgttatctgaagtgaactgtcccttaagtcaaaggacacgcaggaagtgctgagcctgatcatttctgatggttcctaagacacaggctctggaaggattacatcacactcttagctcttaatacccaggaggcctcttactaacttcagggaaatgtcaccaagaggagaagcttctgttgcctgccccagtccaggctgtgttcctgagtcactgtgccatctcctccacaaagcaggcctgctccctcacccaagttaacacagtcagagtcagactcattttgagggggtggattggaggcaggaagttggtgaagggccagcaaatggtgtcctgctagtccagagaaggtggaagaggaaaaaaaaaagtacttcttggatgcaaggtgaaccattcattcctctgtgagacagctggtggtggctgtttgtcatcatcccacatttatacatgagacgcgcttagcaatgtaccctcctcagaatcagatcattagagaagtaaaagtctgactcagctttctggaagcggtccttatggtgatttcattaccatgacgacagctgggtttcttcccatcagtgtacagtacagtcaccggatgttgggttcctgatggatcagggaggtgtttaagccacagggccatagggctcccagtgggacagggaggcgtttaggcagtagggctgacctgccctttagtattctgaaaacgataattccagccgcagctcctaagatgctaccggtgtttagcttggatacagcagttagacttccataagctctgggggcagtccttgtgctcgtagcggcagatagagttgaggtgatctgagacaagttctatgtagccccctgatgctttgtgctatgtagaccaaggtagtctggaactcacagaggaaagattcagactgtcaaggtctaggcttggctctgaggctgtaccgctctggtccacagtgccccatccccttcctgatgggctggtccttcgtgtcaccgtccttaggggtcttacataatggaattgagtttgagaaccgaagtacttccaaagccagctaagaaatcttgagacaacctagaaacagacccttgtctcccatgggggaatcttctctaaacctaaccactagcctggagtttgtaagtacagcaaatatttgcctggtcagttcctggtttggactggccagagtattgtttcttttgagacgtgctcatgtgaaccccaggccacctgcagtttgtttgtttgttttggtttttttcgagacagggtttctctgtatagccctggctgtcctggaactcactttgtagaccaggctggccttgaactcagaaatccgcctgtctctgcctcccaagtgctgggattaaaggcgtgtgccaccaccaccctgccaggtcacctgcagtaagtacttaggctctgacatgggcagagttgatgggttgtattagctgcacggagaacaaacccccagctccttccagaggccttgcggcccacagcagcccagcccccactttatctgcctgtgacatcactcaggggccccgccctcctttactcgttattgccttttgcctgcacctgctgcctttcatgcgcaattgagccttctaaatccctttcatttcccttactttgataaagtcacactgtctgtagtacaccagggtatatgctgatatataatcccttctgcaggcccgcctcctgagacgcccacctgctcccccaggaacctggctggactttggggtcccccctggagtattccaggtgtttatatgcaggatcgcatccttttggggatgggggcgtgtcgcctcctggaggcgctagacgtgttgttttgtaactggacccaggctggagattgccatacaggagtccctggagagatactgtccctcttggtgctgggggatgggaccgggagccttgtgcctgctgggcaagtgctctgccaccaaatggcaccctctgtattacctcatcactctttcagtgcgggaggggtggagagtgtgtggcactctgttaactagcctgacctggaactcacagcaatccatctgcctcagcctccgaagtgctggggttacaagtgcccgtgaatacagatgtctttcttacccatgatttgtgtgtttgtgtgtgtgtatgtgtatgtgtgtgtgtgtgtgtgtgtgtgtgagagagagagagagagagagagagagagagagagagcgcctggatgtcagttatctcccccttgtttgccatgcatacagcagtctacctggcccataagcttccggagagtctcttgtccacctcacatctcgctaaaggagtgcagggattacagattcaggcaaccgtggctaactttacacgatgtctgggctcgggtcctttcgcttgcacagaagcacataacggatctatccttgaactaaccactacgttcttcatcttgagacagggtttcaccggcccggaattcactctgtcaaccaagctgttcgcaaagtcatggaggtttctctgtctctgtctctgtctcctggctatgttcagccttcttcttgatttttaaaatgtgtacaagggttttgcctgtgtgtgtgtaggtgcaccatgtgcgtgcagaggccggaaggtggcattgggtgccctggaactggtgttacagatggttgtgagccaccatgtgattgctgtgaattgaacccaggtcccctggaagagcagccagggctctcaaccgctgagccatctctgcagtttgcacttagcgttcttagtggccagagaatgttttgttgtatggctgccacgcattaagccactcctgtttgtggtcactgaagtttgtgtctagtcatggtggtaaagtgtcaagttgaagcagagagcacctgctgataccctctaggctcctggtatccttttctgcttctctcactttagtttctcagggtgtgaggtgcaccagggcatacctttgtccctaagttaatgagcccaccatcgggcatgaacgaattgtgggtcttacaggtgaacaggtggattggtagtggagtggcaagagtataaaaccaagggcaaattgaccggggtgggtggggctttttaaggagagagtcagtgcgagttctttgtttgatgcctttagacaagggtctcagacagggagtgggtgtggcatgagaactttcctgggggaggggcttgccctactcttagccaactgaatggggcgcactgcctccttgaagtgtctcgggggtgtcttgattttgctgttgggcagggtgtggagatgtgtttcttgggtgtcagagcaacacccctgcttgtgtgaccacttctagtaacttgatgtgttatttttttttgttgctgtgaccaaatccatgacaagaacctaaggaaggtaaggtttattttggctttcatcttgaggggatgcaggctgccatcttaggaggtggtggtcggcggcgctatccgtggcagcgggagtgggcagtcgggctcctcatgaccacagctcttgcacaggaggtagaaacagaacaggaagcatggcttgggcctggctcaaaaatgtcacagtccacccctagtgacccgtttcctccagagaggctccttctcctcaataccacagctcccacgacagcgtcaccagctggtggctgcaagttgaagtatatgagcctctgtgtgtgtgtgtgtttctcacattcaaatcgtggtcatggccttgtcgccaaggtcgtggaaagggctgttttgttttaaaaagttggtgacagcttcccatgtaaagataggtgattgccccacagatgtgccaagtcagtcggggcctgtgggccttgggttgtttttatttttgtttgttttaaaagggaaggcaaaaatctaggtggtttgagggttctcttgttgtgtccttggcacctagataagaagaaagactcagtgtcctgaaggaagagacaggtagattctaggaagagaaagtacagacctgtcactcagggtttgggaacagagccacagtgactgtgtcacctgcacaccctcaccaaatgacccaggcctccttgagagcatttcaaacatggtcctctgtgtctctttcagatcctgtctctacagagaaaacggccccgaaacggaagttccccagccctccacattcctccaatggccattcgccccaagactcatccacgagccccattaaaaagaaaaagaaacccggcttactcaacagtagcaataaggaacaggtaaaggagccgctgtgagcggcctctgtaccggtggtgggatgggggccaggcggcagtgatgcagcttgggttcttggctttgctgtaggaggctgcctggcactcgctgccatttacataaagggcagttcagaaggggcctgtgcaaacgtgttcagtggggttttagatctattttgaggacagaggacagagctatatgccagataccgggggtggtggtgggatggtctttgggttagtttttggtggtctcagggttttcttctcctctgggctaagacagctgcctgagggggtgggaattgtgtggctgagaccattttctcatctgtaaaatgaaggtcaatggggaaagaaaccatctgagtccagctttggtcatgggccactgtttcttctctccgcacacagacccacctacctggcagccgatgctgctgtcagaaatatggaaaaggatttcccccccccctaaagaatattctagctttacactctctgatgcaggctaggtagtcttcggatgtgagctgactagggacccgtagatggactggggaggatgtctgttctctgtgtgactgtgagtttgggcctcgtttttggtgacggttccttcatctattctgagcttttatcaagtgcctgagtgagctctagggagcaagcgttgattgaagcgaggttgctgcttttatgggcagaggcctcacagtgattaaatgcctaccgcctcgcgtatatgtttctgaacacaaatctgttttcattcttgaaattatatagtgagtagtcagctccgtcttggctctggctttgggcatgttaacctcttgtgtgccgtgagctttctcattcacaagatgtggattgtggtaccatccggtccacagggctgttgtgagcgttaactgagtgccattcatataggatgatgcaaacaacgttgacagaatttggaaaggaagctgggctgtagcaatcttttccttttgagtcagagactcatgtataactctgggtggccttggactctggctttagtaatcttagcctctgcacacaatcaaatcccccagtctctgaaaaagcattatagatccacactgtctggcgtggtagtcacagccatgcatggctttcttgggtgagaatcacttggaactgggtttttctttttcttttttatttctttataggatctatttattattatatgtaagtacactgtagctgtacttcagacgctccagaagagggcgtcagatctcattacaggcagttgtgagcctccatatggttgctgggatttgaactcaggaccttgggaagagcagtcagtgctcttacccactgagccatctcgccagcccccaggaaccaggtttttcatttcatctaatttaaagttaaatggatgactgtggtctcctgttagatggcacagatctagtcgtttgggaggggtagaaactgtctctggtaaagggaagcacagaggtgttgcctcctcagggtctcagggcaagtggggttagctttgctcgtcttgctgttgacatctggcccctaccacctgggggccatcctagctagtaagaatgaaagactccgggcagtggtggcgcatgcctttaatcctagcacttgggaggcagaggcaggaggatttctgagttcgaggccagcctggtctacaaagtgagttccagaacagccagggctacacagaaaaaccctgtctggaaaaaccaaaacaaagaaagaaagactcaaaaagaaacacactgctgtgggtgtggctctgtttgtgaagcgattgctttgcaagtatgagggcctgacctgagtttaagaaacccttgtacctatgtgacaatgctcaaagtgtctacttgcattgccagccctggggaggtggccggccacaggaggtttccaggggctcactggtcagccaggctagcctacggagtgagttccaggccagtgaaagcctgtctcagaggacgtggagggccctcctaaggatgacctgagattgtcattgtctcctctgacctccacagggatgtgagctcacacgtgcatgtccaggagcgtctgagaactggctgtctttctgttctctttcttcccatatgtaaccttatgttaaaggagtttctgagcgaggttgtgactgtctacacctcccgtcccaatacttgggaagctgaggctagagtatcagagttcaaggctccataaattagaggccagcctaggcttcacagtgagttagtggctagcctgggctacctacctagcaaggcctagtcttatacaaacaaatagcaaaagcagtcagtgatcttgaccagtctctaaactcacccatttcagtaacatgtcagcctcctgctcatgacggttgcctgtaagccatcactccgtgtcagtcacctgtcttactgatggtctcagataaatgtcagtgttcccctgcatagctgttgcttggggtttgacagagggtgggatgccatggcttcagaaaacatttagggcatggggacagcagggtgaggttgaagagacacagggcctgagcttgcctctggggacctgctctgagcagccattgcagaagacctggaaggcggccagctctaccaggtcacatgacctcactcctagcatctgggacactcactgtgtgagcgggttagtggctttctcttagagcttcagttagatcgtcaagagggctttggctaagcactgtctaaggttgattgacaggtagattagcctcactaggcaaaggcgagagagtcttgccccttggttatttctagtatatgacatttgcagaaagggacggttctcatgcactctatcaagggggatcacaaatagttaatgcattctgagatagactcactgtatgaccctggctggcttggaatgtattatgtagaccaggctgacttcatgttcacagagatccagcctctgtctcaaatgctaggattagaggtgtgtgccaccataccagcattttaaaaaggggatttattcttttttttaagttacattatgtgtgtttgcttgcatgagtttctgtatgtcgtgtgcatgcagagagcccttggaggccagatttggtggaattggagttacacaaggttgctgtgtaggtgttggaaactgtgtgactgtgtgcatgcacgtttatgctccatttgtatgcagtgtagtgcccacagagaccagaaggtgtgggatcccctggatgaactagaattaaaaattgtgagctgtgggtactgggaactgaacccaggccctctgaaagcgtagtcagggctcttaaccagtgagccatctctccagcccttcacttattattctcacagaaatcctgaattgcaaacgtctgccggctccagtgctgatgaaaacatccctggagtgagtggataggtcttttccattttcttgttaagctgacctggggcaggagccagggaataaaaacatttactctgtaacctgcaattatccccttgtcgcacgcacgggctgcagcctgtctgcctcgctgtagggccgctcacatacttgagacacgtgggagagggcattcagaatccattttacctgagctggttggctttgcctttaaaaacctccacatttgttatcaggttctttttgtggagtaggaaaacagaggccataagggaaatatgtgattgacagggctgccgtcctctgtggtcactgaagttcctggagtggaaggtccctgaagagaacagagtcacctggttgtccctttggtcctgaagacacccacttggggtgaggcagagatggagccttggggggaaacttctgggccatcaaagaaataaaagcagtatcagaaattcccagttgggctgcggtgtcaggttgggctatttgatccctgagttttggcctgactcttttgttagtgagatgggtgttgttaaattataaggttgcctcaaacttgtgcggtacggtacattgaaaaacaatgtaccgtttagagactattcccaacaaggatattccttcctggaaatggagcagaccagtctcccaaacccctcctggtgattcgtccttcaggctctggccattctaatacagacatgcggcctggctctctggttaagccttcccttagcgtttgtcctgggctcagtccccggtcctgagggcaaaaagcagcagtagacacgaactcaggagcctggtcctaatggaagtcagattttcagtcaacaaaatgttacagtcgttttcatattaggtcagtttttaaaatgttgaagcatgtctgtgtaagtagagtcacttagagaatgtcctgggaaaccctgttcattacacacatacacgtgcacacacacacacacacacacacacacacacacacaacacacacttttttaaaattaaaaacaaagtatgtgtaagagttggtggtatgcgagacacagagggtgtgtgtgtatgtaatgggggaagagagtgtatgtgagagtgtgttgtgcgtgtgtatgaatgaatgaatgaatgaatgaatgaatgttgggcttctctccttcctttccatggggttacttaggctggcctttacctgctgtggcctcctgtcattctctgaggctggcatctcccagtctctctgccttggttcccaggccctgggattacaagcacggtcctctttgcttacccatattatcaggatttgtgctgtgtgtagctagtatgaggtcttgctggaagaaatggtggtttattggcagggggcttgtgtcgtgtaaatgtgacccctgcacaggctccttggttctttggaaggcatcttgtttccttgtgatttctgaagattacagagctctccctaggcccgttgacagtcaccactggacaactcagggtggacttcccaggcgtgtttggctctgccacgctgtcacatgtctagaggcttcctgatgctgcccatacaggaagatgtctggttcccaggaactggctggccctttcttctgtatgtcgttgttggttctgatgcagtggccaggcttcctggtggataggagcaccctgttcgaggatcagggctttgggggagcctattcgagatattttctaccttggagacagacttaagcaaacggaggataatcttgtgccagccaaatctaattgtttttaccctccaaatactactatttaaagctcaccagagcagattgccaaacctgtgtgggctctgtaaatttgggctaatgcaaattgggtggaccattcacagtttttgagagtagtgagtggctgtgttgccatttaataccaacgtgttgggactctcagctccattttacagatgagaaaattgaggcggggaggtagagagagacatggtacaggtcacatagctgcttaatggatgggagggatttaaagtgtgcactcaggctgcctagccactaactctcaggtgctggctttcagtgcctggccttttaacgtagaggcaagtggctgcatagctgtggaccagccactgctgtgttgagttgggaggtggaaatggcctggctgtgtagcggggttgtgaggggtgtgatgttgtcggtgtgtgttcttgatgtacttgtgcaaatgactgctcagaaaccacctgtgttttgaaaccccacctgtctttcttgcctacatttcagtcagagctaagacatggtccgttttactatatgaagcagccactcaccacagaccctgttgatgttgtaccgcaggacggacggaatgacttctattgctgggtttgtcaccgggaaggacaagtcctttgctgtgagctctgtccccgggtttatcacgctaagtgtctgagactgacatcggagccagagggggactggttttgtcctgaatgtgaggttagttcccgatgaatgaattcattacctgcctcaattcctctcctttctcttttcttcctttttattttttaaaaaatttcaaaataatccaaatagagggaaagagaaatgtcttgcctcctgcctgctctaccctggccgccccctctggggacccgcctctgcgctggctgcagtggggcagctcttggaaagacatgtcgccttgcctgtccccgagccttgggagcgagcgctttgagacctgccgcgttgtgcgtctgctgcttctgccgtgagtgccttggaagggaccttgtagatctgtaatggttgacgccttttgaaaagatcccgcgctgtgtttcctcccattcttcggccttgactcctcgccagtagcctgctgggaagaccgctgtagtgtgtgttccacgaggtgaccggctcacgttttctatcatgcgacctgcatttctccagtgcctgttaggtaccggggattcaacaacacattggacagagtggataaccttttcttattatttattgttattttgggcaaagacggacagaatctgaaagtttcttatagcagaaagtagaagaaaagtaggaaagtggggacggaagacgggaagaggaaattgaggtgcgatgtctcccccactttaagagtccaggcctgggaaggacacactgaggtttaaggaggatccgaagggcaggacatctgggcagagaaagtggcaggttcagggctgcctctgtgtgaggcatcccgagtctcctcagcagctcaaccatcagtgagccgactgctcgagctcttgagtctgcgtgtctcccactgtgacgttctctgctgaaaaccagagtgtcgctcacacacgtcacttcatgtagaacatctctgggattccggcgggcactggattagatcgtgagggagcttcctgtgtgagagggaagcgccacccagatgtgtgtgtgtgcgtgcatgtatgtgtgtgcatgcgtgcagggtggtgggggggagcggtggatctcaatataggaagatgtccacgatgccgctcttgggtggggaaaggagaaaaatgaaattctcgaaaagaaattagactttaaaacaaatgatggtgatgtctaaggggtcttctgcctctgtcatggcaaagctagctgctggccctgctgggcttgctccagacagacttgcactatattgacagacttcccactctgttcagagctgggtttgcttccccagagtgttgtgggttctccagccttctctacaagtgacggttgtagagggaggtgtctgagaccccagagtttgtgacccttctatgtgggaagcagcctgtaggggaagggccagccacttggttcagagccaagcttgtgtctctcaccagcacaatcatggctcctttctgtccccacggctgctgccggagggctcaggtatcctgtgtggataggcaatgttttccctaagagaacggcacatctctatacttctcttgtattaagagatatttcccaggatcctccagctaattggcctttgggctccttggttagtgctgctcatgaatttccctgttaaaaagttgaccggggacacttttttgttctgttgaccggtcccggccagagagaaagaggagtagaggtaggaggtggagcgacaggcgggcaggtgactcaggatctgtggcatgctgaaagacactgcattcaagcaagcaggtgtacttgctgtgtgttcagattcagggccctcagtttttccctcgggtgagttgtaaagacagccgagaagacgaaatggagtctgatagtgtgctctgcactcttgtcagatttttgagtgactctttgtggtccttctcttgacaaccaaccacagtgggagcttgttggaaggccccggagatgtgacagatggaaactgattccaaattaatggagaaaatgttgcatctctccttcatagcccgaccggaagagtcctctacaccttaggatttgctatttttttcgtttgttgccacataaacctcagagtccccgagatctggtacggtgggtgtgggggtgctttcaaagcagtctggctacagttgattatctgggtcttccctttgataaggatgtctcttatgaaatgaagattttgagcctggtgtgatggcacacattggtaaactcactgtggaggctgagtcaggggcattgggagtttgaggccagcctgggctacaatagagtctgtctccaaagagaagagaggaaggaagggaaaggtgaagaaaaaaggtaagggatggaaaagggaagaaaagggcaactggatatggaggcgcacacctttagccttgacactagggaggcagaggaagtggttctccgagagttccaggccagcctgggccagcctagtgacaggttttataacaaggaaaggaaaagggagaggtttcctcttgcagagcgtccttgggcgtggaccagtggagttgtgttccttgttggctgatcccctcctctaattcttcccagccctctgtgccagccacatttttgagaatggctgtgccggactcctcagccatagcccagggcccaggaagttgtggatggttgtcgatctcacaggcccactccatccactggtttgctggttcagtttttgttgttttctgagacagggtttctctttgcctgagtcagggtttctccctgactgtcttggaactcacctggtagaccaggctagcctcgaactcacagagatcctcctgcctctgcctcccaaattctgggatcaaaggtgtgcgccacctccgcctgactcacactcagttcttaagacccaagggttgtggtcctgcacggtcccaggtcccagctccaaccacgatgccttcatcggcctgtgtcacctcccggcacagtgtatgtgtggattgatgactgaagtctttgcccacagatctcatacgcgttggtcttgtggtttggagtcctttcttcccgtgtaggtgggaatgactcttacctgtgagtgcagagatagaaggagactaactggcggtaatgtgtctttcccctaacggccctgtgtgtgtgtggttttttgacttgtagaagattacagtagcagaatgcatcgagacgcagagcaaagccatgaccatgctgaccattgaacaactgtcctacctgctcaagtttgccattcagaaaatgaagcagccaggggtaagaggcctgttccctgctgggagccggatgacctacaggttccctcgtggcacacagacacgctcttggggcccttcctgcatgtacagacaggagatatgatagtccgaactgaaacagtctagtggggagacggtgggagtgaggtgtgggtggggtgtcgagattccgaagacaagtgcgatcagacccaacgaggtccaaaccccaccattggaggagggactccgtgctcttccttggggcctgtgtgaaattctgtgagaacagagcggcagcccaagttagttaagactgaggcagggagctctctgtgggtgagactgttgttacggggatggggcttgagatctgtgtaggaaggaaggtgggctgcctgccatatttgcctgtcaagggatgtgcctcacagcagtgccctcctgagaggctccaccatgccagcactgctgtgtttggtacgtttaatcgttttgggaaagtgtcagaaaaatgctttttgaaaactgtttcttgtggtactggtatggaacctagggccctgtgaacactaggtgagtgttctcttcttgagctcttcttatctccagccccaagacatgtcatgtttgaaaacggaatatttaaacccaggcttggtggtaggtacatgcctataatcccggcacgagggaggcagagttcaaggctaccttgatctccttgacaggttttggtttagccatggtcacgtggctaggcactggcagaggagccggctacacacacacacacacacacacacacacacacacacacacacattgcttaaagacataattcattacttagtcatttttcctacagatgaattcaaggaacattttgggtggggctccctcttctgtgtgcacacagtcaccctatggtttaaggaaagaggtcaccgaggctctcagtgctgctgttggggctcagcctttaaagctactacaaaagcacagaagtatggccagcaacatgtcccaggagataacatgcttgccgaaaagtcggctgatcagactgatccccaggcccctggcctccacaccctcacatgcctgcgctcccacacttagaccttcatatgcctgcatccctacacccacaccatcacatgcctgtaactcccccacccccaaattcctgtacctccaccccctcacatgcctgcatccctacaccctcacatgcctgcatccctacaccctaacatgcctgtacccccaccctcaccccctcacatgcttgcacccctacacatacactaaagagataaatgtgataatgcagaaaataaaagcaaaaccaaaagcaggctttggctttgagatgtattctgaaatctgttgttacacaagggaaaaaaaaaaattcagctccttccagttggctcttgttaaaccaggaaactatttttctcttgaatcccagtcattgcgagtaaagtatatagctagaatgtggtacaaggagcaacaaaacagggtttctctgtgtagccctggctgtcctggaacttgctctgtagaccacactgtccctgaactcacagagaggaatctgcttctacctcctctgagtgcggagaccaaaggcactgccatgccccgcctcccagtctgacttggtaggattctagacctaaaagaaaagctgaaggcattcattctttatgcatgatatatttgaaagagatttatttttttatgtgcgtgggtgatttgcctgtgcatgtaccatgtgcttgcctggtgctctaagagctcagaggatcattgacgcctctggaactagagttacaggtgcttagaatccactctgtgggtgctggatgcccagacacacacacacactcgcacacgcatgcacatgcacgcacactcatgcaagcagccagacaagggcaccacattccctggagctatacttgcagatggttgtgagttacccagtgtggatgctgagaaccaaattcgagtcctctggtgaaggagcaagtaagcttaaccaccgagctatctatctaggatctctttcttccatccatccatccatctatcccaatgcagggcttcttcgtgaagccctggctgtcctggaactagccctgtagatcaggctggccttgaattaggttctacctgcctctgcttcctgagtgctggggttaaaggcgtgtgccgccatgcccatccagcacctccttctagcattttaaaattaaagagtaaatacctgccacccacaccaaccagtagttgccccttgagctgatgcctcaagtggatcaagatcaaaattcagtgagcctggcttcttgagggaggaacagaatctcacgccgtggatttcacacccagtgctcacactttgggaaagtgttttgagttaccttatcagcatcattttcccctccagtcagttggtacacggtcaccgtcctttagaggtccagagtggtcagcagtgtggtaattgtttgtcttaatggaagaaggcagaggcttgagcatctcgaggtcgtcctgtgtggttatctctggaccatgaacatgtctgcttctcagcatcctctgctgcccatgcctggtcttcagggtagtgatggctttttgcctgtgtgtgtctctctcttacagacggatgcattccagaagcctgttccattggagcaacaccctgactatgcagaatatattttccaccccatggacctttgtacattggaaaaggttggcctctaccaccgagcctggccatagtagtagcacaggtgttgagatagctcaggctctcccgttccttctccctgccctaactccaagtggattaatctggacatcgtcagatagagctttccgtcttccatgccctttctctgtgaccttctcccggtcggggtggcgtctcaggggatgttgaaatcctaagcggtgttcttgagggatagcctcgcttttgagaattagtgatttgattgattggcatcttaacttcctcctgaggtgagaatgagatcatgaggaaggaggtcgagaagatgacatgtttggaaaccttcagatgagcaggaaaggggcttctcagacctgcccatcaggctgtttcttgaatgcccttaggtggttttaagagtctgtgctaaaattctggagtgaaaaatcacactttaaagacttcgattgagcacatctttttgtgcagatttcccaatgtaggagctaagtatgtgttggaaatacatctgtgaggggctgggactggcctggcctgttcagggaagaaaacaaaagcctccataaagaggggacacaatggcataatgtctgcattgctaacccccacccccatcccccaccccccaccccccaccccaaaagcagtagatcacatcgactttggaaaattgcccagactttttgatatgcaggaaatagaaggcattaaataaacagcggggcaggatcctagcttcaggctggggaaggagggggtgtcttcacagtctcccacctcagtttctcctgtcaaacctcactggcttttgtgaggtacgtgtgatatcccactgtacgagatggtgcccttgattggatgaggttgctgaatggatgacagcgttttcaaaatgagaatgctcaaatccctgtgatgactctgggcgccttttatagggctatagatcttgaacctaatagcatcctgggagacgagtccgagagcgccgattaattcggcagatggctatgaaaggcgcggggacccaggtgttagcactgccgcctgtatagacttcgacggtcataatgttctctggcttctcctcccagaatgcaaaaaagaagatgtacggctgcacagaagccttcctggccgatgccaagtggatcctgcacaactgcattatttataatgggggtgagtggcccggaggttcccaaggcggagggtgtgccgctagtccggccatctcctgccttttgctaagatgcaggtttgatgggtcctgccatggcagcacctgccgctcttccagacaatacgggattggtttcccaggacccatgttgggcctttcagaactgcctgtaactccaagattccctggggctgatccagctcttcagtcctctgccgcttcatttcgtctctcccgtacacatagttgaaaagagccttaataataaaatcaggcttaggtggctgggaagagctgagttgcccttaaccaagcctgtgtaaaaaacctaggagtcgggctggcgagatggctcagtgggtaagagcacccgactgctcttcccaaggtccagagttcaaatcccagcaaccacatggtggctcacaaccatccgtaacgagatctgactccctcttctggagtgtctgaagacagctacagtgtacttacatataatcaataaataaatctttaaaaaaaaaaaaaaaaaaaaaaaaaaaaaaaacctaggagtcacggcacccgtctgtcaccccagacaatgtagaggcagggaagtgtccaatgctcttggatgagtgagctgcaggctctgccgaaaaacacttagagagtgaacggaggggacacacctgatgaagagttgtttattacgtcatacaaatggaaatgggctcaggtggaggaacacaacacttaactccagccaggatggccagtgtggtgtgggctggatggaggatgggagatccctgcaggtctgcggaggccaccgttaaaggccccttcctgtgcattgtttgtttacttgccatggcaatgtgttatgtgtaggtatggatacatgcatactcaatgagtgcacattcctgtatgtgcctgccaggggagggggcatgcacctgtgtgtgtgtgcacacgcctgtatgtgtgtgtgaggcttgaggtcaacctcagaaaccctccaccttggtctctggttgtcttgtgggaccgtgtcgctcaggcttggagctggcctgttaggctagagtgactggccattgagtccttagcctttcaaggctagcactatactgatgagaccatctcctcagcccaacaaattgacagcttctgaaaatggctatcaggatcagatagaccatagccctttggccatcctgatctctctgcattggtgcaggggagagaggctcggcgtcacatctttgcctgatgcccagctcgttagctaagagttctggtagaggcagggactctggattttgactcaatagtcattaagtaaatgagaaccatctcacctgtttttctatagtttcaggtggaatcttagggaggcaccagccatccttcctggccatggtgtactgaaattacagggttaagtaaaggctttctgctaattctagcctttagaatgtcagagtacttgaggtaatttatctacggaattccacaccagctactcagttgcaagatgctggcaaagcttggtccttgatagataagtttcagcctttaaatggtgaatcttacggggaggggaacaaattaaaatatcgctaatgtgagtgtgtaaccctgaggcaggctgtttcctggttactggttgcctgtgaagtaatcctcttttcttattcccttaggaaatcacaagttgacgcaaatagcaaaagtcgtcatcaaaatctgtgagcacgaggtacgcggtttgggggctctcctagaggcagggcaccccagtgggtggctgcagtgacttttgtgtgcactgtatcatgcatggcatcatgtctcttcaagcaacatcagagcaggaaagagggaaccccagtgttacaggaggagccccttagttcagcagtgaagatgggaataatctttaggaaattgtgcagggaatccagtctttgtcagtttgtctggtgtgaccttggcgtctacagttgggattgagttaggtagccgatgacatcattcacaaaggaaggctccagcccttcctcnnnnnnnnnnnnnnnnnnnnctccctccctccctccctccctccctccctcccttctttctttctttctttctttctttcaatggggtctcattatacatcctgactagccttgaacttgctgcataggttgggctggcctctgcctctgtagtgccgggagtagaggtgtaaccactatgccaccattcctgccacattgctcggccgtggtgggtttccaccccccctcatctaacttgattgtgtggttctcaggcatgaaattcccagataacagcatgtcaatgatgtcaagagatggggcctttctactagttggtggcaattttctgactgcttccaggatagctatgtcagtgtggacacctacctgggtgcaagtgtgtgaaactgtgtgttctttcagcacaggaagggcctatctttgtaaaagattcattcactcattcatttactcgctcattcattcattccttcattccttcattgtgtttatgggtacctttgtatttatgtccatcatgagtatccagatgcctgaagggaccagaggccatgctcttagaaatggagttacctgtgctttcaagcttcctgaggtgggtgctgggaactgaacccatgttgtctgcaagaacatcaggtgcctttaacctctgagccacctctccagcccatctatgtaaatttaaaaagtatacgtctgtgtgtatttcctgcaggtgatcagcagacagtaacatttcactgtcctttctggttgtattgcgttggcagcaagccttgacgcacccctcactcttatcctttggaaggaggggtacagtgctccctcccacttcagtccctagttacactagctcaggcggacggatgtgggctgaggaatgacgatgtagcagatcacctgctacatacatgggccctgcatggcatcaggaggcaaggagcaatgtgagagcgccaataccgggaaaataatagctgctaagtatgttgaggagacacaggctttagagatccactgcccgggttcaattccctgccctacctctctctgccacaggggaccctcagtaggatatttgaatttttagggcttcatccctttctgcagttaaaatgagatgatcgtggtctgaccttgtcccactgtgagaagtaaatagacactcaggcgtggaagacgtaggcttggttgtgttaaggtgttgtgaccgtagataccacaggatatctcagtagggctcagtctgtggagttagctgctgtgtggattctgtgtgtgtggtgcatcatcctggaccacctatgaagtggtgcaggcccagagtcatgtgcggcttgttttctgaagcctctgggcttgtccggggtaaactttgactttaggtgagaccattggtgggttctaagctgtgctgtccacctgtttgaatatcatcttaaaggtgggcaggacagccatggtgtggctgatgtcctggttgttattagtcagtcagcaaactgagtgtgtactgttgtgaacctatggtctcagcacttgggaggcggaggcaggagactctcttggtcactttgaggccagcctgagctacctggcaagattctgccgctctctgcctgccctgtaatacaaaagaagaactagccgggcgtggtggtgcacgcctttaatcccagcactcgggaggcagaggcaggtggatttctgagttcgaggccagcctggtctacaaagtgagttctaggacagccagagctatacagagaaaccctgtcttgaaaaaccaaaaaccaaaaaaacagaagaagaactaaaagaagaaaatctgatcttgaaatgaaagtccaagcacggaaaggggtcggggatttagtagggcttccagatgggggacccccgggagccccacactcttagtagggcttccagatgggaggccccggggaccccacactctaatgtatctttctctttacagatgaatgaaatcgaagtctgtccagaatgttatcttgcagcttgccaaaaacgagacaactggttctgtgagccctgtgtaagttggatcccgttctttggtttcacttttggaaactctggtgcctttggtggctacaccgagatgaccctctccggggacttacgagacgagactgggaagctctaatggaagttgttctgaaaaagtcagggcggaggggaactgagcaggctttggcggcctcttgggcggaaccgttttgttccagaattaagtgtcctggtaactgggttgactgtcgagggggactgtgacaattggggtgcagaccataggatgtgtcagaaccgcagctgcagcttgctgtgtcatttgaaataaagtctggttagttcctgttttaagaccctagatacacatccctgggggactgtctgtctctccagagagttcgttggtttatggaagtgcaaagctatgtggtaaactcttcttcgacagtgttgggcgttgaccaaatccagtacgttttaagcaatggtttccagccttcccaatgctgtgagcctttggtacagttcctttagccgtaaaaacgttttgctgctatctcctaactgtaattttgctgccgttatggatcatagagtaaaattatattttccattgaccttaggggagccgagacccacaggttgagaaccactggtctccagagttgggcatggtgaggtggagagagcggtggcgtggagggttcgaacaggcaagaccggctaagtaaaggatggctcaggcctctccttgcctctggagataaacaccagtggagctaaagcttgggggagccccagcacacagtgtggctcctgcagcttcttacttttgtgtaactccacgttttgtacaaacttagcacagagtaggtggtgactgtttctgcggtgcctaaggaggtggactttttgggtcagccaggacccaagccttattcactcttttagctttcagcttcgcgcaggcgctgttcaggctacacgcctgccgggggtccccttgcttgcctggctcatgtcctattttgctttctaattactgtgataaacacccaggcctgcagcagcttggggaggcatgggtaaatttcatcttctagcttatatagtcctttatccagggaacttaagacaggacctggaggagatcggctcactccgccttgcttctcagggcctgcatagcttgctttgtaaatacacccaggaccacctgcccagcagcggcttggacccgcccacaacagatgtcaatcaaggaaacgccctccagctctgtctacaggcctgtccgacggaggctgtttcttacttgaggttccctcttcccagatgactctagcttgtgccaggttgacggaagcctaattaatcagcacagggctgtgccctccctgcctccctgcgttcaggttacctttcagacttgaatgtgtgtcttgctgccaaatataacgccaaccctgccttttgttgttcttctagagcaatccgcaccctttggtctgggcaaaactgaaaggatttccattctggccagcgaaagctctgagggacaaagacgggcaggttgacgcccgtttctttggacaacatgacaggtgggagcttaaaacaggctgtgcgtggaactttggagaatgccatcacagagtgaaggtggcggaggggtactgtgttgttcttaaaagcgaactctacctttatttatttatttatttattatatgtaagtatgctgtagctgtcttcagccactccagaagagagcatcaggtttcattacgggtggtggtgagccaccatgtggtcgctgggatttgaactcaggacctttggaagagcagtcagcgctcttaaccactgagccatctcactagcccgaactctaccttttatcactagtgactacggctattgtttttatatattgtcttagcagcctgtgaccttgttattgcaaaatgttttctggttgtctgccaagcttggtgagggggggcttcgtccaggtgttttggagggttagcttcaggcgtgttgggaaagaacctcgcctccctggttctcttggttggatctggcttcagaaggagttccgtggctctgtggcctgctgtttgatgtagacttatttatcccttctgtcttcctggagtaaatgaacacctctgtgcaaaccacttttaaaagtaatgctttcaggaccctgaggtcgtttcccagtttgccactaaacgaagctcctagcataagatggagtacctcccctcctcatccgccttcctgtgtatctaaactgggaagtgacagaggggatgatgttttgacagactcaaaccctccctcccagcctccccagcctcccctttccttcctgcacaggctgagtggagttatggagtcgctccagtagctccctttgcttggcgccccgcctgcctgtgaataccaggtagtcagagacaccacttaccgtgcaagttccctcgggattaaatgaagcaaaggttccttgggagtatggccccacccccgcatcttgagaagatgtaggaatgcagtaggggttaaactcatgtgccgcacagaaaatagattttttttttgtgataatcggcatctgaattagcatgctcactctgtcacgtgcttggctgatgaatcaaagcaaaaaagaaatgaaaaatctcaatattagagagattgagtttcttacagaaattccagtggttccccctgtcaggagaataggtgagttcttgaggtaatactggctttggcggggtgcagcacagtttaattttcccaccaccactcccccgtctgtggggggaggggctcatgtagcttcaactggtctcaacttgttttatgttggactcctgatcttctttgcccacatcctgagtgcagaaattccaggcgtatacctagacacctggtagtgtgttgttggggatggatcccaggcttcctgtaggctaggcaagccctctccccaccctgtcctggtagaattcatcccgaatgtcagcattccttcagttaaaggaatgtgctccctcaggctctctcccatggtgcattgcttcagcacgcaggcagacacttgtccaagctaggctccctgtctcccatctgtaggaaatgcttggtatgaaggccctggtggacctggctagatgggcagcgcccagtgaagggctgtgtctggagcctgggctgtaattagtggtttgaactgggtgctctggggagaggcaagtaagaatttgctttctgtttttagagcaggaggagctggcggctggctgtgccttagccggctcctcgaagagcatttgaggtgttcgccatcttaatgggttaagactctcctgtgctaatctggtgggttgcttttaggcacggtggccccactgtggttgtgtgaacagtaccttaatgccaacactttggaggcctaaggtatccccatctgaaggaactggggtgcacactcttcccaggagaattcttggttctgggtgagcccccatctctccccagacagggtttttttttgttgttgttgttgtttgtgatagccttggttatggtagacttatgtttgtttgcttggttgtttgggacaggatctctctgtgtggccctggctaatctgtggaattccctatatagaccagcctggcctcaaacactcagaaattcgcctgcctctgccccaccccctgtgctggaccaagggtgtgcgccaccacacctgtccctagacagtcttagtcactccaggtggcctcatctgcagcctccttcgcagagatgtgaggaaaaacggtgatatggggacccgagagtgcccgacaatagactcttcgattgggggccccaaagtgaggcgggtcaggctaagtgacagcccagagccctctactgggaggtcaaggtgatcggtctgagtttgaacccatagggcctccagcagcggtcatgggaggctctgtaggctcccccttcaaagaattgccgcttggttttagatctatgtgccgtgatctaaaaatataggaactcttatgccgaatgagtgcaaggcttaaggaaaatacctggggttacagtcactttgtcaccctttgtgaagtgcctgcttttaatgtcagtctaactgatgagaaaactgggcccagagtacaatggcttgcccaaggtccctctgggaaagagcctggccccgaggctgctggggctcctccctcaggctttctgtgtgaataaattctcatttctttttaaggacaaagagcttattcttgtctaggccccttaggtgacttgggaacctggggggtggctggacagttatgaccttgaaaccataccagtgtagagtgggacaaggaatttgggcctgtggcccctggctgaggggagggtcctggtgttgactcacaattgtggcatttgctgtcttggtgttctcctaggtaggaaatgtccccgggctggggacccgagtgattctgacctctcccttccctagcccggagccctgtctcttgtaggtattttgtttctgttcaacctcggtcaggtccacctgactggatccaaaggtcttcaggtcccagcagagaggtatccctagcacacacagggagggggaccgctctccaaggccagctgcgtgcttgggggttctcacgtgcagccaggctgtgtgccgagctttgcctcttcatttcttcctcagatgtaggggttcaatgctagctgttgacatggtgtaaaatgttgtagacgccgggtggtggcggcgcacacctttaatcccagcacttgggaggcagaggcaggtggatttctgagtttgaggccagcctggtttataaagtgagttccaggacagccagggctacacagagaaaccctgtcttgaaaaaaccaaaaaaccaaacaaacaaacaaaaaaacaaacagaaaaaaaaatgctgtagaagtatccctctgttctcttcaaaggtcaggaaggctgggcagggctggatccagtgttgtaagtgggcacttcagacatagctgcatagatggttctcttctcggagcaagaatcttctctcccctggctcccaccacatcccatggctttatgcaaggcttctgttggaggtccaggaaacccttaaaggtctccacaggaaagttacaaactaggttgaggctgtagaggctggagtgcacaattggcgaggtgttctgctgtccgttctccgcaggagtggtggttgggctgttctcagaccttcccgaggtcctgggggaaagtaccaagtttcttttggtttctgggtcctctgcaaaatgtcctggcggttgatggaggaggtccctgaggtagcaagctctgtggagagtgtccaccccacagccaaaagctacttagcagcaagtgttcgttctgggtggttctcttcccaagtgttacacgggtgtggctaggcagtgaggaggctgacacggaagcatcctgagttgcaagctaacctagacaacatagtgaaatttgtgtctccagtaaaactgaaaggtacacctgcgtgtgcagcccaggaagatccaggaaacgggaccctctttagacgtgtctgtggaggactctgttttccttccctggaaacagcagcaaaccaaagggattatgggattacctttcgtatttatttgtgtatttatttatgtatgtatgtatttatttatttaggttttttaatactcattttgttattcatccgtgtgtgtgcatgggagtgccaccgcgcatgtgtagaggccaaaggacaacctgagggaggtggctctccccacccgggctttgcaggagcgggtcgtcaggcttggcagctgcagctccacccgctgagccatccattttatttctaagcgattaagatggctgagtgtgcggaaccctttcacgtctctggctaagttttgttgttagttcgagttctatccttaatacctctgtgaagtggatcattcattaaccattcaaaacaagtcaattatttaaaaaggaggccccatatttaagaatcttggcaggcgcctgccaggctaatttggtttgcattaagaaaattaaaaaaaaaaaagtaaactaccttggaaatggctgaagctgactcagagtctctctctctcttttgccatcctagagcctgggttccagtcaataattgctacctcatgtctaaagaaatccccttttctgtgaaaaagactaaaagtatcttcaacagcgccatgcaagagatggaagtttacgtggagaacatacggaggaagtttggggtttttaattactccccgttcaggacgccctacacgcccaacaaccagtaccaaatgctgctggatcccagcaaccccagcgcgggcacagccaagacagacaaacaggagaaggtgaagcttaattttgacatgacagcgtcccccaagatccttctgagcaagccccttctgagcgggggtgccggccgcaggatctccctgtccgacatgcctcgctcccccaccagtacgaactcttccgtgcacacgggctccgatgtggagcaggaccccgagaagaaggccccgtccagccacttcagcgcaagcgaggagtccatggacttccttgataagagcacaggtcagccccagttgggagagttgggtaggaggccacttggtgcattctggcgtccctggatgcctccctcataggtgcgagccggcaggcaccaccagatcccacagatgagggagatagtccccaaagaaggccaggtggggccattcttagaagcggatggcaatggccggccacaaaccctgcagggctcgaggccactgtcagagcctcatggctgttcgcagcagtgcccttgactcttttcttctcatcacggtgtagttgaaagcttagtttttgatacctttgtgttagggttgacttagacgtgaggagactgaggtgaaaattgatcccccttgcctccttcagggctggcgttttccagctatgtgtcgtagtttggagacaacaactggtctctaattgcaggactccccatcagttgatgtggctttggggacatatttaatgtctttatgccttagccttcccacctctaccatggcgaccgtaactggctacgccgagcctcccctatgtgtaagctctgttgagagcacaaggagtcaggacccacagtaggacaggagcactggggcagtgttgaccatggaattctttttcctggtgatctctaaagtgctggctgcgaggatctgagaagagatgcaatggaggggtgacttaaggaatgttcttggcaggaagatcctcccatctccctcttccacgggctgggcttacaggtgtaccccaccacagctgccccattaaaacctgcttgaagttagcacatcgtaaaataaagtgtgttcgtgtgcaaactcccctttgctctcttgttccgcatttcaaaaaaaaaaaaaatagagctttataggaatctaagaatggttgtgtttaatttagtgtttgtcttcccttgggtgggatccgtggcatcgagctttgcggcaaaattccttactcactggcagagtttttcttctttttaaagatgagaacttagacttcaaagaccctattctaaaactacacaacctactcagcccaccttgcttgacacttgctaattccgtcataaggtggccatagaagacgctactgtgacagcacatgccagtgtggtcaccccagcatttgggaggtaggggcagggggattaggagttcgaggccttgactacatgagatcctgtctcaaaaatactaaaataacaaccaaaaaacccaaaccctcaacaaagaaagagggtgacactcagattgttatactctcaacaaattgcgtcccttgctgagtgggcccacagtagacaccgtaggtggtagttctgtgtttcggtcgtggctgcagctctggacattgaaagctgagttccaataaagcttaactggtgttggttggtgggtaatgaagcttgaagttctctaagtgcatgctttaagcactattgagttgggctggggagacagctcagtggttgagagcactggttgctcttgcacgggagctggcttcaattcccgtcacccacacagctcctcgccatctgtaactccatttccaggggatttgatgtcctcatctgaccttcttgggcaccaggcatacacatggtgcgcagacgtagatgcaagcaaaacactcatacagggaaaaaaaagagaaaaagaactattgaatttttttgtgtcccaaccccaatgttctatacccttcttaaacagcaggccacacagggacagggaacagattgggccctgggttcagcattgccagctctcactatagtccacaaagtccagaaaggactgtcacttggcaaatcctcccagcccagccctgaggcctggcctgtttcctcctgctgctccctcctgccctctgctgttagcattgatgacagctgctagtcagcccagggtgaggaggctgtccatactcagacacctccacaggcagggatagcacagttgggatcaggctggggtccctccggaatgttagaaaacttcatcatgctataaaatagaaagaccacacaagcagcttccagaatccagagtggccctttattgtatacgtatgtgagtgtgtgcatacgtgtgtgagtgtgtgcatacgtgagcgagcatgtgcaagtgtgagaatttagacccttatttccctccctccttttcctttccttctctctccctccctctctttctaacagggtctcactgtccttaaaccaatagagagctgccggcctgtctccctggtgctggggttaaaggtgtgtagtctgtgcgcatgtgtgttcgggcacacgtgtgcattcatatgaaggtcagaagacagtttacagaggtcaggactctgcttcttccgtgtgtgttccaggggactgaacgcaggccatcaagttcatggctggtgccttacccgctggaccatttccctggccccaagaccgtccttttctttagactactcagtagtagctcatcctgggtctgttgtccctacgagcagattcaactccctaagcagctgcctgtcccgcagggggcctggcctgtagctgccacagccctggacccctgcccccacatatggaccacttgggcaggcgggtttcatcagccttcggcctttgctaactctttcctagagaccccattgagaatgctaatgtgtagtatggcaccggcctgagcctacagacccctctgagctaatggcgctttggtcttggcttcccgctatggggctgctgtcagggaggcaggagagtgttttcacagactccgctttactgtgaaatcaatagttgtcataaaatggctgtccatgacaaatactaagtcactaacgaaccctccctcccatggccagctctcctgaggaattgcatggcgtgctattaaacctcaggcacttacccacagtcacggagggagtggactgtgattgacaggtgatagggtcaagggacagcagagaacctgttgtggccttgacctgctctgagctttctgctcacgtgcactggtgtcgtgcttctctgggtggcattcacactttgtgtgtgtgtgtgtacgtacacgctccagcacttgtgtgcaggtcagaggacatcttgccgttgtcagttttcaccatgttcgtctcaggctttaaactcgggtcatcaggcttgctggcaagtgcctttagcagctgagccaccttggtggccccaggtgacccttgattagcactactggtctgttttgttaaagtcccccaaggcctgaactactgtggtatggtatggggctttttgttatttggctctgacacagtgtggtccaattgctgctacagggaagccccaaatatacatacacacacagacatgtgccaactgtccagcctttatgtattggcttattgtgtgtgtccctgtcctctatctagtatgcttctgttgtgatgaaacaccattacacacacacacacacacacacacacacagagcaaacaatggccttgcccttggtttttttttttttttttcttcaggagtggagtcctctgggcttgggctgtgtgcagcttctgtttgcaattcactcttttttgtttgtttgtttgttttttgagacagcaacggggaggtctcactctagccctgactggcctagaacacaccataaagaccagaccggctttaaaaataattaaagatttatttgtgtttgcttttatgcgtctgagtgttttgcctgcacccatgcatgcttttttgcctgcagaggccagagcaaggcatcaggatgccctggcactggagttactgatggttgtgagccaccacgtgggtgctgggaagcaagcccaggtcctctgtaagagtgacaagtgctgtttactgctgagctgtctctacaatcccttaggcaagatttgaactcacagagatctgtgtctgccaccagagtgctgggattaaaggtgtgtgccacatctgacctattttttcccccactatactttgattcatctgtgcctgtatatgcatgcattgtgcaaatttgtcattgacatgtaaggtggtcagagaacaaacctatgagaaccagtcctcccttccatcatgtgggtcccagaaatggaagacatctctggtcctaagacttggtggcaagcaccttcattcactgagccatatagctggcccacctttttaattttgaacttgactttcaaggaaacatggtgcgctggttgactttttgtgtggtgacacctttgctttctgtgtttgggatcctgtcacctttcatgtctgacctcctcatcacatctctaaaggcccaagtggagccctgtttcaacctccttgtttatgtgactgactgcgcagctagagaagccttggtttttatccccggggaaagtccgttccccgaatcgtctttaactatcacaaacagcagtgaatgaattatttaaaatgttcttgtagtagtgattctacggaaagatgcctcatttggggcttgacgtctcaataaagtacttgtcttaggaacctggggacctgatttgctgcccgggagccatgtaagaattggaggcgtgaggcatgggggtgtgtgtttgcgaccccagtgctgggcaggaggcaactgggtccctcgggcttcctaccagctagcctagcctgctctgggggtagctccagacgaatgagaggccttggctcaaaactgaaacaagcaaccggtaaggagggatacctcaggccaccccatgtcctgtgtacaaatatgcacacgtactcttctgcacaagcaggcatatacactcacacggcggctcgctcactctcatcccttggtgtgacaagcactctgtcccgcttctgtttctagcaagtagtgtggaaataacagtaacacacacacacacacacacacacacacacacacacagcaacagccctcggggaagggaaggctgcctgcttactaggtcaagcagtctgctaatccctatggtaaaatgaattttcatatttaccaaatggagctctcaggtttttttttttcctttatttgtgtgttgtgtgctgacctagcagataggtagctaattgctgctccgggtccatttccagagggaaggggcgtccactccaggactgaatccatgtttactccaggagtcaggtgcttctcgtcaggagcagcatttgaggccaggcgcaaactcctccgctcttatttatgtgtaaagcttattattttttttttttttttaaagatttatttatttattatatgtaagtacactgtagctgtcttcagacgcaccagaagagggcatcagatctctgttacaggtggttgtgagccaccatgtggttgctgggatttgaacttcggaacctttggagagagcagtcgggtgctcttaccccctgagccatctcaccagccccgtaaagcttatttttaaaggcatttatgcacacgaacatctagatccaatgcgtggataggcacaccacgtgcatgcgttgcccacggaagccagaagaggatgtcagattgcccagaactagagttacgggcggacgcgtttaaatttcatgtgaactgggtggtggtggcacaggcctttaatcccagctctcagaaggcagaggcagacacgtatctgagtctgaagccagcctggtctacagagtgagttccagtgtagccagggctccacagagaaaccctgcctcagaaaaacaaaaataattttgtgtggattagttctcgctcacatatatgtctctgtaacatgtgcaaaccatgcctgcagagaccaggagtgtgttagattccctggaactagaattaaaaatggttgtgatctgacatgtgggtgccggcgcctgaacccaggtcctcagtaagagcagcagccattctcaacccctgaggcacctctccagtccccagatgataattcttcatggcggggattttcccatcccttatttcataacatctggctctgtggcattagatgactgctgactctgcccgaatccctggccatggctagtagaatggactgtgtgcgttgctcagtatgtgctggtaaggctggcacacacacaactggtctccatggaggaactctagtaaggaaatggaagttggcgacaagagcaagcacacacactgacacagactgctcggtgctcttgacgccatcaactgttgagtcagtgtcactgtcaccgatgtatgtagatgtttttgtcggccctgtcaggttatccctcttcccaagggagctgcagacagaggcaccttaccaaaagtcccggccaaccgttaagtgtccaccattgattgagcctaggtctctctagttttgagtcttccccttatactaagaatcaaatcgcaagactggaggaaagtcgctcgggatcacgggtgtacccggcacttactgaggatgcaggattgcttcccagatctcccatctctttggttccgagggatccttgcgaactcagtgggcacctggactcacaggcaccctcagtacacacacagacaacacagaaccagtcatacccacccagccaaacgcatgagccttcttcctcagaatggctctctctgcagggctggctggctggccacccgctatgtagccgaggttaaccttgaactcgtcttcccgacctgctgcctcactaccaggattacaggacagcgccacagcaagcctacatttctgtagtctctgatggtgtcttgtttactgccctcctgggccatttaggaattcctgtcaggaacagatctccttcgcatctcctatcttcgggtgctgccttgtcagggctcagaaacgatgctgggcagtgcgtgagggtaaccggtcaggactgggtgggtctttaggaagctcgtggtccctctttgttctccctgtttaaacacctaaggcatggcaacatggtctgtccttcttgcaggagtctgaacctcactgagaaatgagataatttgccaacatctctaccccttcacccgatgcccagcttgctttcctgtagccctccccagggctggtcagagacaggtggggaaggctctgagctgtccccagactcttaccaatggctgtcatgcctacatgctcctgacccgtgcatacagcatatgaggggggttttgcttatggcttaaacccataaacgggccaatgcaatttcagtggcagcctagccatttggctcagagcctgtgtttggtgacagccctttgttggcagttcatggctgcccatcttcccagtcccacccaggaccctgaacagcacttgtgcagtgaagcacgccacaccccttctctcctgtcctcagccccgaccgaccgaccgaccctgggagctttattggtttactgatctgtaaagccagctttctaaccctgacatacttttctagcttctccagcctccaccaagacggggcaagccgggagcttgtctggcagcccaaagcctttctctccgcaagcgccgacacccatcatgacaaaacccgacaagacttccacctccaccaccgggagcatcctgaacctgaacttgggtcagtggcgtttcaagaagtgtgtgtatgtgagtgtgtgtgtctggcagcaatgaccctttgtccttgaacttctcctttctctctgcagaaaatgtaaaggcgttggtgggtagagggaggcaaggggaaatcggggaacagggtgaggaggggcttccttgggcagagccttggcttgcaaaggtgttttaccacagtatcctgggccagtctttacaagtaattcttggaagctagtcccaccctgtgcagatccatgtgactgaagcaagttttacaagtcttactgttttgggctgggtgttctgatacagtttcaattctcttatgaatatgggtgtgctgcctgtatgagtgtctgtgtgccacatgcctgtctcttgcctgtggaggccagaaggcatgaggttctgcagaaccggagttgcagatggctctaagtcaccatggcagtgctgggactcagtcctgagcctccaaagttacagccagtgcggtttaactgaggaggcatctctgtaaccatttctcattttataaaatgtgaattctttcatctggattgagcttgccttgtagctcaggatcacatgatcctgtctttaccttccaagtgtagttattggcatgtgccaccaggcctggctccacttggtatggggtgtgtgtgtgtatgtgtttgagacaaggtctatgcatatagttctagtttgcagttaaatttctatgcagcctagagtggcctgcatagcagggagcaaggggcagaaggttagaatttctgggatctgtacaggttggctgctataggcctgtagtttccatatttctgagtaattgaatgctgccacctagtggctacagactggaggtgcagcttagtgtctggtgctgatgatgacctcagcgcagagatccacccagccccagtggatcccctgaggttgagagctagccttagaatgttcggaaggagcaggggccctgggccactggagcaggtagggatcagtggagggaagagcaggggcaggaggccacagagaaagccactgccaaggggttgtgatattccagacaccttggggggagggaggccacctgtatatggtattgagttcacagcaccatccaggccacaccacttgttcccagggcaacaggactagcggccaccaggtgtagtccagtttcctaccttgccttatggctgcagctggacagccagggtccttgctaggactccatccagagccaccagctggttcctcgattgattcagaagggacccgattgctgccttgggacatttgttctagaaatgtggtttcttttctcagggcctcctcccaccttcacactctgaacagaagctctgtggaacagaggcgttctcatggtgacacttcctttctgccaatcacgcctggcaggaatagcttattccgtaaaccacggagcccactgggcatccttgtggtatcctgggtctttgaagcttgaggtacagcagtggtggctcaaaggtggctctggggaatccatgatttttgtcctgtgacccctccaacccccataattccttctagagtacatgtctcatttcattcagtcaggttgaaagcgtcagacacgtgggtgggttcctagggtggggtttcagcctcataggtaggggctccactggggaccctggagaatgctgtgcgtggtggtgggggggggaggttggagggaggaggggagtgtgcgtgattctgtatccactcatgtgcggtgagagagtcctggagactgatggtgagaaaccactgtccagctaagcagggccaaactggagacatggggcaaatcacttccccataaagtaggggctcactatgtagccttggccggccttgaacttggcaatctgcctgcccttgtctcttgagtgcttggattaaaggcccctccctccctctatctttctctctcacacacattttgcatgaatctgtaggggtcaaagggcagcgtggggagctgttctttcctcccaggtcccagggccagacccaggctggtaggtttgtcagtgtgatgcctttcatggccaatcccctttgatgggccttttctgattttgttttttgtttttttgggttttttttttttgagactggttgtcatatagctataccgacctcaagtcaaggcaggccttgaacttttggccctcctgcttatctcacccatggacaggggaagccgaggaagttggcactctggacaatgccagtgtgtccttgtcctccggcaatggtcctgccagcctcgggaagagcatcactgtaggtcagagagagcctccatctccatccctgtctcccaggtgacattgccacctgccctccctctcctctgtgtctgaggtctgagtctcatccctggcagtgtttgttctctaggatgtggctgcccctggctggagcgagcagacagtggggttttacaccactgcaccagtgggacagcactccccaccactaggactaagacggccttagccccatgtccccatgtcccctgccgtcagcactgatgctgagcacctcaggaacacctgtaatcatattcccgtcctgtctctttctgcccaccccaaccttggctatgcccctggtttccttttcctagaatgggttgccgtttgatgccaacctaggaatctttcccccgctgtgttttcggcactcctgtttatcccggtgccatttgagggtaatctggagccttcatccctatgggcatgacgtagttgtccattccgacatagctacagtgtaggcatttctgcccacatacgaggcaaatccatagaaggggaagagagggcaggaggcctcacgggcttcgcgctcatttagagatgctgccaagttgcccccgtgatgtcgctgttcagctctgttgtccctcacagaaatggaggagcctttatctagcatggctatttgttctctctggcttccatttatagcaggagctgaagcattcaaaatgctggtagcctaggggagctggagcccaccccagcctagaaggatggtgtgagaagagctcatgctctctcctgcagaggaggagaggtatgccccagccagcactccaggatgggtcattacgtctccaaaagcctggccttagacttgatcccagccctcatgccttggtcgctttcttcttacaggataaaatagcttactggccaagggatgccttactttgtaaaatgggtactttggattctcctattaagagtttagcctttgagacataggcacacacagcaggcagaggcagaggctccctgtttgctgtgtaggtcaagctgtccttgaactcctggcaatcacccgcccaccttaagggaatgctaaggagagtgtgtgctcttacacacctgtccacagccccatcggcaggccaggtccagctttcttcctgtgatgtgggcttatagtggttaaggcaaactgtcccctggtcctgatttcccaacccgggtcctccagaccggctgaggtatgggcttcaggtgcttggggacaaaggtggacgaaggagaatagcttccatctctttctctggaagacttaatgctctctcctcatctctgaaagcccccggaagcatgcttgagtgtgctcacggaacacatggagtggaggccatcaagatgggtgttaggtccagaaagcaagagcagacctgcaagtgggacttgcttccctctggatcacagacagactattccagcggatcctagttcacgtgtcgtgtctccacttgctgtgaacatttgctacatacatgtgtgtgtccgtggtctcgtgttgggggcggattctctcccagtgggggccatcattgtggtaacgaatgggtcacagctctttggggctttctgtctgactgtgtatgtgtgggctggcaggggctgccaggagctgaatgatgttgggggatgctgtgtcacgggaaggggcctggctgggatcaaaatcaggaacagctcctcctgtccggctttcagattgctgagtggcctctctgacagcagtggagggaggcccagggtttgtggtaacagaaaagcagctcagatccagagggaatgggcttggaaggggtgtttctgtcactgatagaatctggggtcagctggggtggtttggaggtgatgttgcggagaacagatcaaccaaagggctttcaaagccccagcaaagctcccttctgcaccaccgcctcctctcctctttgggcactgagctacatacaattcagggaactcactagtctttggaaatctggtctagctggtctggcagccagcatcttgccagaggtagccagggaaccggagacctgagtgtcaggctgacctggctcgcctgagaagacttttcagcccaggtcagtaccacaggagttgtcccctgcctctctcccaacctgccttgggtgctgacgcccaagctagaaaggacaggttccctaattcctatctttgttgttaagtccttagccaggacagacagggaaatggaagttaagctctggagactgcagggacatgctcagggtgtctgtcctcttgggggtaccatgtctcatgccagaaggaagctgtctttagaccctggccaggcaggtgtttccctcctgttaattgaggttggatagattattggcagctctctcaatgcagctgagcccgcgaatgttaccagcagctgggataagcattttctatactcaatcctttcggggcgggggggggggggagttagcctgcccgccacgtgtttcctgttgctctccgccacgccacagcgggcatgctgttttctctgggcagctggatgctgctgtggctgaatataaaaacgtaattagcaccctgctcacctgagtggtgggtggtggagtgtgagaacctggtctgattgaggctatactggtgtcttccagatcgaagcaaggccgagatggacctgaaggagctgagcgagtcggtccagcagcagtcagcccccgtccctctcatctctcccaagcggcagattcgaagccggttccagctcaacctggacaagaccatagagagttgcaaagcacagctaggtgcgtcccggctgctggcactggggggtgctagtctctggagatgcacctggagagaaggcgtggctcgctgggacctcaccagctgccgggacctccatctctgtggatagttagaatgtgctgcagccagagttatttcacatttgctgtttcgggtttttcctagcccgagaacatcaggcgtgggagtgctacgacctccaaactcaggggtcgtagcattgctcttgagtgggttttataaagaccaaccctacaggtgtgcccacccacccacaccccacacatacttcaccttctggaagtctctttaattttctgttggctgtcatcctgtattcctttcttgccccaaagcatgaggggtccttgggtggtgggccctgccctctaagggatctttacaaatagggagccgacctcacagggcttcgcctcctccatggcagctgctctaatgcatatagctaatgttctggaatactgggttggggagttaattaactcagggggtctgaacagtaagggatccaggagtgagggtcatcctgagaggtctctggtgttggtcggtaccctggatccttaagtgagaagggagttataattaggggttttctggggatgggtgtgtgtgtgtgtgagaccagtggggtctcattggattctaagatagatttctagggtcaaagctcaggctctgacagccatagccagctgtctcccacaggccaattaaagaaatgggcactagtgacaagcagaggaggaaagtgtgttcagtggaatttagagagggtggaggttgcatagctaagccatcctgatcaagatgtggtcctgtcctgtctgtcagtggcccaccattgcttcaggtctgtctctcttgcacgacatgccttccccacagacaaggtccccaggttggtaccaagcatcagccttcatgatattcttagaggaatggggacctttgtttcaatcctgagatgatacaagggtgtccttgatagggcccctgtcccaccaggacattgagaggcagggattgcagggctattctggggtctctcttgggtctttccattgctcattaaaattttctttctttgtttgccccctcctggacccaccacgttctgccgagccctgtgtctgtgttattcagggtgtcatagaataaccctagctccatctttacagattaaaactatgaagcttgctgagccggccacttgcccaatgtcccctagataacagttcttgcctctgtcctcatgctcaccctccagtaggacaaagctctgactgggccatcattaaagacctcatgtttgtggggccctgggggaggcagatgcagttccctagcaaccgtgctgacaactgcttgtgccttggctctgcctggctcttgtcctccaggagtttccctctgatcatggctgagacttggccatttggttctttaccattcttttgggggaatggcttatatgtgtgcgtgacatctgctatcctatgcctgcatcctttaagggacgtatacagatgtggcttcatcttgtccccttcgtgagaaggacagtgcattcccatgagcacttgagcagcacgggggattcagctttgtaccaggttacttagagacctgcctccactaaagggggtctggcagttccccccattacccaaccgctgtttgctacttagagactagcaccccagtttggccatctcctctgttctttgaatagacgcccctgccttgattcctaggttgaagttcttcacttgtgaattcagtagagaattctcagcttttttttttttaaaggggggggggggggcggcactggcaagatggctcagtggttaagagcactgactgctcttccaaaggtcctgagttcaaatcccagcaaccacaatggtggctcacaaccacccaaaatgagatctgacaccctcttctggtgcatctgaagacagctacagtgtactaatgaataataataataaataaatctttaaaataaattagttttaaaaaaagggcaaaaagacaatgtgttcaggtaaagctgccagcattgcccaggaaggatgaagatgcagatgcaattagggctgagccgcaccccccacccccaaacgtgtgcactccccaaggctctggccttctggacttgcctctttacacttggggaagccccagccttcttgtttgggtcccatctggtttctgcctagatacttggcttctccgggcctctattttaaccgccccatctcccaacccccatccatcatcagcctcagagttagctctgtgtaaaacccgacagtctgcaggtcttctgccttctttggaccctaaagtcctctgccttgctgttcccaccggagacggtgtgcgtggctgagctgtgctgatgttttttcctctttgacctcaggcataaatgagatctcagaggatgtttatacagccgtggagcacagcgattccgaggactccgaaaagtcggagagcagcgacagcgagtacgtcagcgatgaggaacagaagcccaagaatgagcccgaggaccccgaggacaaagaggggagtcgggtggacaaagaggcccctgccatcaaaaggaagcccaaacccacaaaccaggtagaggtcaaagaggaagcgaagagcaactctcctgtcagcgagaagccggaccccacacccgccaaggacaaggccagcccagagcctgagaaggactttgtagagaaagcaaagccatcacctcatcccacaaaggacaaactgaaaggaaaggatgaaacggattctcccacagtgcacttgggcttggattcggactcggagagcgaacttgtcatagacttaggagaggatccttctgggagggagggtcgaaaaaacaagaaagatcccaaggtgccgtcgcctaagcaagacggtaagtcacacagaagtcacacgggctctgactgttgtttgatgttggcacgagtcaggccctgcaccctaccaccaacccactatgacagggaatgtctcagggtcccagattggtacagacggccatgatctgcatatgaccctaccttatcctcaacacagtgaaccagaaaaatatatcccacgggacttgaacctgtttcctgtgagttcactttagccttaagtctgcttgcttaaggtttcacatggttccgtttggcctcgaattacaaatccttgagctcagattccccctgcctctacctccagtgtgataggattagaggtatttaccatcataccagatttaaaagtgctggtgattgaacccatggcctcacaaccaggcaagcaccatcccttaggaattgccctaccgctgaaaacgtaagagacctcattgagtacctaccggacatgactgtctgtctgtctgtcctatgtgcgttgaggtatctgagccctgggattccctggatttctttgctccttacagtggaggtggtgtaggtgcaactctggcctctagccactagatggtgagagcatccgtccaccaaacatgtctcctcctagtgggcagaacctaccaggctgaggaccacagcctgaattgctggaggcttggtgcctattaggaggaggtgactatgtgcagcagtgagcattctggaaactaggctgaaagggctgggtgaagagtgtccttcccctaacagagtcatagcaagattttggctgggaaaatgggtggctggaggatgccagtaacatccaacaacatccaagatcctgagtggtccattgagggtggaggggcggcatcacttaggtgcggcgtgtgtttggtgatggatagccaggtttttttgttttgttttgtttgagtgtcttgtttctgataggagctaatctctcatcgtaaccaggaataaggtgggaattggcgcctgcattgctgtagggagacttacagcaagcccttgctgggctttgagaacctttctccctgtgagatgcctaagcgggtggtcaagaatctcagttcttaccctgtggcagagaaaaaggaacgggatccctgtggtgctgtggtggtggggggggtaagggcgcctgagcttccaccaaggcctgttgaaggcctcggaaatctgcctagggtagagagcctgcttgttaggcctgacctttcctccatgcaggactgtgggactccccttctcccatgacactcagaacctcctattctttccgaaacaagctttttttttttttaaatggtttgtgtgtatgtgtgtctatgtgtgtgtgtaggtcaaaggactactcacgagtcaggtctctccaccacatgcatcctgagaattaaacttagggcagcttcctcagtgacaagattctctgccaccgagggaccttgccagccttgaaacgaacctttcgattgatttgccttctgccctggcttaggggaaattttttatattacagataggtactagcataggtaggtgtggtaacccaaacttctaaccccagcatttggaggtagaggagtagagaattcaaggccagcttcggctacatcagaccctgtctcaaacaaaacagaccaagcaaagcgtgccctcccaacttcgggggatcgtgagcaggagctttcactttggtcgtgagcttcctatcagtgagagcagaaagatccacggaaattggaggttatgattttaagaagtgttagcattctggcagagctgtttctggatgtgatgtctgaaggaaacagccaggatctcccgcaaaccccgagttggtggtaggttgagtgaaagatgattctagaactaaacacaatcagagagcaatttcccaaggtctgaggcaaaacttacttctgtaaaccggtgtccctgtgaagctccttggtggtgggtggatggtctttctccgaggtggctaggcgatgctcctagcttctctacagccatgctccctctggtccatcctgaagtgaagagggttgtggagtgcagctacccagctcaggagcagatgtagacaaagccttatgactgcccttcactgtgggtgttcccatgggggggggggctgtttgttaggttttacaaatgcaaagttctgcaggccagtttagcaatttactggggctggtaggtaatctgcatttctttagagtgattggttacaccctcagagttttctaagacaattgaactgcccagagctttctactcaccccgccccaaaccccagaattctccccattgaagaaatcagcgaagaaatttctggaattcaccctactgaagaaatttccatattcttgtggttaacaagccctacctggcacaactggagagcttgtttctgatactgttgtctattggaaaaagatctacagccgggcagtggtggcgcacgcctttaatcccagcacttgggaggcagaggcaggcggatttctgagttcgaggccagcctggtctacagagtaagttccaggacagccagggctacacagagaaaccctgtttcaaaaaaacaaaaacaacaaaaaaatcaccannnnnnnnnnnnnnnnnnnnccaacaagtaggcatacctcacaaagctagtaaggagtagtagagcggaaccgaccttttttttcgagacagggtttctctgtgtagccctggctgtcctggaactcactttgtagaccaggctggcctcaaactcagaaatcctcctgcctctgcctcccaagtgctgggattaaaggcatgcaccaccactgcccggctggaactgaccttcttgaggccctgatgacatttgtgtcaccggcagcagcacaagccaccctgcagctgcttcctgttagaaccctgctaggcacatctgcctagcatggacaagttcagagttgcttctatacccagggcagccagggtctgatgtatgtcagtcaggccagccaagggactagccagccccgcttccctgtagctctctcactctggagctctagtcttcagaggagcgaggtgctcactaagctgtagaccttcgcctcagaggagatggcaactcttctcttcattctccttggcttcttgtaacccgaagcttgctcaagatctggaatttccaggtgtttctctgggtgatctggatctaagaggataccaaggaatgtggccattggtggcaaagccaccccccccccaccatgtttggtgtgtgttttctaagtaccctgaatggggtatagtacaagctggcacctctgcagctgctaccatcttccctttttcattttattttttaaagatttatttaatctaagtacactaatgcaccagaagagggcatcagatctcatgatctgatcatgatgatggttgtgagccaccacgtgtttgctgggatttgaactcgggaccttcggaagaacagtcagtgtgctcttaagtactgagccatctctccaggctccccccacacccccaatctcctctttataagtaagttcagtatactgtgcagcttctccactgacttcccgtcccgcccacagccctccaaacttaagcccaggtcattgcagtcgaatagtgcccctgagctacatccccagcccccaacttaacgcttttaagaaaactttaaaaagccaggtatggtggcgcatgcctttaatcccagcacatgggaggcagaggcaggcggatctctgagttcaaggccagcctggtctacagagcaagttccaggacagccagggctacacagagaaagcctgtctagggaaaaagggggcttagacttgaccattgtaggataggaaattcagcattgtttgctatccatgaagggctgcgcagacacatccagaatgcaggctaggctgggccgaaggtgttaacagaaggttctctggcctggggctgaattcctttgttaaatgtctaggtcgcccctcccagtggctttgtcaaaggggaaagtagatttggtgtgcacaccttttgacagccagttgcttttgccaagagctcctcctggggaagaagggctgcagttaggcagtctccattacccacagcctgggccactagttaattactgctcagcatgggggctgggtcttgctctcttcttcccccagaaggcttgtgacttctccatctgggatattagtttgtgctcagtaaggcataattcatagctgttgcagagaccatgcttgtccttggggctccaggggccctctaaattccttcaggcagtctgcctctgctgggtttgacctagaacttggcctgccatgtgaagtcccagctcaggaagccaatccagtttctgcttgtttccaccctgcctggctgtagctataggtaaaccgccaccgtcgtccacttcggcgggcaaccagtctcccccagagacaccggtactcacccgctcagccacccaagcacccgcggctggggtcaccgtggccgccgccaccaccagcacgatgtctaccgtcacagtcacggcaccggccaccgccgtcacgggaagcccggtgaagaagcagaggccgctcttaccgaaggagactgtcccagctgtgcagcgggtcgtgtggaacgcatcaagtaagtttcaaacgtcctcccaaaagtggcacatgcagaagatacagcgccagcagcagcagcagcagcaacaacagcagagccaacagcagagccagcagcagcagcctcagtcttcccaggggacgagatatcagaccagacaggctgtgaaaggtaccgcgcccccttctgttctctgtggcgcccaccccctttttgccacactaacaggagaaaggccacccttgttgaatttttcccctacatccctatgtgtcatggtcaccgcaggccttatcatcccatatggaattatttttttaaaaactggcttgctagcactatttgcctgattttttttttttaagattttttttttattctgttttataagtgatacgtgtttcctctttacagaggggacaggatatgtgtgtagaattcagaatgctcaatgtgggcccattcgctgtccctgtcattgtccacccttctgtgacaatcatttgttgtccttatgcctctcccagtgcatgcctatacgtttgtttttataccatataatattataccataaaatattgtcttttttctttctttctttctttttttttaaagcaaaaatggtaccattcttgatttttttttttcccccttccctcccacccatcagcatgttttagaggtctgtctgtgtcttatccttttggactgctgcatagtattccctagttcatttaaggtgttcacctgctggtgggcattgaggatgcttttagtttttcccattgtaagatatgctgcaatgactatgtcttgtgagcatctgggaatctccaggcgttttgtgggaaagtctttagagtgtgaggaatcggtaggggggacagtttccttccaaacccgtgccaagatgagccagcctctgaggactcagtgctggaggccagtctctgtcctgcagctgatggctccgctcaattgtctgaacccagcttcaggagcactaatgtgggtctggtttcttggggcaaaggagcttccttcacactcgctctgtccttcccccatgctcccagagctcatcccagtgaggtaacaggtcagtcacagggacactttcagggactcaaggccaggtggctggagaaggcctgaaaagctggacaggtctagagtgagctctcaggtactgcagtggacatgggattagggcaaccccttgttggattctgtttctatctaaggctgtctcctgcagatagggtaggtggctgcaatgccaggacctggtggcagtagggtcctcagcttccagatagtcctgtgtcaggttgtaaggcttattgcaactgggaagggccagttttaatcagtaaagcagcggagacagacttgacgcagtggttactccctcaacacgccttatatatagcctgctgggtcagactttgatcagcagaggctcctgtaaccaccagtgattaaaatggccaagtagtggctttactctcttcataccacattgcctttttagccgctgtggcaaggactgacttcaatgagcgtggtactgttttgccaccaattaaaacgaaaggcgttgattttaatgagcgctgtgctgacggatcggtaaagttattgggtcacgggtatagttgcgtagaatgctcacccagcatgcacagagctccgggttaagttcccaacactgcaaacaccaaagatgtcaagggctgagattttaatgagtgacagactcttactcccttcaggcaggaagtgattttaattagtaggacactgggtctgtcatacctgaggaaggggtccagggtgactggtgcaggggtggctggcactttcaaaggtagaaagggctcaggccttgtaatgaaagccagagggtctgtttgtgaagctgtccgggtttgccaatgaatggccaaagttcttaccttctcatagagatggaaagacagaggtttcacgtcttcagatgttggctgcatccagctgttaagtccttctggtagcctggtgcttcaaggctcgattaagtcccctaaactgaacagccttgagttagctcctgaagatgattgcttaggtctttgtagtgcaaggttggcgcctagtggagaagagagctcagaggagccaggctcgagcttgggcaaggtgagacactggcattcgtagttcaaacgctggctaggggaagctataagaagacttccctccctcgccccggctgtttgctgggatgtgcttttccgtatgggtggagtgatccgaccctttgctttcttagctgtccagcagaaggaggtcacccagagcccatccacgtccaccatcacgctggtgaccagcacacagccggcagccctggtcagcagttcgggctcagcaagcaccctggcgtctgcaatcaatgccgaccttcccattgccaccgcctcggccgacgtggccgcagacattgccaagtacaccagcaaagtaagtgggttggtgctgcggctggggtggggttgttggggccctggcttggtagtttgtaaaaaaggctaagttgcaggctttaacaaagggtctccaaggacaatttacatttgagtcttgagttagatagtttcatctatcatggctaaaccagggtttgggatactgctacacaagtgctgtaaccctgcattgtgtctccagcgccattctgttttattttgaggcagggtctgcctctggagtctaggctggccttgaagagctcctaagtatctgagattgcaggtgtgtggctaccatcccccacctggcttggctgtcttggaacttggctctgtagactagagctggctttgaactcacagagatccgcccccctctgcctcctgagcgaggggactaaaggcctgtgccactgccacccagcaggttagttaatagaaaactgtggactggtggtgcgccgatttctcttggggaggtgaacactggtctgtttggcttgcccagagaagggacgctgaaccagagtgagagactccattgtcacaccagcacgatgacatgccagggacttaagaggagctcctgggtcccctccttaagtcatccactctctcgggctcagggttcagtccctgctggtggcctggcatgtaggatggcctgctatgtgtaaacttggcagactctctcagttgggcaagtccttgaatgagcgcggttgactaaaacacgcaccttggtgttgtggaggccgctgctgtgtcctgagggtggtagtcggtggtagtcgaggtatggtggtgacccctggggctcctttggctgttggcttgtccctaaggatggggctgatgcctgggtagtaggtgcttggtgctgggtggaggtactgagtccatcactgtgagctttgcgtgggtcagctagtcgcctgcttatcgggtttatcactgccagtaatttaatagctaatgagaaacactttcctatttagtaaatggttgtgtgaacaagagcaatttgtcttttactaatgagccaatcaggagtgtttactcattagagaccagcagttcaagctatgagggtgcaggcgagagaggggtgaagaagagggttgctctgctctgctctgttttctttctttctttctttctttctttctttctttctttctctctctctctctctctctctctctctctctctctctctctctctcccttccttccttccttccttccttccttccttcctttctctctctctctctctctctctctctctctctnnnnnnnnnnnnnnnnnnnnnnnnnnnnnnnnnnnnnnnnnnnnnnnnnnnnnnnnnnnnnnnnnnnnnnnnnnnnnnnnnnnnnnnnnnnnnnnnnnnnnnnnnnnnnnnnnnnnnnnnnnnnnnnnnnnnnnnnnnnnnnnnnnnnnnnnnnnnnnnnnnnnnnnnnnnnnnnnnnnnnnnnnnnnnnnnnnnnnnnnnnnnnnnnnnnnnnnnnnnnnnnnnnnnnnnnnnnnnnnnnnnnnnnnnnnnnnnnnnnnnnnnnnnnnnnnnnnnnnnnnnnnnnnnnnnnnnnnnnnnnnnnnnnnnnnnnnnnnnnnnnnnnnnnnnnnnnnnnnnnnnnnnnnnnnnnnnnnnnnnnnnnnnnnnnnnnnnnnnnnnnnnnnnnnnnnnnnnnnnnnnnnnnnnnnnnnnnnnnnnnnnnnnnnnnnnnnnnnnnnnnnnnnnnttatggatggttgtgagccactgtgccagtgcacaggactgaacccaggacctctggaaaagcagctagtgctctaaccactgagccatttcttagccctcctgattggaatcaatacctttttttaaactaaaaattttcttttaatttactttttttttaaacttatttattcattttatgtatgtgagtacactgtagctgtacagatggttgtgagccttcatgtggttgctgagaattgaatttttaggacttctgctctctgccgtcagccccgcttgctctggcccaaatctttatttattattatacataagtacactgtagctgtcttctgacacaccagaagagagtgccagatctcatttcgggtggttgtgagccaccatgtggttgctgggatttgaactcaggacctttggaaggcaaccagtgctcttacccgctgagccatcttgccagcccttaatttacttttatttcatgtgcattagtgttttgcctgtatgtataagggtgagggaatctctaaaactggagttatagtgagttgccatgtgggtactgggaatggaacccaggtcctttagaagaggggactgtagggccaggggagatggctcacaggatgaagtacttgctatgcaagcataagatctggctcatgaccctgtctctaagtctggcaccctagaccagaggtggaatccctgaacaagctggctcagccggatgtgaattcagttggaagagagatgctggcctcagtggagaagctggagagggactgaggaagtgaagccttggcatccacaaatgcacacacagtcacacaagcacacacagtcacacaagcacacacagtcacacaagcatacacagtcacacaatcacacacagtcacacatgcacacacagtcagacaagcacacatagttgcacatgcacacacagtcacacaagcacacacagtcaccaagcacacacagtcacacaatcacacacagtcacacaagcacacacagtcacacatgcacacacagtcacacaagcacacatagttgcacatgcacacatagtcacacaagcacaccagtcaccaagcacacacagtcacacaagcacacacagtcgcacatgcacacacagtcacacatgcacacaacagtcaccaagcacacacagtcacacaagcacacacagtcacacatgcacacaacagtcaccaagcacacacagtcaccaagcacacacagtcacacaagcacacacagtcacacatgcacacacactcacacaagcacacatagttgcacatgcacacacagtcacacaagcacacacagtcaccaagcacacacagtcaccaagcacacacagtcacacaagcacacacagtcacacatgcacacaacagtcaccaagcacacacagtcaccaagcacacacagtcacacaagcacacacagtcacacatgcacacacactcacacaagcacacatagttgcacatgcacacacagtcacacaagcacacacagtcaccaagcacacacagtcacacaagcacacacagtcgcacatgcacacacagtcacacatgcacacaacagtcaccaagcacacacagtcacacaagcacacacagtcacacatgcacacaacacacatgctcatgggggcagggagatggcactgcaggtaaagatgagagttggaaaaggggagattatggtgaaggtgtcagagcccgtagctctggactcgaaactgcccgccccctccatctccaccctcccctgattggactgagctgtttatctacagaaggggaggcaatttattcacaaatgggcaaactgaggtctgcagagcgaatctgccacagctcctgagaccctttaaatcccatcactccacagtgccctcctaacagccaaaatgaagaatggcctcttggagacattttctttcccgttgaaaaactgaactcggtgacatttgagggagctgatgaaccagcctgtctctgaggtgactttgtgtgtttgggaaacacaggagagagccaatggccacgggttctcagttctccttcctctagtcttggggctgtggctggggaggcggccagccctcagctaggaggcagaagggacttgcagatacatcagttggtaactgtctgagtttggctgcttcatggaacctagaaggtacatgatgggctagggcaaggtagggtgcagtgtttggaatgcgctgtagaaccgaggaaaccttggccacgccccctaaggcccccagtgtggagtgatggacatttctatgcacttccagagcattcaaattcatagaaacagaaagggagggaatagatggtttttaggaacttggggtgtagtagggggtaagggggttattgggggttgtgctggctggttttacgtcaacctgatataagctaaagttgtctgaaaggaagcaacctcaacttggaaagttcctccataactaacactgggctgtagtaggcaagcctctaaggcattttaatgtatattaatctctatggcattttaatgtgagttaatacgaattgtgcttagcttcaaatgaatgagactcaaactatgatttatttgttaggctctgtcagttatgggggtggggagggttacccctagtctaattctctaacgctggtctgactactacctcagctgtactccccaaatacttgctgttgggaattttctgggatatgtctgcttcagcagtctggggttctggggaggcatttcactctggcccgtgttgctggcccatcatgactaatagagacctccgttctgtctgccttctcttctccctccctcatggtgcctaccagacacttccagcccggtaactcgaactccacctccctctattgtcccccagtagttggctgttgacagttttatttagccaataattttaaattgggggggggcaaggtttacatagcatcacttggtgtttctgaagatctgtatttagcatctgaatgcacagcagcaccagatctactcccaacagatagggaaagggcccagcccattgtgggtggtgccttccctaggttggtgatgctgagtcctatcagaaagcaggcttagctgggctgtggtggcgcttgcctttaatcccaggatttgggaggcagaggcaggcggatttctgagttccaggccagcctggtctacagagtgaggtccaggacagccaggactgcacagagaaaccctgtcttaaaaaaaaaaaaaaagaaagcaggctgaaatgcagagcaagccagtaagcagcagccctccatggcctctgcatcagctcctgcctccaggttcctcctctggttgagtttttgtcttgacttcctttgatgatgctgtgggaagtgtaagccaaataaaccctttcctcccgagttgctttgatcatggtgtttcatcacagtagaaatcccaagactgtaaagacaggggaagtgggtcctggttttgggtgtgttgtgtgtgtgataaaaaatgttccagaattgcttgtgctgttgttgtctggttaactccagacatgctaaaatccactgaatgtgtgtgcttgccagtcagcacacggctgttgaggtgtagcacccagaagccagcagggtgtgcactgtacctggtgaagtgggtaatgcattcattctttctcactgaaatgcacttttgggtcagcaagatggctcagttgataaaggttgtgcatatctggtgtcttaattagggttttactgctgtgacgagacacttgtgaccaaggccaacatttcattggggctggcttacagtttcagaggtttagtcagtctagtatcatggcgggaagcatggcagcatgcaggaagacttgatgctggagaaggagccgagagttctacatcttgatcgaaggcagcagcaggagactctctttctatgcggctaggaggaggatctcaaagcccactccacagtgacagacttcctctaagaaggccacacctaactccagctaggccaccccctgggccaagcataaacaccaaatctagggacccaagtttgttccctgggacacatgtaatggtggaagccatcaccatagcgttgtcctctgacctccactcaagctacaaggcatttgcatacctacatatatatgattcctaacaggcctttaattccagcgcttcggaggcagaggcagaaggctctctgagttcaaggccagcctgatctacagatgcagttccaggatagccaaggctacatggagaaaccctgtctctaaatgtgcagcaccccccccccccaatttattttggtggcctgggatgcagcttagttggtacagtgcttgcttagcacaaatgactgtctggactccagccctgccactgaacttaaaacctgggtgagggccgggcagtggtggcgcacgcctttagtcccagcacttaagaggcagaggcaggcggatttctgagttcgaagccagcctggtctacaaagtgagttccaggacagccagggctacacagagaaaccctgtcttgaaaaaacaaaaacaaaaacaaacaaaaaaacacctgggtgaggtcaggggtcaggggttaggaactcagtcaccagctacatggtgaggtagaaccaggtagagacacaaggcccggacttaacaaaaacaaaaacaaaaaatccaacaaacaaacaaaactaattttttttgttttgtttgtttggagacaggggttctctctgtagccccgtctttcctggaacttgctctgtagaccaggctggctttgaacttagagatccgcctgcctctgcttccagagttctgggattaaaggtgggcgcccccacctggttgttttgttttgttttgttttgttttgttttgtttttttcaaaagaaagccacaggccgggcagtggtggcgcatgtctttaatcccagcactcgggaggcagaggcagatttctgagttcgaggccagcctggtctacagagtgagttccaggacagccagggctacacagagaaaccctgtcttgaaaaaaaaccaaaaaacaaaaagccacaaggacaaaataatccctaccttaaacctgctgtgttggctcaacaggacccgtgtgggtagagtttggtctcagatttctcagctcatcgagggctgggctgtacatggtagatcctttcctggcctccctggcttctacccttggttactaggagcaggtcctccctgctctgtcccccttctcacagcctgaagcacccagggtctgagagtgacgccaacaccgtttgtcactttgctgtgtttggttatgtttgcatcgtttgtatcacctactgaagtgtttttatctttccagatgatggatgccataaaggggacgatgacagaaatctacaatgacctctccaagaacaccactgggagcacaatagctgaggtcagcagatccggggaatccccagaagtccagggctcgagaggggggggttgtggggtggggagggggggtgtgggaagctgggctggaagcccctgggggccctggctccaggcatctggctgattcaggctgtggtcctaggtagagtttcaagtgggtggggtttcattaagtaggtggctggggagactggccctgctgcctgcttctatcctggtagatcacagtgagacaggatacctttgatttaggtgtggtcagagccatagtcttctccatccccctggcctttttacacaagcacttctggtgtaagaatttgtataccggaggcgccatggctttatgagtaaagacagtggttaaaatacggaacaatttatttacaaagttgcctcttgtaagtaaggtatgaagctttcttttattcaaagacagacagacagacagatacacacatacacacacacttcctcccctgtacttccctctgaggccactcagagagtgaccacctacacgctggtgtctgtgtgaatcatatggtgctggcggtggcctgcagtcagtcaccaggcaataccacccagggagcaggatttctctcaggctggcaataaatcccaaggagaatccctggtctttgagacagggttttcttaaggcaacaaagagaggacagcgtgaagataaaggcttctgagaggccctggagaaatcaatggagatttaagaacccacaagcattgtgagggtgtgtgccccgtgtgctttataaacgtgcccctctgtgattacactcgctgtgtcagtcaacaagtagaaatctctctgtcccacttggactggttttgtgtgtgtgtttgtgtgtgtgtgtggtttttttttttttttttgaaacttgcctctttccttgccgggggggggggggggggtgaataaaaggcgtgcaccactacactcagcccgtttgctcattttaagcttttttggtgaagttctggtttctgcgtctccgcggaaaccttgggtcagcccttgctaggttgcctacaccgcttccctggtccctgatctcactgtaaaactccactgtgtttaggtaggcattcatttgctcaggcttgtgacacgggtgacccttggctccagggcatcctgtgcaggctgagggttgtctgtacccctggagtcagggctgtacagaatgacagcaggtgttatcactgctatgggtgggcggatgctctgctgggaacccctggtggcgtctcaggcccctgtgtccgctgtgtctcgggcccctgtgtccgctgggtctcgggcccctgtgtctgctgtgtcacaggcccctgtgtccgctgtgtctcgggcccctgtgtccgctgtatcaggcccctgtgtccgctgtctcgggcccctgtgtccgctgggtctcaggcccctgtgtccgctgtgtctcgggcccctgtgtccgctgggtctcaggctcctgtgtccgctgtgtctcgggcccctgtgtccgctgtgtctcgggcccctgtgtccgctgtgtctcgggcccctgtgtccgctgtgtctcgggctcctgtgtccgctgtgtctcgggcccctgtgtccgctgtatcaggctcctgtgtccgctgtgtctcgggcccctgtgtccgctgtgtctcgggcccctgtgtccgctgtatcaggctcctgtgtccgctgtgtctcgggcccctgtgtccgctgggtctcaggctcctgtgctctccccgcagattcgaaggctgaggattgagattgagaaactgcagtggctgcaccagcaggagctcgctgagatgaagcacaacctgggtaaggctcagggcggggagagcctctggctgctctgaggctgggcccagaggtgaccaggtggaaaccaggctgtacctgaagtcagggaaatcacagtcctcaagggtccagcctggagaagctgagcttggggtgcaaaccctctttcccctctcaagataactgtgttctcacttgccacctttacgggggacctggggattgaactcaggatctaaggcttggccacaagtccctttacctgctgagccacattgtagccctttgctggccttttttttttttttttctgagacaggtttctgcaccaccactgcccgactttttgctggtctttttaattcaagaagagcttgtgaggattgcaggaaacatttagtttcaatgtaaggctcacttgtaaatgtgtaaactgcctggaatttttttaggaatcagtggtttgattgttccctcgttaccataacaaccggccacagcatcccctcatgtttcattcagtgtctcaagacaggattcttgccgggcagtggtggcacacgcctttaatcccagtactcaggaggcagaggcaggcagatttctgagttcatggccagcctggtctacaaagtgagttccaggacagtcagggctacacagggaaaccctgtctcgaaaaaaccaaaaaaaaaaaaaaaaaaaaaaagacaggattttttccccccagctttttgccctttcctttcctttcctttcctttcctttcctttcctttcctttcctttcctttcctttcctttcctttcctttcctttcctttcctttccttcctctttctttctttctttctttctttctttctttctttctttctaatatatttttcattagatatttttctttatttacatttcaaatgttatcccctttcctggtttctcctccgaaaaccccctatcctatccctccagacaggattctgagaaaattgtctgagtgcctttagtatctgtgtgcttcagttccctcatctgtgaaacaggatggtagctcttacccttgagagtacaacagggcttatggtcggtacaaagtgcttaggaccaagttcgcacccggtaggtgctgtgtatgtatttgacagaaaaaaaaagtcaaaagtgactgagtattggttggaatcgtttggagggtttgtgggattcctacaacttgggattattcaggatgacgtcactggggtctcctgtcacctatatgctagacatgtcactgacaccacagctggctatgggactccagtgatgaatgtcccagctgggttacttactgtcccagggccaccgagctaggggagccatttccaagtcaagacttaggttgggtctgtgtgaagctaggggtctgatgcccggcgtcctgtgctgggtctgtgatgcagctagtgtcctccttctccaccagagttgaccatggccgagatgcggcagagcctggaacaggagcgggatcggctcatcgccgaggtgaagaagcaactggagctggagaagcagcaggcggtggacgagaccaagaagaagcagtggtgtgccaactgcaagaaggaggccattttctactgctgctggaacaccagctactgtgactacccctgtcagcaggcccactggcccgagcacatgaagtcctgtacccagtcgggtaatgtctggtcgcacacctcaggggctgtgtggtgggccttcccggccggggtgctaagaaacactttcccaggctcttgtcacttctgttcataagcaactgttgctctgatatacaagagacgcagatgtgaagttannnnnnnnnnnnnnnnnnnnnnnnnnnnnnnnnnnnnnnnnnnnnnnnnnnnnnnnnnnnnnnnnnnnnnnnnnnnnnnnnnnnnnnnnnnnnnnnnnnnnnnnnnnnnnnnnnnnnnnnnnnnnnnnnnnnnnnnnnnnnnnnnnnnnnnnnnnnnnnnnnnnnnnnnnnnnnnnnnnnnnnnnnnnnnnnnnnnnnnnnnnnnnnnnnnnnnnnnnnnnnnnnnnnnnnnnnnnnnnnnnnnnnnnnnnnnnnnnnnnnnnnnnnnnnnnnnnnnnnnnnnnnnnnnnnnnnnnnnnnnnnnnnnnnnnnnnnnnnnnnnnnnnnnnnnnnnnnnnnnnnnnnnnnnnnnnnnnnnnnnnnnnnnnnnnnnnnnnnnnnnnnnnnnnnnnnnnnnnnnnnnnnnnnnnnnnnnnnnnnnnnnnnnnnnnnnnnnnnnnnnnnnnnnnnnnnnnnnnnnnnnnnnnnnnnnnnnnnnnnnnnnnnnnnnnnnnnnnnnnnnnnnnnnnnnnnnnnnnnnnnnnnnnnnnnnnnnnnnnnnnnnnnnnnnnnnnnnnnnnnnnnnnnnnnnnnnnnnnnnnnnnnnnnnnnnnnnnnnnnnnnnnnnnnnnnnnnnnnnnnnnnnnnnnnnnnnnnnnnnnnnnnnnnnnnnnnnnnnnnnnnnnnnnnnnnnnnnnnnnnnnnnnnnnnnnnnnnnnnnnnnnnnnnnnnnnnnnnnnnnnnnnnnnnnnnnnnnnnnnnnnnnnnnnnnnnnnnnnnnnnnnnnnnnnnnnnnnnnnnnnnnnnnnnnnnnnnnnnnnnnnnnnnnnnnnnnnnnnnnnnnnnnnnnnnnnnnnnnnnnnnnnnnnnnnnnnnnnnnnnnnnnnnnnnnnnnnnnnnnnnnnnnnnnnnnnnnnnnnnnnnnnnnnnnaactggttggttatcaagaccataaagaaccactccccacccagataaccccagacagcaaggaacatccaggggttgtctccttttagatgctagcaggaaacacctgctgtggttagtctctgacattacaagctggactttctttgtggtatggtgacgtctctgtctctaactcttcttcacccagaagctctgtgcccctctcaaaggatgctagtctctcactctgcctcagctgggctgaggtggatctaggcctagtggaggaggttgcaggcttccttgaacggtggtcacatcctggctccccacaagtttcctttgattggagaacatgttctcagcaaaatgatgtaaaaattgaattgctaagtatgaaaaggtctatttgcaaataaagtttggagctctgggtttcagagtcgaaggcccatgcgagatctctaagtgggtttgggagagatggagcctggcgaggttggattgggactgagctgtgggggcctcgaggggtagccatttgaaagctgggctcctggatgttcacacacggcttgaagcatctcatgactttctcgttctctttggtccccagcgactgcccctcagcaggaagcagatgccgaggcaagcacagaaacaggaaataagtcatcgcagggcaactcctccaacacacagtcagcaccttcagaaccggccagcgcccccaaagagaaagaggcgccagcggagaagagcaaggacagtagtaactcggtgagaatccccaagctgacagtcgccttgtaccaaggaccctttcctgtatctgccaccactggatgcccttcactgttccggtttatctgggtggggaatggttctttatggccagtgtgccccccatgcgagaacacggagagccgggctggtgtgtatgtgggaccttcagttgttctgtggggttcctcaaagttcagaagggcgcccccctgcggaggtaaaacaatgtctcttctggggccctggaagccaccagccacacgtcactgactagaagtgtggctgatgtgaccaaggacctgcttattttaaagtaacttgggattgaagtggccacgtgtggccagtgctgtttcgatggaccatagggctcgagcagctgcttgcttcctgtggggtatgtgataacagttgaatgcctgggccattttaagggtcatggttactgctctttgcctgcacttgtagctgtgtatctcaagagcccaaatcattagatggtcggtaaaatactattgcctcggaagagacttaacatgaagtaaaaagagatttttgagcagtatataccttctttgcaaagcagggtactgggtaggtctggggatgtagtggatgtaggggaagccaaggcgacagggatgagtgggggaccattccaatgctttgttctggcctttcggatctggtatacagtgtgtggccgtccacctgccctggctctggtctgatcaccaggtagagacctctaagggtgggaggagtggtgagccatcctgtgattccctggggttctatggtttcatctttttgtttatatttctagaccctggatctttccggctccagagagacgccctcctctatgctcttaggctccaatcaaagctctggtatgtcgccccctggtggccacatggggttttgtatttcacttggtcatgttgggggaagtcaaaggtttgggattttttggcgtaccttggatggatttgggtggaggtgtggctaggcgaggtgttacacaggtgcctccttgtattggtcacccacgtgtgtcatgtttaatgagtgcacccttcacggggacacagggtgatccgctcaggtctccgaggtcctcagggcatatttgattgatgaagaccctcaaagcctttagtgatgaatagaacttctatgttgagccttctctggggtccagtactaggtgctgtggaatttgagcctccctctcccgtcctgggagccttgggtgtcttttcctacattcttctgaactttttcccagaattcagagccatggcttccttggccaatttgacgttctctcttagctccaggatcttttttgctccttgatttactgtggctgaaaactgaaagctacggcttttcttgtgtacagtgggtgcacagaggactgccactgtctgaaggaagacaggaatggtccgcaggagtggagggggctagtggtagggaggagataacctcacagactcagattgtaatgattggagactgcaggtgaagagaacagcccctccccctctgtgctcagccgttcagcccctcccccacgtccttggcagttccagtgtgttgctaggctccgggtgctctgtctttccatgacattgttagcatcttggcttttcttgattgaattgtggtctttgatctcctcctcctccttcctctgactcctgagtactggagtaacgggcctgtgccacctctcctggcttgaattctgctcttcgcaaagacagagtggactggattctaccagtttcatacacttagcatggaacaatacttttttttttttgaaatcatgtttgtagagatgccttaatggatttcccagtttttagtgatgatgatgataaaaataagtttaaaatacaaacaggcatggtggtgcatgcttttaaccccagcactcaggagtcagaggctggcaagttctagggcagcctagtctacagagtgaaactcagtctcaaaaagcaaagaagcccccgaactgagttaggagaagagctctgaccttagggatgtcttaattcagagagtggagctggcagtatccaacttaggaaataccgtttgggactctggggagctgcagagaaggtgaagctgaggagtgatattgaggaatgaccttgaggtgtcccctagcaggtccaggttgacctggtggccatttcgggtcacagagcaaaccgccagacgcatagctggccatgtcccagcaaaccctggcctgcagaagaggcggtgcggcttgggcctatgggttccatttgctgccctctgacctagagaatcttgggtcacaggcaagagtagaaggagaccttaggtccaggaggaagtggctgggtgtgggggagaaagccgtgagttccaaggaatcagtggcttagctgatggcatcggagccagggtgtctgtgcaggtgtcccttccttgtgtgccaggcgcagtgcggagctccacaaagttgctgtcagtggaagccagagatggttgtccaggctgcaccgtgtggcctttaacttcttcttagccactttctctagctgtgtctccctggtactcttcccatcggaagctctgataatggagtctcctgggttccccttcccaggttttcctcaagctgcacctgagccccagagttcagtgggaggacatcacccagggggacagactcctcccatggcgacacacacaagtcttgatcaccctgggcacagtttctcacctgctcggtcaccttaccaagtccctgccatgggcctctgcttttctactctataacagcagcatctcagattctctgttcctatcagagcacctccctggctctccctgtccccacatccctgtgagcatctggtgcgggtgctgtgccaacaatctgtcttgttcagccaggccattccacacctggcctgcctctctgttctgtccttggctgctaagctgccccccacccccatctttctgaggagaggtgataaattcacctgcatctccatgccatgcctctcatcactgatagacaagagtgacagtcaggtctgtgttgtcctggaagtggatgtcaaaccattgggctcatgtgactaagagctgagggatgggattggacctttcccttcaggtcatttagattgtgactttggtttgtggttaccggattgagcagcccaacctgacacttgtccactccgcttccccatcccagttagagcctctgtggcatcccatcctgcctccatctctctcctcgctctccccatccatctggctactgcgttggcatgtcacccatgtcttaagagatggagccgtccatggggcgtagtgacgcacacctgtaacctttaattccagaggcagaggcaggtggatctctgtgaatttgaggtcagtctggtctacgtggtaagttgcagactatctagagctacatagtgagacccatctcaaaaacaaaacaaaaccaaaccaaaacacaacaacaaagagtttgagagagatgaagccattgacaagggcatagagaagtctaaatgttgtgaggtttattattgctataattttttttttcttagagtgctgggcacgggtgcaatgctcaggacagacccgaagccttgcatatgctagggtgctgttctttagtctgagccccagtccagccgacatgttccaacatgttctgacatgttatctcagacagtgcccaggcaggtggatttttcagaacatgccttgtcttgaatctggggtaaagaatgaggccagggtgatagagaaggtggctcagagggacaaacaggaaggcctagaatgtaggcccgtgtaagaagcgtggtgaggcagcgtgcatccgtgatcccaggagacacgggtttaagagacccagactccaacaaaaaaaagtagaaataattgaggaaagcattcattgacctcccgactccacacactcacacttacatgttacatgtacacagacaggtacaccctcacacatgttacatgtgcacccactcacacttacatgtgtacacaccccacacactcacatattacatgtacacacaaacacacacccctcacatacacttccccaggccttttgtgtattgaggattgatctcggggctacatgcccactgggcaagggctccccacggatggagtcatgtcactagcatcaatttgtcctttaagggtttttgggttttttttgctgttttttgtttttcaagacagggtttctctgtgtagccctggctgtcctggaactcactctgtagaccaggctggcctcgaactcagaaatcctcctgtctctgcctcccaagtgctgggattaaaggtgtgcgccaccacctcccggccctttaagggctttaaacaggatgtctctgcatacaagcacagaggctagactatagccggcaaggtgtctgtcctccgcctgtctccactgccatggtggccctccggggacttccacaggcctgcttcctgacccgtctttagaatgcatcagtgaccttcgcctccctggtttctgattgctttctgtggtctggccacacttggctgagtgagcctgccccctcccagcctgtcaagagtcttggcagcttgccctcgttctccgtctctgcttgtggcctgctggcatccagactgaggacatgcgtggtccgctgtctcttctaagttgtaattccaaggttcatttgcactaactgtaatgccactcagcacctaggcacatggccactgaggtgacacttccgtctccttttcttcctcctcttgatcctgtccccccccaagccccaaactcttcaggatattcaacgtaagcactccttccgcttcacatttttagggttttaggcacttttgctccgtagccaaggctggcttcagagtcatggtcctcctgcctcagcctcccgagggctggggtgacaggtggtgagcacacttggcttttctgaggatttgaatatagtttgtggatggccctttattgcggcctagggtttagtcagctggtctctcccagttgctgtcccttgtcgtcctcagtgtggcccctttgctagccttcctcttcctcgcagtgcgtctgctgtgtggtgcctgacaccctagtgcacctcagcccagcctcagtttccctgctagaaccaggctttggcagagcttgtggtttggaacattttgctttcaaaatcctgagcatttgtggcttgccaagtatggggctgcttttatgtccccgcgtgtccttctatgttcaccttcctccctgtgatgtggcgccgtgtccaacgaccctgtttgtggtttacacaagtttttaaaggccccagtcacctgtaagcacatccagtcgagtggcctacatgaaggaacagctagccatgggtgtcggcccctggggttgtgtgcaatttcagctgtgatggattctaaggctacctgtgctctcttcagttagcaagaggtgtgacaagcagcctgcctataccccaaccactacagaccaccagccgcaccccaactacccagcccagaagtgtaagtatgaccctgtctcaggggagctgctgggagagtcactcctggcatgcagaagccatgttttgtgtgtctgtgtgtgtccgtgtgggcgtgtcctgtgctttgagtgttggtctccctctgctttgccgtcgccgtcgtcttcttgtttgttccccattgctgcctttgcaaactgctgtaggttgggccattcagagcctttgttttgtcttagctgggtactgcatctcccctgccgtggtctgccatgttagccagcatcctgggcccagtcctttagaggctcaggctttggaatctcaagttctgtttctttcatatccccactgatcttggctcttccccacagctggaaggacttggtgatgtgcgactatatccatgccacccctcaaagaccttctagaagattatatagcctaactgccaggaatgtgagctctcaaaggaccatttggaactctgattgtccttttagaacactgcccccttctggctgaatataaaagcagcctgaacttttaaatttttattttattttattttattttattttattttatttttttgcatgtgctttgtgaacaggcagtaagaagtaagaaagacagtcccccaagggcagcagtggtcccttctcactagccctgctccatcttaagcttgatgctccacagctcaggaaagttagagaatctgggagcagcaaaggggtcttagtggccagccattaagtgtagggccttagtgtagggccattgtcctcttctgtgatagcgtctgtggctcttctgttagcttcctctttgcttcctcagccactacctaacttgctgcccgtgtgacctcaaagcgatcccaggtgtccgttggggtctgtatccgtcactgacccctaacatggtccttactgggagtccacggagtcagtgtccaggtgggcttagccatctcatctggtcctcatttcttctcttacaatatcttcctggtttggatatgagtcttataaatgaatcaggagttctgtgaggtcaccacagatgtcagattctgcgggtctttctctaagagccgaggtcagaggcaaggtgcatgggccccccgtggtatagtccagactcttaacagggcaggggttccccgtcgactggacaccatcactcgctaacctcactctctgctagtgtgacaccttttgacctttcagttagctatagcccaaagccagctgccctcactctgtgttctacagccacagccctgggatctcaggggcagctgtgggcgtggtccggttggagtgggcgtggtctggctggagggagggaaggtaacttccagctgggagatgagttgaggaaggtggggaggggagttgaacacactgcctttccttcacagaccattcccggagcagcaaggcaggtttgtggagcagcagcgaggagaagcgagcgtcatcccgctctgagcacagtggagggaccagcacgaagaacctcatgcccaaagagtcccgggagtctcggctagatgccttctgggactaggggtgcattgtgagccagaacacctccctataggcgggagaaacagcccaaaccacaggaagcaacagaaactggagaaccgccacctttagaatttccaacactcaggctctgcccgtcggcttggctgcaggacagagacttgactccatcccagctctggtcttggctgggatggcactaccctgtgagccaaacactttaggtgtaagtaggtacacttgtgacgtcactgacctagcgtacctttccttttcatatctacactgaccttaacttataaaaaaaacagaaaagaaaagcaagttttatatatatacatatatatataaagatctacaattaaaagaatgttttgataatccaggggctggttagtgagcctgctggcctcactggggtgtcagggctgggcccagggattgctattttcatgtaggcccttgtccttggatacccaggggagggagccactgtcgccgcagcacaccaggattggggctctcaggctgtgctgccctagacccgccacaccaagccatccgcccctcacagaccctacaagacgatgttaggaaacacatgcttgctggccttgaaggacacagagagaagtatgtgtgtgtggtgtgtttccagctctggctcccgaaggggcaaagcagcctcctgtttacagaaggtccacgcgagctatccccgtggcgttacgaatgcagccagcgcccggcgtttgtgcaggggtgtcgggaacgaacgcagccagcgggcatctgtgcgtgcgaggagaccccttctctcggccaagttttttcccataacacccacatggatttgtgaagacgtgcttctcagaagcaaggactcaaaaagcaaaggtgcacggcgaggccacgaagcccacgccagcccggggatggagcatgtatgtattatttatctgctggagttctacgtttttatgtaagcatgaaacacaggcagtgtgagagaaagccaggacccgacatgctgtccgttaacgctacgtctgctgtagttccattttgtatgttgtgtaaagcgagcatcgatcgaagcaaaaggtgatgtgtgtatatcagaaaaaagaaattaactgtatatcattccagtacattccgttgtacattttagtctccgtttactttctcttcattgttgataagagaatgccaagctgcgcgttgttcaggcagtttacccctactagagaagaaaggaagaaacgctagaagaaaacaggagagagagaaaatttgtgaattgcggtcgtcaaaacaaaacaaaacaaacaaaaaaaacaatctagcctagctggccttatttgggaagcgtaactgcttttagcatatgggagtattttttcacattttctttgtataaaatttgtattaaacttaaatatcttttttgat

SEQ ID NO: 158 - DNA, 5201 bp, Mus musculus
caaagtccttgcttttgtatagattcaaagtaagtgcggagagaatgctgggttctggaggtaaatgagttgtctcaggaagccggaacccaagtcatcttggctgaagaggaaataaaaactgagcaggaggtggtggagggaatggatatctctactcgctccaaagatcctgtctctacagagaaaacggccccgaaacggaagttccccagccctccacattcctccaatggccattcgccccaagactcatccacgagccccattaaaaagaaaaagaaacccggcttactcaacagtagcaataaggaacaggacggacggaatgacttctattgctgggtttgtcaccgggaaggacaagtcctttgctgtgagctctgtccccgggtttatcacgctaagtgtctgagactgacatcggagccagagggggactggttttgtcctgaatgtgagaagattacagtagcagaatgcatcgagacgcagagcaaagccatgaccatgctgaccattgaacaactgtcctacctgctcaagtttgccattcagaaaatgaagcagccagggacggatgcattccagaagcctgttccattggagcaacaccctgactatgcagaatatattttccaccccatggacctttgtacattggaaaagaatgcaaaaaagaagatgtacggctgcacagaagccttcctggccgatgccaagtggatcctgcacaactgcattatttataatgggggaaatcacaagttgacgcaaatagcaaaagtcgtcatcaaaatctgtgagcacgagatgaatgaaatcgaagtctgtccagaatgttatcttgcagcttgccaaaaacgagacaactggttctgtgagccctgtagcaatccgcaccctttggtctgggcaaaactgaaaggatttccattctggccagcgaaagctctgagggacaaagacgggcaggttgacgcccgtttctttggacaacatgacagagcctgggttccagtcaataattgctacctcatgtctaaagaaatccccttttctgtgaaaaagactaaaagtatcttcaacagcgccatgcaagagatggaagtttacgtggagaacatacggaggaagtttggggtttttaattactccccgttcaggacgccctacacgcccaacaaccagtaccaaatgctgctggatcccagcaaccccagcgcgggcacagccaagacagacaaacaggagaaggtgaagcttaattttgacatgacagcgtcccccaagatccttctgagcaagccccttctgagcgggggtgccggccgcaggatctccctgtccgacatgcctcgctcccccaccagtacgaactcttccgtgcacacgggctccgatgtggagcaggaccccgagaagaaggccccgtccagccacttcagcgcaagcgaggagtccatggacttccttgataagagcacagcttctccagcctccaccaagacggggcaagccgggagcttgtctggcagcccaaagcctttctctccgcaagcgccgacacccatcatgacaaaacccgacaagacttccacctccaccaccgggagcatcctgaacctgaacttggatcgaagcaaggccgagatggacctgaaggagctgagcgagtcggtccagcagcagtcagcccccgtccctctcatctctcccaagcggcagattcgaagccggttccagctcaacctggacaagaccatagagagttgcaaagcacagctaggcataaatgagatctcagaggatgtttatacagccgtggagcacagcgattccgaggactccgaaaagtcggagagcagcgacagcgagtacgtcagcgatgaggaacagaagcccaagaatgagcccgaggaccccgaggacaaagaggggagtcgggtggacaaagaggcccctgccatcaaaaggaagcccaaacccacaaaccaggtagaggtcaaagaggaagcgaagagcaactctcctgtcagcgagaagccggaccccacacccgccaaggacaaggccagcccagagcctgagaaggactttgtagagaaagcaaagccatcacctcatcccacaaaggacaaactgaaaggaaaggatgaaacggattctcccacagtgcacttgggcttggattcggactcggagagcgaacttgtcatagacttaggagaggatccttctgggagggagggtcgaaaaaacaagaaagatcccaaggtgccgtcgcctaagcaagacgctataggtaaaccgccaccgtcgtccacttcggcgggcaaccagtctcccccagagacaccggtactcacccgctcagccacccaagcacccgcggctggggtcaccgtggccgccgccaccaccagcacgatgtctaccgtcacagtcacggcaccggccaccgccgtcacgggaagcccggtgaagaagcagaggccgctcttaccgaaggagactgtcccagctgtgcagcgggtcgtgtggaacgcatcaagtaagtttcaaacgtcctcccaaaagtggcacatgcagaagatacagcgccagcagcagcagcagcagcaacaacagcagagccaacagcagagccagcagcagcagcctcagtcttcccaggggacgagatatcagaccagacaggctgtgaaagctgtccagcagaaggaggtcacccagagcccatccacgtccaccatcacgctggtgaccagcacacagccggcagccctggtcagcagttcgggctcagcaagcaccctggcgtctgcaatcaatgccgaccttcccattgccaccgcctcggccgacgtggccgcagacattgccaagtacaccagcaaaatgatggatgccataaaggggacgatgacagaaatctacaatgacctctccaagaacaccactgggagcacaatagctgagattcgaaggctgaggattgagattgagaaactgcagtggctgcaccagcaggagctcgctgagatgaagcacaacctggagttgaccatggccgagatgcggcagagcctggaacaggagcgggatcggctcatcgccgaggtgaagaagcaactggagctggagaagcagcaggcggtggacgagaccaagaagaagcagtggtgtgccaactgcaagaaggaggccattttctactgctgctggaacaccagctactgtgactacccctgtcagcaggcccactggcccgagcacatgaagtcctgtacccagtcggcgactgcccctcagcaggaagcagatgccgaggcaagcacagaaacaggaaataagtcatcgcagggcaactcctccaacacacagtcagcaccttcagaaccggccagcgcccccaaagagaaagaggcgccagcggagaagagcaaggacagtagtaactcgaccctggatctttccggctccagagagacgccctcctctatgctcttaggctccaatcaaagctctgttagcaagaggtgtgacaagcagcctgcctataccccaaccactacagaccaccagccgcaccccaactacccagcccagaagtaccattcccggagcagcaaggcaggtttgtggagcagcagcgaggagaagcgagcgtcatcccgctctgagcacagtggagggaccagcacgaagaacctcatgcccaaagagtcccgggagtctcggctagatgccttctgggactaggggtgcattgtgagccagaacacctccctataggcgggagaaacagcccaaaccacaggaagcaacagaaactggagaaccgccacctttagaatttccaacactcaggctctgcccgtcggcttggctgcaggacagagacttgactccatcccagctctggtcttggctgggatggcactaccctgtgagccaaacactttaggtgtaagtaggtacacttgtgacgtcactgacctagcgtacctttccttttcatatctacactgaccttaacttataaaaaaaacagaaaagaaaagcaagttttatatatatacatatatatataaagatctacaattaaaagaatgttttgataatccaggggctggttagtgagcctgctggcctcactggggtgtcagggctgggcccagggattgctattttcatgtaggcccttgtccttggatacccaggggagggagccactgtcgccgcagcacaccaggattggggctctcaggctgtgctgccctagacccgccacaccaagccatccgcccctcacagaccctacaagacgatgttaggaaacacatgcttgctggccttgaaggacacagagagaagtatgtgtgtgtggtgtgtttccagctctggctcccgaaggggcaaagcagcctcctgtttacagaaggtccacgcgagctatccccgtggcgttacgaatgcagccagcgcccggcgtttgtgcaggggtgtcgggaacgaacgcagccagcgggcatctgtgcgtgcgaggagaccccttctctcggccaagttttttcccataacacccacatggatttgtgaagacgtgcttctcagaagcaaggactcaaaaagcaaaggtgcacggcgaggccacgaagcccacgccagcccggggatggagcatgtatgtattatttatctgctggagttctacgtttttatgtaagcatgaaacacaggcagtgtgagagaaagccaggacccgacatgctgtccgttaacgctacgtctgctgtagttccattttgtatgttgtgtaaagcgagcatcgatcgaagcaaaaggtgatgtgtgtatatcagaaaaaagaaattaactgtatatcattccagtacattccgttgtacattttagtctccgtttactttctcttcattgttgataagagaatgccaagctgcgcgttgttcaggcagtttacccctactagagaagaaaggaagaaacgctagaagaaaacaggagagagagaaaatttgtgaattgcggtcgtcaaaacaaaacaaaacaaacaaaaaaaacaatctagcctagctggccttatttgggaagcgtaactgcttttagcatatgggagtattttttcacattttctttgtataaaatttgtattaaacttaaatatcttttttgat

SEQ ID NO: 159 - protein, 1237 aa, Mus musculus
VRRECWVLEVNELSQEAGTQVILAEEEIKTEQEVVEGMDISTRSKDPVSTEKTAPKRKFPSPPHSSNGHSPQDSSTSPIKKKKKPGLLNSSNKEQDGRNDFYCWVCHREGQVLCCELCPRVYHAKCLRLTSEPEGDWFCPECEKITVAECIETQSKAMTMLTIEQLSYLLKFAIQKMKQPGTDAFQKPVPLEQHPDYAEYIFHPMDLCTLEKNAKKKMYGCTEAFLADAKWILHNCIIYNGGNHKLTQIAKVVIKICEHEMNEIEVCPECYLAACQKRDNWFCEPCSNPHPLVWAKLKGFPFWPAKALRDKDGQVDARFFGQHDRAWVPVNNCYLMSKEIPFSVKKTKSIFNSAMQEMEVYVENIRRKFGVFNYSPFRTPYTPNNQYQMLLDPSNPSAGTAKTDKQEKVKLNFDMTDKILLSKPLLSGGAGRRISLSDMPRSPTSTNSSVHTGSDVEQDPEKKAPSSHFSASEESMDFLDKSTDASTKTGQAGSLSGSPKPFSPQAPTPIMTKPDKTSTSTTGSILNLNLDRSKAEMDLKELSESVQQQSAPVPLISPKRQIRSRFQLNLDKTIESCKAQLGINEISEDVYTAVEHSDSEDSEKSESSDSEYVSDEEQKPKNEPEDPEDKEGSRVDKEAPAIKRKPKPTNQVEVKEEAKSNSPVSEKPDPTPAKDKDEPEKDFVEKAKPSPHPTKDKLKGKDETDSPTVHLGLDSDSESELVIDLGEDPSGREGRKNKKDPKVPSPKQDAIGKPPPSSTSAGNQSPPETPVLTRSATQAPAAGVTVAAATTSTMSTVTVTAPATAVTGSPVKKQRPLLPKETVPAVQRVVWNASSKFQTSSQKWHMQKIQRQQQQQQQQQQSQQQSQQQQPQSSQGTRYQTRQAVKAVQQKEVTQSPSTSTITLVTSTQPAALVSSSGSASTLASAINADLPIATASADVAADIAKYTSKMMDAIKGTMTEIYNDLSKNTTGSTIAEIRRLRIEIEKLQWLHQQELAEMKHNLELTMAEMRQSLEQERDRLIAEVKKQLELEKQQAVDETKKKQWCANCKKEAIFYCCWNTSYCDYPCQQAHWPEHMKSCTQSATAPQQEADAEASTETGNKSSQGNSSNTQSAPSEPASAPKEKEAPAEKSKDSSNSTLDLSGSRETPSSMLLGSNQSSVSKRCDKQPAYTPTTTDHQPHPNYPAQKYHSRSSKAGLWSSSEEKRASSRSEHSGGTSTKNLMPKESRESRLDAFWD

SEQ ID NO: 160 - DNA, 167747 bp, Homo sapiens
ttgtggaatattttgagtcttagtaatggaaagatggtggagggaatggtgaccttgtctctgagcttatctccatgcttaggtcctctggatcttttttttgttttgttttgagacggagtctctgttgcccaggcaggagtgcaatggcgggatctcggctcactgcaacctctgcctcctgggctcaagcaattctcctgcctcagcctcctgagtagctgagattacaagtgcccaccaccacgcccagctaatttttgatttttttttttttttgagaaggagactcgcactgttgcctgggctggactgcaatggcgtgacctcggctcactgcaacctcctcctcccaggttcaagtgagtctcctgcctcagcctccagagtagttgggattacaggcatgcgccagcatgcctggctaattttgtgtattttttaataaagacgaggagtcaccatattggccaggctggtctcgaactcctgacctcgtgatccacccacctcggcctcccaaagtgctgagattacaggtgtgagccaccgcacctggccaatttttgtatttttagtagggacggggtttcaacatgttcaccaggctgttctctaactcctgacctcacgtgatctgcctgcctcagcctcgcctcctaaagtgctgggattacagatgtgagccaccatgcctggcctggtcctctgcatcttattattattattattattattttattttattatttatttattttgagacagaatctcgctctgtcgcccaggctggagtgcattggcgcgatcttggctcactgcaacccctgcctcccgggttcaagagattctcctgcctcagcctcccgagtagctgggactacaggcgtgtgctaattttttgtatttgtatttttatttatttattatttttattttttattttttcgactgagtttcactcttgttgcccaggctggagtacagtggcatgatctcgacttaccacaacctctgcctcctggattcaagcgattctcctgcctcagccttcctgagtagctgggattacaggcatgcaccaccacgcccggctaattttgtatttttagtagagatggggtttctccacattggtcaggcgggtcttgaactcctgacctcgtgacccacccgcctcggcctcccaaagtgctaggattacaggcgtgagccactgcgcccggccactttattttattttttgagacagaatctcaccctgctgcccaggctggagtgcagtgatatgatcaccactcactgtagccttgagttccttgactcaagtgatcttcctacctcatcctgtcgagtagctaggactacaagtgtgcactagcacgcctggctaatttcttctattttttgtagagacatggtcttgctttgttgcccaggctggtctcgaactcctgggctcaagcaatctgctcacctcagcctcccaaagcactgggattacaggattgagccatgggacccagcctctttgcaccttatttggtgtagccatacctggcctttttttgttccgctgaaacatcaaactgccaagctcagaccaacttagagccttcatacttcctgttccctccaccaggaaggttctatgttcttcgctccaatgtcacagcctccttaaagggtctccccacttcctgcccacactatctaaagcagataaaccggcaggcactgtggctcatatctgtaattccagcactttgggaggctgaggtgggaggagcatttgagcccaggagtttgagatctgcccagaccacagagcaagacccctgtctcttttttttttttttttttttgagacgttgtttcactcttgttgcccaggctggagtgcaatgacacgatcttggctcacagcaacctccgcctcccgggttcaagcgattctcctgcctcagcctcctgagtagctgagattacaggcatgagccaccacgcctggctaattttgtatttttagtagagacggggtttctccatgttggtcaggctggtctcgaactcccgacctcaggtgatctgcccgtcttggcctcccaaagtgctgggattacaggcatgagccaccgtgcccagcctgacccctgtctcttacaaataaaaaattaagtctgggtgcggtggctcatgcctataatcccagcactttgggaggccgaggcgggaggatcacaaggtcaagaaatcgagaccatcctggccaacatggtgaaatcccgtctctactaaaaatacaaaaattagctgggcgtgttggcatgcgcctgtaatcccagctcaggaggctgaggcaggagaatcttttgaacccgggaagcagaggttgtagtgagctgagatctcgccaccacactccagcctggtgacagagcaagactctgtctcaaaaacaaacaaaaaaactagtaaaaaattaaaaaaaaaaaattagctgtgtgtggtggacacacttgtgaccccagacactcaggaggctgaggtggcaggattgcttgagccaaggtggttgaggctgctgtgagctgtcatcttgccatcacgctgcagtctgggaaacaggacggggcacggtggctcacgcctgtaatcccagcacttacggaggccgaggcgggtggaacacaagttcaggagatcgagaccattctgactaacacagtgaaaccctgtctctactaaaaatacaaaaaattagccgggcgtggtggcgggcgcctgtagtcccacctactcgggaggctgaggcaggagaatggcgtgaacccaggaggtggagtttgcagtgagccgagatcgcgccactgcactccagcctgggcaatagagcgagactccgtctcaaaaaaaaaaaaaaaaaatccggctgcgatggctcatgcctgtaatcccagcactttgggaggccgaggcgggcggatcacctgaggtcaggagttcgcgaccagcctgaccaacatggagaaaccccatctctactaaaaatacaaaattagccaagcatggtggctcatgcctgtaatctcagctactcgggaggctgaggcaggagaatcgcttgaacccgggaggcagaggttgtagtgagccgagatcatgccactgcactccaacctgggagacagggtgagactccgtctcaaaaaaaaaaaaaagaatgggatggttagtcctgacctcagtttactcatataggagtgggttgataagtataatggtgcctgctttatagttttgaggataaatgggttggttcatgtaaagcgtttaaaatcgtatctgatggccgggcacagtggctgacgcctgtaatcccagcactttgggaggctgaggcaggtggatcacttgagtcaggagttcgagaccagcctggccaacatggtgaaaccccgtctctactataaatacaaaaattagcccggcgtggtggcacgcgcctgtaatcccagctactctggagactgaggcaggagaatctcttgaacgcaggaggtggaggttgcagtgagctgaagttgcgccgctgcactccagcctgggagacacagtgagactctatctccaaaaaaaaaaaataataataataaaaaaaaataagagtaagccaagagggaaatagtaacagcaactaaatgagtgctgactctgtgcagcgttgctgcaagcttttggtagagatgatttattcaatgattccaggcactttttatttttgttcccattgtactgatgagaaaatcaaggcacagagaacttagtacttcaagcaaggccgcacagctggcaagtggggtggctgggatccacacccagagagtgtggcaccagcagccacacactcaatcactgcacagttgtgcttcttgatgtggggaagagagaggaaaaaggttacaggtgcaagagaaatggggctagtttttaagccagggctcagatggaaagatatctgatgtagggtgcagcagaagagaggccttgtcggctgtggggaatcctttcagaagcagcagggaagatacagacatgttgaggccccgcggaggaaatggctagctgctgggtggtttggggaagtgggcagatccattgattgtaggaagggtcagagtagaagatcaagtaccacggctccaaggaggagagaacaagttagagaatggaaagaacaggtggatgatcggagtggccggagcagagtgagccacaggagggtggagggagatggtcggaggtcagaagggcacagtgccagccgggaggctggtgggccgttatctggacttgggctgttactgagaaataggagtcattgatggattttgagcagaggaaggacaggagctgacttgtgttttgaaaggatcactggctggccgggaacggtggttcacgcttgtaatcccaacactttgggaggccaacgcaggcggatcgcttgagcttaggagttcctgaccagcctggccaacatggtgaaatttgaaaccccgtctctactaaaaatacaaaaaaaaaaaaaaaaattagccgggcgtggtggtttgcacctgtaatcccagctactcgggaggctgaggcagcagaatcacttgaatccaggaggcggatgttgcagtgagctgagatggcgccactgcactccagcctgggcgacagagtgagactgtgtctcagaaaaaataaaataaaataaataagtggctgggcatggtggctcacgcctgtaatcccagcactttgggaggccaaggcaggcggatcacgaggtcaggagatcgagaccatcctggacaacatggtgaaacccccgtctctactaaagacacaaaatattagctgggtgtggtggcatgtgcctgtaatcccagctcctcaggaggctgaggcaggagaattgcacgatcctgggatacggaggttgcagtgagctgagattgtgccactgcactctagcctgggcgacagagtgagactttgtctcaaaaaaaaaaaaaaaaaaagggagagaaaaaaaaataaaaggatcactggcagcctgggtggtacagtgtgtgtatgtgtgtgtgagtgcatgtgtacaagcgtttgcaagggcggaagcagagagctcaggtaagattcttgcaaccatccggatgggagatggtgttctactgagctctaatatatgtcaagtgctgtgttcaactcttgagggcatgatggtgaagaattcagacaaggtccttccttgcctcgtgaagtgctcagcctggtgcacagtttctcagcctctgcactattgacatttgaggctggctaattctccgctggggggtcttgtcctatgtgttgtaggatgtttagcagcactagatgccagtagcactccccacttccctgaaagatcttacaacccaaaatggagacaacccaaaatgtccctaggcattgctaaatgtccccttgcgggggcaaaaccaccggtccagtgggagggagaaacagagcgaacgaatctatagtcttctgcccataaaagtaattgctaggaagaaaaaagagtagggcctgagttttcctgcttttcattttccttctgctcctgcatcccttgctcggcgccccacccgcgctgtggccatctgcctgatgaggggcgaccatccaccccctgccctttccactagccctttttgttttccctcccgccgtttgcctaatcctgccagtccctcctagaaagaggtaaaaaaacaaaacaaaaccaaaaaaccccacacccctctcctagtaggcatcttctccaagggagggaggctcctatctgcctctttgtggctgtaacatgacacagtcagctccgggctctgaaggtgagcccttctgtcaccgtgcccgaagttggcctcggttctaattggccagaaaggaacaaaacaaaacaagatatttaaaacacttccctgactcaatcctgtccatttcgcgtaacggtcagagaggcctgctgtagctggaggccgataactgcaagtgtgcttatttttgtaggcagccgaacaggctatctcgggatgcagcttgtggggccgctcctgctgctgctcgcctggctggaggccagcggaacgggcgagccatttcagggaggccaggcctcagctcgtaaggtgctgggggaagggagctggggccagcctttcctctccctcgagaccagtgttgttactgtgacactctgcctggctccccacagcctgattctgtaccccaatcctctctgtaccctgggaatattaagagagacacgttttaatctatttttattagctcattgcttattaatatcaccaaagaacctgcttgtttaggcctgtgctggcttttctagccagaggcagaatgattggactgttttcttccctttccttaaagggcttaaagccagggtttcccaaccttggacattttggatcagatacttccttgttgtggcggggctggtcttgtgtacttataggatgttttgcatcatccttggcctctacccactggataccggtaatacaacctccctaactgtgacaacccacacgtctccaagcattgccaaatgccccctgaagggcaaatccccccatggttgaaccactggtttcagggaatataaaagcctaattttagagatggcaaagtgttcccccttgacatcttgcatcttgctggaggttgggagggagagggtcgcttcctctgggcctcaatctgtaatgaggggcatttgaatgagtctaatctaaaagtttccttcagcgccatcattcaatactgaaaacccacctcaaaagggtgggtcttcaggttgcagcattgagttgtgatgatgccactgcactcaagcctgggcgacagagcgagacactgtatcaaaaaacaaaaaagcaaaaaactggtctacctcctaaaagaaaacacagattatgcagttgctgttcgtaggtttcagcctcattgtttctgctgtgcttggttcggctttgcttttgcttctttctttagagccaggagaaggtacagagtttagggatgtgaagtgctaacggggtggacatctgatctctggcacttcccagctgtgtgaccttgggcagctcacttcacctctctgggcttagttccaggtttctaacaatgccacctacttcaggaatcagtctatgtaaagcactaatttagaagtaactgctgggatactcactgcagtggggctttaagaggagctgctgaatggatttctagattgagacctgcaacatttggttttatttcctgcttatcagccacattccatgaagcccaggaccagcccttcgtaggcctgccccaggctttcttttcaatctgtgttcctcccaggattccatctgccaccatacttttgtgtctgtccccagccgaattgctgttttccagataacctcagacctacccgaatgccaacagcattcctcaaacagagcagagctgccagaataagccagcagcttcctgctctttgccccagaaaacatttcaagtgatcaagtgatcagagagagggagggaggcggggaggatgctgtagctgcttatgcaacaagctttaatcccaggttaaaatccaccacgcacaccagcggcatattttatttcctcattggttcgtggacttagctgcatgggagatctgccaccaaccccacagtcctgtttgttcccctcaaagcagcacccgcagaaacaaacagcattccatatgggatggcggtggagggccgctgcccacacagctaggagggtgagcacgcactgcttcactgtggcctccacctctcgcctcctcccatttagtctccccatgcagctttctacctccaggaagagcaggcccctcccttttggtgaggcccaggcctgctgtcctgagccctggagctttgtcaggttgggtggccatggagctgtccctccctgcagcttggcctcagcagcctaaaacagtaacaacagcaacatcctgtccgtttttataaagcctgggtcctgccctgccgtacagtgagtttcgattcccagctcgttcctgagcctgtttgatatgagattcccggccaggaagaatttatgtacaagcagtgggcatctgttgtccatgtgggggttgggggggggcagggaaagcaagccatcagctcttcgttttctttgtgggaaccgtgtgggacaagaaagcccacaagtcctaattttaggaggagaggggagactttattgctccggagttatgcctcctggcatatggctgcgttaactctggacgctttctccagcctctaaagaatggtgtttatttagcttctgtggttccaggttgctgttttaaaaaatcctgttaattaagcaccttgtcatttaaaatgccgaagaaggaaagagagcgagaaagctggggacattttacggtccttttctatctctgggtacagaccaactgcgaaggcagctttagggaggagaccagcaaagacctcctaacgcaattgaagtgggtagaattgtaagcagctctgaacaaccagttaatattttactggggagcggtgccagagatgggggggtgggggggctgccaaatggagggctgtgtgtgaaatcgctgctccatctgccttgggggacgaaaagaagccgttctctgtgcaaataaatggaagcaagaatccttaggaagcccaggggatttgtctgcccaccgaggagggcccaactcccccaggcacacacatacagggatgattgtggcaggaagggctgacctacgggggtaggcctgacgcataatgggggctcttgtttccgggctgagcgtgccatctttctgtctccctctggattgaaatggcttctcagcccgagaggcactgcctgtgccctggattcacaaggtacacgcctccctgggaagcaaaggctgagagacagcggctctctctctctctttctgcatctgccgggagagctgcagctggtatttttccacaggccttcgctgcgatctcaaggcctagtttttcccagccaggccccgagtccgagagagggttaacaggcaggaagccgaaggcatcgcaggctaatacggaagtcagatttgtgtttaactgacaggtttagcaggtctcggccgcgggggaggggccgggagggaagggaagtttgtagatccaggcatgtggcctgcgaggagggctttgggtttttcttagggtaaggaccgagaggggtcccccttggcatcgtggcagggcgacaggaacccacgttgattttgcctgcaggactggctaagcagggcgcgagaggcccacggctccctggcctgccttgcaaggaggcatggggacaatgactatgcaaacttgaccactctgctcccctcctcccctcagcagctactcctcgctcctctgagaagccagggctgctctctgctgatttttcggggctcccccgggctgcctgcttcccccagcttctcagaggcctgcctcaagcccctttttctggccccttggctgtttccccgggactccccactccccagcttccccttccccttggagagccaccctgctggactgttctagaaaaaggctggccttcctccctggacaagggccgtttctctgggggcaggtgagggtgagccgttccagcccactccaagaaactcccttcccagggacctccgggcctcaggctttcctggagcaggtcaggctggctgccctggctggcccgtgccgggaaatctagccagggtgcaggagaagtgcgtgtgggggcccctttcccaagtttttcttgctgcaaaaggcctagcttagcctgtctttttctatgcacaggatggctcttgctcacccgagcctcacaaagataatcgctcaggaagtgtttcagccaatccggggcggctttacactccgatttgccggggcagccaatcggggatgagcttttattaggcggccagatcatcagccgaagtgccaaaccctttttctgtgagaactaggagcctgtcctccatgttttataagtattgacattacacagtgttaacaatgcatccacagaggtaagctcgactttttaaccatcttttttccccctccctctgagacatccgaattgtgggcgagcagtgtgatttctctgtggctggccgtgccacactcacccccagagcacttatgttaacttggaactgtttagagagaatttttttgctttcttgggtcacatggctcagtagccattagccatagcttgattttgcaaactggcaagggcctggcacacctttccttccaccagggcatggtgtttctggaagagtttgaagctagatcctggtatgccaaaaaagaagcttttttttttccttctttttttttttttctttccctcttccctctctcttcccctctctctctctctgagcagttccccccctcccacccctgcactattgtcttctcttttgccacatgccctgctgggggaagaaaatggaaggtaagcaaacaggctcctctccaaggagagctcatggcagacagcagagcaggcaagtttgcctctccaaagaggttctgggaaggctggataagttttgacaagagaggagcgtgtttgcaaaagaattgtgccctcagcagagcagtgctaaggagagtctagctcctggggcctaggtgggtggtggtgtctgtacacggtcttctcttattctacagagcttctgcacttgaaactacattgttcagcctgttttcctgacttaggttgctacagagtgttctgcaagccagcctacagccagcaaatgtttctgaaagtgttttctaggctttggaggaagttttttggagtagggatggggactggggggtggggggagagatcttggacaacatcctgcaaaaaaaaaaaaaaaaaaaaatctgcaaggattctgaatcccttagctttctactcttgcatgattttcaaggaactaatgttaccttttatccttgttttcattttcctgtcccttttatacattgtatcctcctctcttctcctgtgtcatggagtgtagaggaaataaaatcatgtctgtggctcatgacagcattccatattcagttgttgggttgtgttgttgttgttgtgtgtgtttttaataataccatgtaactgtttaaaaaaatttcctttttgatcaagtcccaaatctgccagcctgttctctcttcctaactgtggaaaaatgagacggttgcttgaacatttgttgggtaagtaaagcaatccatttcctctgtgaccatgtttgaagagttttgcgaacatttggggtctgtttgtaatagtgggtcttggctacaggagttgggggcttcattagcaggaacaaaataagggctttttaaagagtgtcttgattttaggtgactgtttgaatccactgtttttcctgataacctgcagctaggattgaagattatacttcctgtttaccctgagtcaggggagaaatgttcagttcattgtgacttgactctagacctttaatggggtttgtttggatattcaaactgtgagtaggtgatgtgcttgtgaaatgtcatgaaactgcttgttcttagaggtgcagagccctaaaaacattggtggtgtagaagctggtggtggtggtggtatgtgtgtgttgggggggtggtgtcagtgtgctcatgttttaggacttatgtatagtgcaaaatctcatctaccaccagactgggtttgattcaggactcactgaccaacacattttggccttttttcaggtctcctccacacatctgtatgcatgctggccccacataagatttctcactttttacatttcccttgaccacttaaggctgcagctagaagttaagtgggaaaagtagagtcttgtttagcagtaccttcagaatttccctagaagttcagtacataaattttcagcttggagaccaatccgacatgaccgtaaatgcaggaaatatattcaattgctgtgttatgtcaactttatggagtcagtaatcttttttctttcaaatgagtgtccagtagcccactttctgacaccgaattggaaaaaggctcatttaatcagcagaaacgtaccacattctaagttgagaaaagtctgtgcaaggcaggccagcttagcttcttagagtaaaactgcaggcagttaatgatgttatatacttaaaactgaacagtgccactgccccaaacaagtaagttcagacactcagctattttctttgttcttatctccttgctgtaaatggaaattacatatcgaggttcttgtggcctccctagaagcaatatctaatcataagactcctggtttggtgccttcaacgtttgcataatactgtgtttgttgggctggaagggaacttaagggcaaggcatttgtcctctaaaagcttgcattaaaatggctcccacaggtttggagagccaagatctgttttcaaatgtacagcccccagcaagttcccaaccctggaccaagctagccacttttcctctggtactgtgacccctaccaagcatgagtctgtaaaaagttaattgctttcaaagtagcattattttccagtttcaggaaagggggaaaaaaataaatgtctgcattgcagcaggactaggtagggacggcagtactggctcccagagcagcccaatggggttcttctactctagcttttaaaccaatagacttggaggaaaggttaaagattgacaattgcagtggccgaactaagaacgggccttctggaaatttctaccatctttgttccttttaggaaaagcagatctgccaagcagaagcgtctcctaccttccattcctaggtcatctcccttccctgcttccccccaaccccccttctttttctcatcaaggtagaatgttctctctgccacgtttgtaaattgcagaaggaggaacagaatgttgggctgttttcctttttccttctgcctcctcagtccccaaagaggatacacagctgcaaggagcaaacacagacacactgaagcttttgattcctctccttttttttccttcaagaccctccaggatggattcactttctgctttgggaaattaagtggcattcacgtgggggagggggagtaactgcttttattagctccagaaaatggtcagtgttcagtctgtaactaggaattaattatatataatcactcagtaaactttctacagagtttttctaattgctgagcctgatcatagttagcccgttggcgccaagtccagttacttttataattaacagctcaaagatttgagtcagaaagaaacaattgggggcctcttggattataaattagggatgaaaacaatagctttttttcctttctttcttgtcatcccttttattttcaacaaaacatttccccttttctttccctgggagaaccagtggggagactgcatcaggtcttaaataggatgaggggggagacactttttaggaagtggggtgacagtaacctagaaaaccctggaggcaaaggtaggtttttaaaagtccagccacttgcaacgcgtgatgtctttgtttcttttgccctctttccccttctctctcctgtggcagaggcagcagacatttgtcagcctgggaaccctcaatctggctttgcctctggttgactctggaaagaaagatacattcaaaggggccttcgctactgcacagcagagatttaaaaagggaatatgtttcagaaccctttggttactcttaaaatgcaagatctgagcaagggttcacccttggcttcaggttgctaaggttatggtcaccctccccgctacttcccactctccttgcagacaaacaaacaggcagtggccatgccagctctgcagccagtgtgctgccagcctgtcccccccatcccgattaccttacctaccggccggcgggggccagtggcccgtccttgccctggcatggccttgggcactgtgccctcctttctcccctggagctaaaaagcagtcaccttgaaactcctcactcccagcaccagaggagttctgaggccaatgctcagacctgtaacagtaaatgacgttatccactcaggctgttagttcggcctctgaaagcgggttttgcaaaacccattgttaattctcaggctctgttgggggtggtcagaaatctaatttgtgagtatcctgtgcattggataagggaatgttttccttgtgtttctcctctgcagactcggattgtctttccttgatgttaactgtcttaggactggctgcttcagagggctgggtatttggtggctgtttgcaggcttataaacagcctttttattttacctttgccgtagactgaggtgcagccctttagcttggcttttcagatgcctgctgtccttgaagcactttcattttacctagcgcctttttggtatggatgcaaagctggtttctaatagactgagaagagaagggggaccgggcttcctccttgccttcccccaggctgctccctgggaacatttttgtgtttgcacagacacctgtccgtctgcagtttgtgccacggggctgcacgattcctaaccttctacccacctaatttgagggcaagggggcctcatcacagagcctcatgttgaaggctcaggatctacaagagaaggcttttccttaggaacctgtgacttcacaaactctccctgtcattgcagagttttttttaagcttctaaacgttgggttgttggtgtcctttggttcagcttttcctagttctggtatttaggaaggtggctttgaaactcgcagggctgcttaaacaagagctacagctattgaacaaactgctaccattttagcttcaacacaggaatgaggcagtgttgccagacgccattttaagaatcctgcataaatagcttagctaccgatgactctgcctgttttaggtgagtgcttatataaagctgctctgctaaccattcccccccaccccaatttcttaaaaaattaattgtagatttagggaagcatggtttttaattttgatgttcactattttgtaatctagaagaggaagatgttatgccttggggattaaatatttcttacagcctggaccattttggtattttgaatgaaaagtaaaaaccaggaaaagtcctttcgaatgatgcatgattcttgaattgctgtgcgatgatcctcatctgtagaaccagagtcttgtgcatgttggttatatattctagatggcttagatactcttctttaaaagtcaaatagtaggggcacttggggaaaagaaatatgtgggcattgtgtattcaggcatttttctgtcaaaactagatgctttcttttttctctctcttggaagtgttgaggagatgagattcctgggaattacggaccatccctgagtcctcagaattaacaatcagaaggcttaaagcatcctggaggtgcagtagttcatctgcaacttttaattgctcttttttcagtgcatgcaggttaagaagtaagcataggttttcttgctcaggcactgggggagaaatcttttattctttttgggatgggatggggtggtcttggttatctttgcaggtactgttatttctttgaattgcctcaaatgtatcagtttgtgaaatctgcaggcaaatgacttgggtaaatgtgagtgtaagaggtggtggtgtatacaatgtatctaactagttgatggtgtattttcctattggagtgagaaattgtttgcttttcagctaattttacccttttctgtagcgggcccccagtttcctcaacagacctttaaagggaaaaaagtaatgtcagtttgaaacaagagcttgttgtcccattgtttttgatttaaatcatcagggttgctggaagctagcagatatggaaggaaataagctgtctatgttctaagactttaatgtgttaatgacagaagttcagagtattttctccagatgcagctgccttttctttttaagaattatttgactgttttttttcccccaaatgactgaacagttcttaacctaaattgaccaacatcagtggggcaattcagacaggtacagatcttttcttgcgcctacttttgatgtaatattcatttttttttcctaataacatactagttcttaacactaaatcaaaaaaaaacacacacacacacacaaaaaaaccgaaatcagtggtgtaggaaaaaggaagtccctttagatgtggctattcaaaatgactaattttgcattctggtctttgcttttgtaaatgaagttttttttttttttttttttttttctccttttaatgcatagacactgcagtttcctttagtcaaatacaagttaattgtgtgtgtgagtgtgcgtgcatgtgtgtgcacgggttccttttgaaaggatggtttgctgatctgtgaaaaagatggttttcttaaattgttgtgcttgaaatgctgtgctaaagctggtggtgctattgctaaagttgggtgattatggtgcccacttgtaatacttggaaagataaaacagcttaacttttttttccctctctcttctgctccagcattgattatcttaaaactcagaagcaaatagccaccacataactagtttgcattttcctcgtctctcagcagcattcctgcctgaagtattcagctcctctaggctgttacaagccaaataatggttcccttgaatgcagccttcctccatgatcaatacacctttgaatgttttcatcgctgcagaaatccttcaagtgggttttttttggctcagttctgcataattgtttccctcaccactgtagatttcagttggatcacagattagcgttttctctattactcaaaatatgggatcggtttcaagaagtttagaatttcacatacttcatgctagagagggaaacagaattctagttgctagaaaagatcaaggttgctatttgttcctttgaagttaactgtctacccatctccgagggctgcatggggctttttgttaagatgtatttccagtcaccccaagccagaacccatcaacagcatccagttggacaacctgtgtatgtttcaggcagagtgtttctgagttgagaatgttttctccttaagttggaatagaaagcattagtgctgaaataaccttcaataaatcaccgttgtattattgcatataagcgatgtgtttaaatttagcaggctgctttctcctgatgaaaaccatttgtgacaacatgtcagttgtttctttggtgatttgtgtcacaggctttctttacagatgcggtgtaaatgaaattgttaacggggttcaaaatcagatggctaaatgtgttaatattctcatttaaacccaactacctttcttcgtctccaagcccctataatttaactctgaactataatcttttccattctatctagctcccatcctaagtcctctcctcctaacgtggaactctcctaaaatcttctccttatactagggttcgagacatgaggctgtctttttgggccttttgcgttgtcacagtcccagaccacggaacattctctcttccccaggacaggacattctctcttccccagcctccttcctgtcctggcgttgagtcttccaaatggaaaattccagccatatcaattggtgatgcacccatttcttcctgtggaacgacagtctgatggaattgcttctggagtaaatgcccagcttcttaccacttcagtgtcagcctgaatgtttggaaagttctagcacctcaaaccatttgcatctatgaaagcagaactctattttttccctttggtttagcttgtgagttctctgtgggaggaagatctgatatggccggctctctttcaaccctagttccagcagagagagagagagaatgttctgggtgacggaccctcccagcaaaggggcttgctttatttgcttctctccccaaccctccactcttagcctttgtcttttgaataatccttcctcattccacttttgtggtgggggataattagtcacaactcagtagtaagccgtgcctgctgtagagaggaagcattcagggggttggaagtgtggagaccccagtctgattgctggaatcagtgctcctcggttcagtgttttgagaccaggtctttagcttctagctgggcatatttttctgctttgtaatttaacctgtatcttttttttcccatgttcctgcctcatcagggaattgtaagatttagggggaggtgtgggaaatcttactctttgccctaaagtattcagcgatcagaattctggataccctgcaaaacacctccaacctccctgcctttgaaccctgtgttaacaatgagaagcttgtttatttgaaggctgggttctcattggcccacaggggtaggttgtaattgtgtgtctaaaaaattgccttttgcattccccaatagcatgacaactggaatagtaatttgacttaaaaaaaaaaagaacaacctagtgttttaaaaaactcctttaggactcttcacactttgttgaaatcaggtgtgggtttcctcccccagccctggataaggatgagggaatgtctttaaggtgtgtttgttgctagaacttccaaatagctgcccccatggggcaagttctcagccttcctaaacatgaacataatttgctctgtttcagcttggctgaagaggaaataaaaacagaacaggaggtggtagagggcatggatatctctactcgctccaaaggtgagtaaaaatcttgtattatctattctagagctaaggaggaaattggaatttctttttgttgttgtagtgcagtgaagtgtgtggctctctgagccgacgttgtaactcttcttggattttcagatataagattttttgatggatgaacctaattgatggagaactctcctccttttggttttctttccctggtgcctgtgtaggggtcctgacagtgaattttacctgtgtgtcatgactgagggtggctggctacctctccgcagggtgactttcaggagccacagtttaaataaagcatgttctggaagccaccagagcctctagctgctgctcgttttctgattttaacaacagacctctttggaatcccagaagtgggatgaagtcagcccgcttcactggaaagtggtggtcttgggttagagataaaaaggaaatgtagagcttgctgggatgccggggccagtgtttgcatttagttcaaaatttagcaaattaggacaaacacaatttatgcgtttattcacaagcctggagtagactcctgaatatcttctaattgagggattggtacttttcatttggtctttgtgaaagagattttatgaggcttcccaaaatgaagcagttattcacttttaccttcagggtgctttcacaaatgagctactggagtatttttcgtatctttggttgatgaaaaggctcatctccaaacttaatggttgtaccaaggtgttttcattccttcaacaagtcactgagtgctttcttggaacacacagccttgcactgggggttatggggagggaggaagaggctggacagggttactgcatactgccggaaggagattctcatttggctgcagagtgtcgcacaaagtgactccctaaaggcgtctgaaaccaaaagcattttgaggattgttacaagacagcgtgtcgccaggcgtggtggctcatgcctgtaatcccagcactttgggaggccaaggcggaccatcacgaggtcaggcgttcgagaccagcctggccaacatggtgaaacccccgtctctactaaaaatacaaaaattagtcgggcatggtggcacgcgcctgtaatcctagctacttaggaggttgaggcaggagaatcacttgaacctgggaggcggaggttgcagtgagctgagatcgcaccactgcactccagcctgggcgacagagcaagactccatctcaaaaaaaaaaagacagtatgtcattttggggcaaagttgagggtccagtagtcaaggctgggacctgggaagcagaagctggctgctgatctctggcaggggtcacagaaggggaggcaccctgggtgggaaggcctggcttactgggtgggtgctgtgtgctggggagcagcaggaggaggctgggcggaggcagagggctgctgccccctcatcacagcatgacccagcctgtgctgggtggcaggaagtttcagtgccattgatggtgaagagagctgagccaccagggacttcagagcaaggaaggtaccttctcacagaggtgtttttgatgttgcaggagcacgtgcctctcagccacttctcagcccccttgttgtggtcagaatcaaatgtggtccagcaggagacggggcaaagtggagagggactgaagagagggggccaggagggtgggggtcttgtccctgttctgctgcttaccttccccagggggcttggacactggctctgtcccttcatttttgtatttgtgaagtggggtgttggattagattctatccaagcatgaccaagctgagtgaccattgtctctttctctcttttctcctactcccatcctcacccttcagcagccagaatgcgcttcaaaaacgtggattggggtcaggcacagtggcgcatgccaatcatcccagctacttgagagactgaagtgggaggatcagttgaggccaggagtttgaaaccagcctgggcaacttaacgagacccccccctcccgcccccatctctattaaaaaaaaaaaagtggacagagtgcgttggctcacgcctgtaatcttagcactttgggagggcgaggcgggtggattgtctgagctcaggagttcgagaccagcctgggcaacacggtgaaaccccatctctactaaaatacaaaaaaattatctgggcgtggcagcatgtgcctataatcccagttacttgggaggctgaagcaggagaattgcttgaacccaggaggcggaggttgcagtgagccaagaccacgcctttgcactccggcctaggggacagagcgagactccgtcttaaaaaaaaaaaaaaaaaaagtgggtcaggttctgtctcattttgctaactccttctgatgattttccagtacccttccactcaggtctgaagtcaccgtgacctgcctacctgggccggccctgtttacctttgtttcctttgtgatgttctgttcaccttgtgccatttctcccccaacttcacttgagctccttggcctccttcctcttggttccttccttggggcccctgtgtgtcttttgccaggagcaggctgcccatttctcattgtgatctcagacttatctcagatggtggctcctcaaagaggcttttggtggccacggagtctgaaggagtcatttcattattttctgttttaaatatatatataaaagacaacgtctcactgcactgtcctggctagagtgcactggtatgatcatagctcactgtatccttgatctcctgggctcaaagctcactgtagcctcaatctcctgggctcaagctatcttcccacctcagcctcctgagtagctgggactacaggtgcacaccacctcacctggctaattaaaaaaattttttttttgtagggatgaggtcgcagtgggttgcccaggctggtctgaaacccttggcctcaagtgatcctccctctttgacctcccaaagtgctgggattataggcatgtgccaccatgcctggccaattttctattacatttttaaaatgaacttttaatttaacagtagtattagatttccagaaaagttttgaggatagtgccaagagttcccatgttagcccctggctccacacacacaatttcttctattattaacatcatacactagtgtggtgtaattgttacaaataatgcatcaattttgatatgttattaccaactaaaggccatcccttattcagatttccttcggtttcccacaaaagtcccttttccgttttagaatcccactcaggattcctcattacatttagttgtctgcctgggctcctgttggctgtgacagtttcttagacttttcttgtttttgtggaacttaccggttttcaggaatactggtcgggtattttgtagattgtcctgtcaattgggatttgtataatgtgtttctcatgattagactctggtaaactgtggttatgggttttggggaggaagaagactacagagggtaaaatgccattttcatcatatcacatcaagggtatgtattattaataagatctatcactgttggccttgtgcagtggctcacacctgtaatctcagcactttgggaggccaaggtggggggatcatctgaggtcaagagttcgagaccatcctggccaacatggtgaaaccctgcctctattaaaaatacaaaaattagctgggtgtggtggcaggcacctctagtcgcaactactcgggaggctgaggcaggagaatcacttgaacccggggtggagggggtggagacggaggttgtagttagctgagaccatgccactgcactccagtctgggagatagaatgagactatctcaaaaagaaaaaaaaaaaaaaaaaaaaagatttatcactgttgatgttgaccatgaccatctggctgtctttcttctctttccatcctctgctctttggaaggaagtcacaaggcatcacccacacttaaggagtgaagagctatgctccacctcctcgaaagcagaggcttgacataaattatttgggggctggatgtggtggctcatgcctgtaatcccagcactttgggaggccaaggcgggcagatcacttgaggccaggagttcgagaccagcctggccaacgtggcaaaatcccatctctactaaaaataacaaacattgtatgcctataatcccagctacttgggagactgaagcagaaaaatcacttgaacccgagaggcggaggttgcagtgagccaagattccaccactgcactccagcctgggtgacagtgacactgtgtctcaaaaaaaaaaatttagaattcttctgtatggggtattagtcttttctccctcatgtatttattcagtcatttatctctagcagtgtggactctgggatggttactttatactgtgggttgtaatccaatactacttatttattttattgctcaaatcattccagctttggcagttgggagctctttgtgttggctcttgtgtccccttgacagactccatcgttgtggggtttatttatttgttcgtttgagacagcctcgttctgctgcccaggctggagtgcagtggtataatcacagctcattgcagccttgacctgctggactcaagcagtcctcttgcctcagcctcccaagtagctgggaccacaggcatgcatcaccacagttggctaatttttgttctttttatttgtagagatggagtctcgctgtgttgcccaggctggttttgaatttcccaggctcaagtgatcctaccactttggcctcccaaagtgctggggttacaggtgtgaaccaccatgcccggctggcctatttatttatttattgagcactttcttgtcttctggcactataagatgttccaggctcattttgtatgtctttgcctcagccctaaaatcatccatttctctatggatcctggtttctttctttcttttcttttttttttttttttgagatgtagtcttgctctgttgccgaggctggagtgcggtggtgtgatctcagcttactgtgacttccacctcctagttcaagcaattcctctgctccagcctccatagtagctgggattacaggcacatgtcaccatgcccggctaatttttttgtatttgtagtagaggcggggtttcaccatgttggccaggctagtctcgaactcctgacctcaggcaatccgcctgcctcagcctcccaaagtgctgggattacaggcatgagcctccgtgcccagctttttttttttttctttgagacagaatctcgctctgtctcccaggctggagtgcagttggcgcgatcttggctcactgcaacctccacttccctggttcaagcaattcccctgcctcagcctcccgagtaactgggattgcaggagcgcaccaccacgcctggctaatttttttgtatttttagtagaggcagggtttcaccatgttggccaggctagtctcgaactcttgacctcaggtaatccgcccgcctcggcctcccaaagtgctgggattacaggtgtgagccaccgcacccagaggatcctggtttcttttattggagaatagtattagaaaccaagatgtgggcactaagtgtgctcgtttttgtttgtttgtttgttcgtttttgagatggagtttccctctgttgcccaggctggagtgcagtggcacaatctcggctcattgcaacctctgcctcctggtttcaaatgattctcctgcctcagcctcctgagcagctgggactacaggcacacaccaccacgcctggctaagttttgtattttttttttttgagacggagtcacgccctgtcacccaggctggagtgcagtggcgcgatctccgctcactgcaagctccgcctcccgggttcacgccattctcctgcctcagcctcccaagtagctgggattacaggcgcccgccaccacgcccggctaattttttgtatttttagtagagacagggtttccccatgttaggcaggatggtctcgatctcctgacctcgtgatccacccgcctcagcctcccaaagtgctgggattacaggcacgagccaccgcgcccggccaagttttgtatttttagtagagatggggtttcactatgttggccaggctggtctggaacttctgaccttgtgatcctcccacctcggcctcccaaagtgctgggattgtaggcatgaaccaccgcacctggccaagtgtgtgctcattgctactggaatgtctttgttctagattctttttttttttttttttttgagatggagtctcgctctgtcacctaggctggaatgcagtggtgcactctcagctaactgcaacccctgcctcccaggttcaagcaattcttctgccccagccttctaagtagctgggactataggtatgcaccaccatgcctggctaatttttaaatttttagtagagatggggttttgccatgttagccaggctagtctcgaactcctgacctcaagtgatctgcccacctcggccttccaaagtgctgggattataggtgtgagccaccttgcttctagattttctcagtagacaaggaaggatatatagacatactgtgtaaacatttttacatgtatccatctgtgtctatatcagctaaacatgagttcattctctcgtttgaccttttcgcattaccacatggatcattctagccttattccctggtttctctgtaacctcctcctccaacagtgagaaggctggcttctactgtccaccgtttgtttactattttctggtacattttaacctgatctacagtgttcagtctgatgaactttaacacacgttcgcactcatggggccctgacccagatcaagataattaaacatttccagcatccagagcgtcctctatccctctgattttgtttatagcctttgtcctcactttgtattttcttatttgttactctgctagaatgctggctgctgtattttttttttttttacattaaaaaaaatactttttgagacagagtcttgctctgttgcccaggctggagtgcagtggcttgaccttggctcgctgcaaccttcatttcccgggttcaagtgattctcctgcctcagcctcctgagtagctggggcatacgccgccacacccagctaattttttaatttttagtagagatgggttttcaccatgttggccaggctggtctcgaactcctgatctcaagtgatctgctcgcctcagcctcccaaagtggtgggattgtaggcgtgagccaccacgcctccggcctttttttttttttaagacatggaatctcactgtgttgcgcaggctgcagtgtagtgcagtggttattcacagttgccatcatagtacactatagcctctaactcctgggctcaggtgattctcttgcttcagcctcccgagtagctgggactgtaagtgcgcaccatggtttcaagttccctctttaagcacccctggaccaccattcttacttaccccaatgatttgagaggcaaggtgtcattgagatttaaaacacctggcttctggctgggtggcttatgcctgtaatcccagcactttgggaggccaagcactttgagaggcggatcatgaggtcaggagtttgagaccagcctggccaatatggtgaaacccagtgtccactaaaaatagaaaattagctgggtgtggtggcaggcacctgtaatctcagctactcaggaggctgaggcaggggaatcgctggaaaccaggaggcagaggttgcagggagctgagatcgtgcccctgcactccagcctgggtgacagagtgagactccgtctcaaaaaaaaacaaaaaccacctggcttctagagccagatttcctggttctgtcttgccccctttctagctgagttattccttgtggctaggtttccttttgtaaatggggatgataaagatagaaggttatggctaagatgaactttgctcacacagatagaatgctcagaatggttcttggggccgggtgtggtgcctcactcacgcctgtgatcccagcattttgggaagccgaggtgggcggatcatgaggtaaggagatcgagaccatcctggctaacatggtgaaaccccgtctctactaaaaatacaaaaaattagccaggcgtggtcgcgggtgcctgtagtcccagctactcaggaggctgaggcaggagaatggcgtgaacccgggaggcggagcttgcagtgagcagagattgcgccactgcactccagcctgggcgacagagtgagactccgtctcaaaaaagaatggttcttgggacagggtggctgctcaaaaatgttagctatgatttgcatcaacttagagacagtgaatttttattgctaggtctgtcaggtggtgagaatgactgttctgccatttcccccacttgcagcctctaggaagaaggtctggaggcagatgaggaaaccatgcccggaagaccccctgcttagagggggcacagtgaagaattgtgggccgggcactgtggctcatgcctgtaatcccagcactttgggaggccgaggcgggcggatcacaaggtcaggagatcgagaccattttggccaacacagtgaaaccccgtctctactaaaaatacaaaaaattagccgggcgtggaggtgggcgcctgtagtcctagctacttgggaggttgaggcaggaaaatggcatgaacctgggaggcagagcttgcagtgagccaagatcacgccactgcactccagcctgggtgacagagcgagactctgtctcacaaaaaaaaaaaaaaaaagaaataattgtgtagggttgcccagcaggcaggctcgggaccagataggaatttgcttctctccatctaggagtccagtgctttgcactgccctgcaagcttcctgtcctgttggcctctgtgacatttgaagaagccattctgcaggtgtttggaaggattttctcgggtgcttgggaattcttgctttggtagggaatcattgaggggaagggatcaccttgttttgagggagaactttccccaaggattctctggggtggttgtcgttatgtgaaactgagctctcgtgccccatagtgagtggcggtggtggtagcttctgtttccagagcacctttctgccggagccacttggcttaatattcaaagtcctggggttaagattggggttgctgaggttcccagagctgaagtctgcatggtgaaaatatgatgtctgtgaagctgaccgggatgaagccttatctcttgttcagtcccagtgatctcagcgtccgcagtgggatgatctccaggctcagtgaacatgtttttttttttcctccagcctgcttttcttgggaagtttagggactctgttcccctgtgacatgacccgggtcagggtccttcggttctgagcaggaaagggatggactgcaggtggtctgttggtgtgaagctgctcccactgcattggtgggaaggctggaggtccaggccactctcgggagtagagccagcccggagcctcctcagggacaatagcgcaaagtccatgtgcacgtctctggccagggaagggctaatatcctggacacctggacccaccaacgctgtccccactgggaaagagatgggtcctcaaaaggagataaggtgaccactctaccatcttatgaacctggcaacgtgtttttctctacttgcacttagaaaacaggtgctgagccgtcctcttcttgggaaacttagaaactctgacaataattggtgcagaattcctcagtcctattcctacatctagtccatgtgacctttcagtttctctaactgaatttcaatttttacgcccctctccccttgacacatactcacttattaactgagtaattcccaagccagtcattgccattatgccagccttggcatttagtagagcgttttagctctcaggagacaaagctttcgagctttcaagatgtcaggttgacatttgtgtccgagggtaatgatcctgctgaaagatgctcctacatcaatgggaagtgccatctcgatgccaggtgtgtttgcgtggctaatattttctgagtacttcatggcatgatatgcaaattacttcatttaattttcatactaattccatgatgtgggtgtgtcattcccattttacagttaaggaaactgaggctcagatgaattaaggaagtgtcaaagtagggatggaactagggtcaggttttatctttatttatttattaattatatagagggttattgccgtgttgcccaggctgctcttgaactcgtgggctcaagggatccacctacctcggctttccaaagtgctaggtttacaggcgtgagccaccactcccggccctttgatttattttattttattttatttatttatttttttgagacagagtctccctccatcacccaggctggagtgcctatctcggcttactgcagcctccgcctcctggattcaattgattctcgtgtctcagcctccggtgtagctggggttacaggcgcctgccaccacgcccggctaatttttgtatttttagtagagacagggtttcactgtgttggccaggctggtctcgaattcctgacctcaggtgatccacccgccttggcctcccaaagtgctgggattacaggcgtgagccaccgtgcctggctggccctttgatttttaaacctttttttttttttttgataagagtgtttaatgtccctagattttaaacctttgtacttaaccatgacctgtattccaagggttgcaagtcaaatgcctgaagggcccagcaggtagatcagtgattgtggctggcatctggggatgcagggggaaggggagctttggtgaatgggagagtgtgccaaagtggggagggtgcctccatctgattgctgaccagcaggaatatggctcatccgctgtggccagctgggattttcttttcccctgtaaaactgcctcatttagaaatgtggtctgtgtagactggcttctctaaagatcatgcgtgaacccaacaaaacgcatttccgggtcagaagaagccgagggctgtcattttgcattccctgtgcgagactggccaaggcacaattcattgcagaatttggcctcaccatgcgtgagtcagaacaagcgccttgaaggccagggatttgcagcctgagaaatgatgtactccgcgggttgaattcacgtctccatacaaaggctcccctgtttgggctgcttgcgtcttgatcctgccatgtgtgcgttttgtggtagtgcttgtggtgtgtggatgccagcctgccaaagctgaaaccatttttaaaaatgtctgtgtaatgtcaccggcacaagggaatgaacgacttggaaacacgcacagatgcagcggaagcccaggatattaaaatcttgaacagtatcattcttgctgagatttgctgggggtatggatgtgttttcagagacaggatgctagagaatgtacaattatagcaatttgctaaccagccccagaccttaattagcacaggatccttgttctcactgttgtatgtaaattaagactttcacaaagggattgtttatgaggacggctgtgagatagagaccttctgtcatttttcaaggaaactctttcagaaaatataaccacaaacacttttaaatcacagcgcgatgcagaagtgctgagaatttttctttcaaaaaatgagcatcagtatttttaaccgtattttggctcctctctatctctgacagcccaagaagtgccatccgtgtactgtgcagtggaaagaatttatttgtgagttagatgactaccagattgttcctctcctaacaaggtctaaaatatcccagaactctgaagatgtctgattatggttttgcaaatgagaaatcttctaccttctcttggccagcatcgtctctactgtgcatctgttcatggaatcctgtcggcagtgtctgtgcaatttagctttgtggttcactcatgcaaaccttgtgtttgccccatttttgaagcatgacccacgttatatgtttgtgtgactattattattctagaagactgtgatctaaaatcgaccgtttcaagcttagtttaaaaagaaccatctcttctttttcctctctaaatgcctgtagaataagcatatcagggctgaggccttttagagatctgggtactttttattgccttattaaagtcgtcattccttcattgttctctattgatagtggatcctttaccgatgacttgaggtgatcagtttggaaagaccaggtgtcatggctgtgggggggtgagggtgagtggaatgataataagcccccttcaacttcctgtgactcccctcacctatcctgggctttcctgggaacctagagatccagcgctttatagacttaaaaaaaaaatacctttattgacatataattcacataccatacaattctcctttttttttgtttgtttgtttgagacagggtctctctctgtcgcccaagctggagtgcagtgggacgatctcggctcactgcagctttgatttcctggctcaagcagtcctcccactgcagcctcccgagtagctgggactacaggtgtgcactaccacccctggctaatgtttatatttttttgtagagatgaggtttcactatgttgcccaggctggtcttgaactcctgggctcaagcgatcctcctgtcttggcctcccaaagtgctgggattgctggtgtgagccaccactcctgggcccagttctccatttaaagtgaatagtttgatggtttttaatatattttcacggagaccgggtgtggtggctgacgcctgtaatcccagcactttgggaggccgaggcgggtggatcacctgaggtcaggagttccgaccagcctggccaacatggtgaaaccctgtctccactaaaaatacaaaaaattagctgagtgtggtggcgtgtgcctgtaatcccagctactcagcaggctgaggcgggagaattgcttgaacgtgggacgtggaggttgcagtgagccaagatcgtgccactgtactccagcccgggtgacagagcaagactgcctaaaatatatatatatatatatatatttttttttttcacagagttgtgcagccaacagcacaatcagttgtagattttcatcacccccaataagaaacttcatactcattagcagtcacttcccattcccccgttacccctgtgcctggcaagtaccagtctactttctgtgcctgtggatttgcttatgctagacatttcatataaatggaatcatacagtatgtgaccttttggtctgagttcgttcacttagaataatgttttcaaggctcatccacattcttgtagcatagatcatcagtacagacagttcctgacttatagtggtgcggaagtgacagttcagtacaaacagtacttggcattttggatttttgatcttttctctggctagcatcagtatgagactctcttggggtgccaggcacctcccagtcagccacatgatcacgagggtaaacaaacaatctatacgaccattctgttttcactttcattatggtattccataaattacatgagagagtcaacactattatacaataggcttcgcattagatgattttgcctaactctaagtgttctgagcacatttaaggtaggctaggctaagctatgatgttccctaggttatgtatattcgatgcttatttatttatttattcatttattcattcctccctccttccctttcttaatttccttttttttcttttttttttgagatggagtctcactttgtcacccaggctggagtgcagtggcactatctcagctcactgcacccctctgcttcctggttcaagcgattctcctgcctcagcctcctgagtagctgggactagaggtgagcaccatcacgcccagctaatgttttttttttttttttttttttttttttttttgagacggagtctcgctctgtcaccaggctggagtgcagtggcactatctcgtgtcactgcaacctttgcctcccaggttcaagcgattctcctgccttagtctcccgaggagctgggactacaggcatgtgccaccacgcccagctaatttttgtatgtttagtagagacgaggtttcaccatgttggccaggatggtctcaatctcttgatgtgatccacctgcctcggcctcccaaagtgttgggattacagatgagagccactgtgccctgccatgtatttttagtagagacggggtttcacctgttggccaggctggtcttgaactcctgacctcaagtgatctgcctccctcagtctctcaaagtgctgcctgccttactttctgatggggtctcacgatgttgcccaggctggagtgcaatggtgtcctcaagggatcctctggtgtagctgggactacaggagtgtaccactatgtctggcttaaatgcatttgtgtttttttatctctctctctctcatatatatatgttttgtagacccaggggtctcactgtgttgcctaggctggtctggaactcttgggctcaagtgatcctctggccttagtctcctgaagtgttgggattacaggcatgagccactgtgtgtgacctcatttttgacttctggtacttacattttatgggtttatcatctgtaactccatcgtgagttgaggagggtctgtagttcatttccttttatgactgaataatgctgcattggatggatatgctacactttgtttatctatgtatgtgttgatggacgtttgagttgtgtccactttctggctagtagggataatgctgcggtgagtgttcatgtctgagtttttgtgcagacacgacacatcatttctcttgggtatagatttaggagtgaaattgtggggtcatagggtaactattaaccttttgaagaatatacacatttaaattttttgtgttgtctttatttatttttttgagataggggcttgctctgttccccagacgggagtgcagtggcatgatcctcgctcactgcagccatgaacttctgggctcaagcaatcctcccatctcagcctcttgagtagctgggactacctgtacatgccaccatgcctgactaattctttaattttttgtagcgacagagtcttgctatgttgcccaggctggtctccaactcatgggctcaagtgatcctcctgccttggcctgccaacgtactgggattataggtgtgatccaccatgcttggagtcacagacttttaaaggcacttgtctcccctctctgctgtcttgacccccacatctttcctactagcaactgctgtatttctgtcctcttcttcaaagccaaacttattttttttttgagattgagtctcactatattgcccaggctggagtgcagtggcacaattttggctcactacaacctctgcctcccgggttcaaatgattctcatgtctcagcctcctgagtagctgggattataggcgcacgtcaccatgctcggctaatttttgtatttttagtagagacggggtttcaccatgttggtcaggctggtcttgaactcctgacctcgtgatccgcctgcctcagccttccaaagtgtattttttacactttttgtatttttagtagagacggggtttcaccatgttggtcaggctggtcttgaactcctgacctcatgatctgcctgcctcagccttccaaagtgctgggattacaggcgtgagccaccgcgtccagcaagccaaacttcttagaagcgtctgtattcctgtctttgtcctgcaagctccaatgtggcttccaccctgaccttccacattcacatccccactgagcttcctggagactctgtgttgccttttccaggggaggttttccatcctcatctgctgcgctgtctctgcagtactggagatgctgattattcttgtggacactctctcttcctttgccttctttgccaccgcagtgctgattttccttctgtttccctggcaccttctcctcctctctctggccattaaatgctggagttgctgaaagcttggccctgtccttgtctcgcctagcacgttccttctctgggtgatcttacccacatctggagctttatgactcagacatttatgtttccaacctagattgcttctgagtcatggtgcagagggtcagctgcctacctgacctccctgcctgttcatgggcgtctcaaactcaagatgtccatgagagattttacatcttcacccccagagatatggactcattccccattcttctgttctttgcccttttgtgtcattttcttacaatatcgtatcctaaatgtcactccacttcaaccagcctatcaccattgaactacagtggcctcgtagttgttctcactatctctatctgccgcaccctcccagtcttttgaaaggaacatcttcctggctatcccttcctactttaaactcttaagtgtttcctccttggcttttagattcataattgcaaaaccctcctgtgctggcctctgcccatcttgctagtctctgttctctctgtgttccattctctccgtgttccgttctctctgtgttccacttctctccgtgttccacttctctcttctccagccacactgactgtgcagatccatcaaagcctcagggcctttgcccataccttgaaggtcccctccttgccttcctctccttactccccatcaattttaaggctcaaaatgaggatgagttctgccttttgtttttgctcatcctgttttactaccaccttgcctgctgctggtgagcgtataataaatatttttttgaatgaacaaatgatttagctctatcagatgggtagaacttctatcctagagactgaagtaaaagcagcctttcggcgagagaggatggctttgttttcagcattaatccagtgcctggagattattacccagctcaagtgtctgttctctgcaaagcgactggtggcctgtcttccttttccctctagggacatagtactctttgaaatggccctttccccctggtttctttgctttctgacatattagtataacttctaatgggcgccttctaaaacacaagtcagattgtcccactctcctttaaatttgcagtggctccttaagaacacagccttaagggcatggtgtctcacgcctgtaatcccagcattttgggaggctgaggcaggaggatagcttaagcccaggagttcaagaccagcctgggcaaagtggcaagacccacccgttcctacaaaaaaaaaaaaaaaaaaaagcaaaaaacccaggcatggtggcttgtctctgcagacccagctacttgggaggctgaggtgggaggatatcttgagcccagaaggtggagcctgcagtgagctatgatcttgccactgcactgcaggggtcctgcagcatctgtctttcctggacagactgcacggccttgtgagagtcctgtgatgtgcaccttgctgagacacacttggcattgccttccagactgaccttcgtgaggaccatcctcactgtgtccatggagacccaagccctctcttggcctgaaccctttatttacagtctcccacagagaagttcttttaggttccaaagtcaaaaatcactcttcaaagtaccttaaattgcccacgaaagtattcagctttgatcagaaattcgtatgcatactaaagagttaacaattgccaggctagactaaaggagtgaaaggtgaatccatattcacatttccctgcatccggtgccttgaattcaactactcagtccctagaggcaaattgggatgggtggatgattgtgcagtgtcctgcttgcttgccaggcatgcttctttgtcttaatattaagcttctgcagctgtgctgtccaacacagtcgccactagctgtacgtggctctttaaatttacattaacaagccaggcgtggtggctcacgcctgtaatcccagcactttgggagggcaaggtgggtggatcacctgaggttgggagtttgagaccagcctgaccaacatggagaaaccccgcctctactaaaaatacagaattagccaggcatggtggtgcatgcctgtaatcccagctactcaggaggatgaggctggagaatcgcttgaactcgggaggaggaggttgcggtgagctgagatcacgccattgcactccagcctgggcaataagagcaaaactccatctccaaaaaaaaaaattagatttacaaaataaaattcattcctcagctgccctggccacgtgtcaagtgtctgacagccacaggtgattagaggctgctgttattagacagcactgatagagaacagatcgagaacattgccatcattcgagcaagcttgattggatcacactgttccgtagccttagtagattaatggatttgttgtgcatgctgtgctgaatgctgtaggtgaagctatgtcgccaggggacacagcactgaacatgttccatgcatgattattgagttttaagttttgcttggtcattgcctcctgagcttgcctattctttgaaaagttgtgcagagaacacagtcctctttctatctttgcaagttggtgtgttttgttcaggccctgctgaattccctttttgccaggccccttggcacctaggcctgactggggtaaagttccacaggatatgccagggagctgggcggtcctccctccagccttcaacatgctttaccgtaattatgcatttacctgtgtgtctcttctagactgatagaccaaataactctcacctctttagactaacaagggactggcatttcatggtagttgcccattaaatgttttgtgaatgaaggatctcttccaagaactggaaactaacttggccaggcacggtggctcatgcctggaatcccagcactttgggaggccagtgcattacctgaggtcaggagttcaagaccagcctggccaagatggtgaaaccctgtctctactaaaaatacaaaaattagctgggtgtggtggcacgcgcctgtaatcccagctactcgggaggctgaggcaggagaatcgcttgaacctgggaggcagaggttgtagtgagctgagatcatgccactgcactccagcttggacaacagactctgtctcgaaaaaaaaaagaattaactttttgtggggtggcagaggggttaaggtttattggattttcctttcaaatgataaaaatcagtgtatctccttgacaacaagccaaagtatacaaagaaaaagctaaaaatcttctcctgccaggtaaccagtgataacagtttggtatgtttttgtctataccaccctctccatgcttataaaaatgtcaaaaaacttatgcaatacctataatggggttgaactttctaggacctggccatcctagcaaaacatcccttgtctctgatccctctctttaccttattatccttctctgcttcccctgtcctgttacaccctttaagggcctttcaagtttagatttaatgatctagggtagtcatggtagctcatgcctgtagtcccagcattttgggaggccaaggcaggagacttactggagcccgggagttcaagaccagcctgggcaacatagtgagacctcatctctgaaataaaaaaaaattgctgagcttggtggcatgcacctgtagcctcagctacgtgggaggctgaggccggaggatcacttgagcccaggaggtcaaggctgcagtgagctgtgattgcaccactgcactccaggctgggcgacggagcaagacctgtttctggaaaaacaaacaaaaaaacaataagttatagatttaattatctgaaagttaagaataatggagacctcggcaaacagggattctggagttctacccaaagtgggcaggcgggaggattgttccatgtgggaatagggggccctatgtggagggatcttgtgattttcttttctttcctttttgagtcttactctgccgcgcaggctgaagtgcagtggcacaaactctgctcagtgcaatctttgcctcctgggttcaagcaattctcctgcctcagcctcccaagtagctggaactacaggtgtgtgccaccacgcctggctaatatttttgtatttttagtagaggcagggtttcatcatgttggccaggctgctctgaaacccctgacttcaaacgatctgcctgccttggcctcccaaagtgctgggattacaggtgtgagccaccgcacctggcctattttttctttaaccccttgtttcatctgtgaatgaccttattttaaaagagaagctagagcttctctttaaaggcggtggctcacgtctgtaatcccagcactttgggaggctgaggtgggcggtcgggagttggagaccagcctggccaacatggtgaaaccccatctctactaaaaatacaaaattagccaggcgtggtggtgcatgcctgtaattccagctactagggaggctgactggtttcctggccactgattgctccttttccagatcactggttcaccgcatcagctgtaagtagtgctctcttcctaataaggctgacctggttttgcgcaccacctccttaatgaccctcccgtaactccccatccccagacttcaagtttgggtacagtcacttcaaaccaggttgctatttcttgacttgggaccagatacagtagcagttgataagagccgagggactgtgttgtaagacaaatatttatcttgaaaatctagacccgtcttatgcctggtgtgatgctgacactctgagaagctcgagggaactagatggagacaggaaggagcagactgaatatctcttgactcatttccatgggatgcagggaagatgaacttgaaaaataattttttgcttttcccagtcgaagctgagcctgtctgcacatagatcagtacctgtatctgatccctgcttctcatagcaggggcagacttggagaacccagagggagactgaggatctacggaggttttggaaaaagagatcctcagactcagacgtataagaaaaagggcccagaaccaagactgaagatttggttaaatggccatctcagtggcgggtctcctagaagggaatatgttttccctggagaaagtcatgcctcttttatttttattttttgaactgctaaataattctgaaacaatagctctcctcaagaataactgggaggccgggcatggtggctcacgcctggaatcccagctctttgggaggccgaggcgggtggatcacctgaggtcaggagttcgagaccagcctgggcaacgtggtgaaaccccatctctactaaaaaatacaaaaactagctggtgggctggatgtggtggctcatgcctgtaatcccatcactttgggaggccgaggcaggcggatcacgaggtcaggagttcaagaccagcctggccaacatggtgaaaccctgtctctactaagaaatacaaagaattagccgggcgtggtagcgggcacctgtaatcccagctactcaagaggctgaggcaggagaattgcttgaacttgggaggcagaggtttcagtgagctgagactgcaccattgcactccagcctgagccacatgcaatactccatctcaaaaaaataaatagataaataaataaaataaaataaaattagctgggtgtggtggcatgtgcctgtaatcccagttactcaggaggctgaggcaggagaattgcttgaatcaggaggtggagattgtgccattgcactccagcctgggcaacaagaacgaaactctgtctcagaaaaaaaaaacaaaacaaaatggaaaaagaataattgagagaatgagtaaattggttgtcttagaaaaacctcctgagatatccccctttgatttttcagtaattgcatttagctgaatggccccatcccattcaagttataaatctttacttactcccctgcttttgggggaaatgggttctttaggcaagagaatggctgagtacctgttgaaaggagaatgtcctgttctggggtccctttcagaggccgacgtgaccaggctcccatttgtgtaatcttccctgttgacttcgctaccctgctgccttcctgatttgctggaagaaattcttagactggggaagaaaaactggagtttgctgagtcaggttggctggcccacctgtacagggctttgttaaccctgtacagtcgctcagttagtcggtctgatatgtactttggggtacttccgagccaggccatgtacctggcactgggctacagcaaagaaggatggacaagctgagattgagctcacactctggagggagagacacaataaaccagtgaaccagcagaagaggaaaataatttttgataattttcaactatgggccaggtgtggtggctcacgcttgtaattgcagtactttgggaggccgaggtgggtgaatcacctgaggtcaggagtttgagagcagcctggcaaacatggtgaaaccccgtctctaccaaaaatacaaaaattagctgggcgtggtggcgcacgcctgtagtcccagctactcgagaggctgaggcaggagaatggcttgaacccaggaggtggaagttgcagtgagccaaggtcacaccattgtactccagcttgggcaacagagcgagactcctcaaaaaataaaaaataaaaaataattttcacctatatatgactgtaatgaagggaaaaaaataacttcaggattatataataaggagtctggaggctggaggctggggtggtcagagaaggcctctctagggcagtgagccaaaagatgaagtggcagctatggagaggactgggcacagaacattatagatgaaggggccagccgcatgcgaaggagcttgtctaaggagctgaaaggaggccattggggttggagctgagtgaatgaaggagagaaggtgggcaggatcaggtcaccaggggcactgcaggtcttcataagaccttaggtgtctacagtaagctctttgagggttttaagcagggagtgcactatcttattgaggtttttatttacttttttattttttgagacagagcttcttgttgcccaggctggagtgcagtggctcgatctcggctcactacagcctccgcctcccaggttcaagcgattctcctgcctcagcctcccgagtaggtgggattacaggcacccgccaccatgcctggctaattttttgtattttttagtagagatggggttttaccatgttggcctggctggtctcgaactcctgacttcaggtgatccacctgccttggcctcccaaagtgctgggattacagacgtgagacaccacgaccggtaaaggtttggcattctttttttttttttttttttgagacagagtctcgctctggcgcccaggttggagtgcaatggcatgatctcggcttatggcaacctccgcctcccgggttcaagtgattctcctgccttagccccccgagcagctgggattacaggcgtcctccaccaccacacccagctaatttttgtatttgtagtggagacaggttttcaccatgttggccaggatggtctcgatctcttgactttgtgatccatcagcctcggcctcccaaagtgctgggattacaggcgtgagccaccacgcccggccaggtttggcattcttaataacacttggcagatgactaggactctgaggctcagagaggtgaagtaacctgttgggacacacagccatgtgagccaggaccagctctctccctagcttgatgagcctcatttgagtggagaggggagtgcagttggaggagtcctgggggaaggtcagtggaggtggggtggggctgggattgtgggccatctggagaattctgctttgattttcaaggaagttctgagccctggagggattttgagcctggcttccttgagctcctgacagcctgagggggtttattgtgaatatttgtgtttctcatcagtgaaccctttttaaaaacaggcttggaagaggtagtctggtgaaggtacagaaagatttgggggccaggtgcaacagctcatgcctgtagtcctagtactttgagaggctgaggtgggaggatcacttgaccccagaagtttgagactaggagatcccatcgctacgaaaaataaaaaattaagtggtcatggtattgcacaccgtggtgttagctacttgggagcctgaggtgggaggatcgcttgaacctgggaggttgaggctgcagtgagccatgactgtgccactgtcctgcagcctggctgacagagtgagtccctgtctcccccaaaaaagagaaaagttgggggaaatgagtttgaaatttctcggttattgcctttttctgtgccctggccccctcttccccccaggagaataatggtaataaagtatggtgctttgatgtgccagatgcctttcattcactttgtatgcattatcttatttaatcctcacaacccttttgggaagagcctaatagttccaactgaatgactgagtcacagagaggctaagaaacttgcccaaggtcacacagctggcaggtgccagcacctggattcagacctagtagtctggctccagagcccacacactgaacgacaatgctgtgttgacgttggccaatgccaagcatgccctttgtgatggagaattaccaggtggcactcacaagcctaggagagacagttgacctgtacagtgaagggctttagagtggaactcaaccgtgatggaggtggggcgtgctgtgtcgatctgcttgtcttgaagcatataaatgactttgcctctctgagcctcacctataaaatgggtacagaaataccatcctggctgggtgtggtggctcacgcctgtaatcccagcactttgggaggccgaggcaggtggatcacgaggtcaggagatcgagaccatcctggccaacatagtgaaaatgggtgtggtggtacgtgcctgtagtcccagctacttgggagactgaggcaggggaatcacttgaacccaggaggcggaggtcgcagtgagccaagatcgcgccactgcactccagcctggagacagagtgagattctgtgctgaaaaaaaaaaaaaaaaaaaagaaatgccatcccaacctcttgggattcttgggacagtttgtagcttctcagtaaacaatagctgtgaaccacatgaaacccttctgcaaaggaaatagaggaatatttccctgtctatcctcacacctgctaggtgtgttcacaaactcctgatatttttcctgttcagtggtttgtccatctgtaatcagtttctcaatcattctgtacttaatagccgctttaccatgggcctggttttctctgggctttcattaccttatcaatgaaacagggaggctgggtgaggtgggtcacatctgtaatcccagcactttgggcggctgaggcagagggattgcttgagccctggagtttgagaccagtctgggcaacatggcgagaccccttctctacaaaaaatacaaaaattagccaggcatggtggcctgtgcctgtagtcctagctacttgggaggctgagacaggaggatctcctgagcctgggaggctgaggttgcaatgagcccagattgtgccactgcactccagcctaggtgacagagtgagactctgtttcaaaaaaaaaaaaaaaaaaaaaagggcggcgagttttaaataaatcgatatttgtatttctaacaatgcctcccagatagtaactgctcaataaaaggtagctgttacaactgtgtttctagctgtccttccatcagggcagaggccttcctgggacagttttcctgatagcccagatatctagttgttgcctagtgactatttgttgactgactggtcccattattttctttgaagtctgaagtcagggccaccaggtgaaacatcaggaatcattttccttcttaatgaatacatgcacctctgtgggtggtgtgtttacacatggtgagacctgcctggtagctcactgaagtttctttctaccaggatttctcagccttggcactgtggactttgggcctgatcattctttgtcttagggctgtcctgtgcattgtagaatgtttagcaacatccctcacctctacccagtagatgcctgtcgcaactccttttcctgcccagttgtgacaaccaaaaatgtccccagacattgccagatgtcccctgggtgtgctgatactgctttccactcttctaaacacctgagccccgtaaaagtgtttgtttgatgatgggggcgtgtactgagctcctgctgtatgccgggtacaagggatacagacgtgatccctggctgggcagtgcccaggatgcagtgagtgttccataaatattgtcattatcacccagtttccccaaagccattaataaataccttcgttaaatatgtaaacatgatcagaaataattcagaggagtccagcgtttactgggtttcctgggtgttcctccatgtctctgcaaacccagaagcctcagagaacaaacttttaccctggttctatttctggtctcctttcacttggattttggaccatgcccgtctatgcagacgggattccatctttattccattttatggctgcatcatgatgtttcacatatgggcatcaatgttggttcctgtctgacttttctacaaagccctgttgcagtggctaccccgtctatccttctgtgcacccatgagccctgtagacaataggacatgttcttagaatcaccccactactatctgagtgatgttaagcatctttatttatttatttttgagatggcatcttgctctgtcaccccggctggagtgcaatggcgtgatctcgactcactgcactccagcctcctggggtcaagcgattctcctgcctcagcttccccagtaggagtagctggtaccacaggtgtgtgccaccacacccggctaatttttgtatttttaatagagacaggatttcgccatgttggccaggctggtctcgaactcctgacctcaggtgatccgcccgccttggcctcccaacgtgttgggattacaggcgtgagccaccatgcacagccgcagcatctttacgtggtggctggccagggtaatttgggtgacatgttgggtctgaactcttcgctccccaaaggaatgtgacaaggtgactgtggagggcctgtcccttcgtacctggcgtttcagtagagaattttgccttctttaggtggcttttagagataccatccagggcagatggggaccttggttggttagcagtggcgcctcttccttcatctgccccctttctgaagctaatttccctttgcttctcccaacccacttctgtgcttcaaatgctgccagcacagaactgtctttttgtttctgaattgccctctgacgccgcgattccccattgcagtttggaagccactaccaccggagatttccagaacccaagccaggcaggggctggataaatagtgccaacgggtgtcagccaccagaaccagctcctcagccagccacaatgtaaaggccagaggcaaccggtttctccacattctttgtggtgttccggtcgagtttgaagggcctcatgtacacatgttggagggagcctttggggcctgggcctgctgagggggtgggtgggtggtgggcagtgcgttctcacagggagtcggatcctgcctcagtaaaattggaaagaacttggcattcttgatccaggaaattcctgttgcgatgttgtcgtttttccagagggcctcatcccagctggggaggagaaagggccgcggttgctattgcctctagttgttgagggctaaacactgaattcaattgtaaatcagcctcttttctgtagattgaagcaatttctgtcctgccaggcgagtttggaagttcgccttttacatatgaatgtgccctttaatcaccacttctgcattattgagagaagggtggaggaggctgtgtctagtgggaaaggattatacctcaagtataaaagatgggttttctcatttctaggagaggggcatcagaactggagaatctgaaacaattactaaaaatgttaaaaacaacttcaaaatgcaaaccacagctgtttccctccccccaggctcccttctgatattgtcacctcggccagcagaacaactgcagttcctcgtatttattcacaatcccacgaaatcaatggctcttcggtgcactgcaccggagactttcagctcagccgagctgctgttgagggtgataaattataggcgaaagcccggggacatgaaggcaagtcgctgggtttcagactgcctgattgcaaagaggtgacagtgtccttgccccgccgggcgacctaatgcgtacaagaccggggctggcctggtaagtggtgactcttagcctgttctctttgcttcttcctcctccccctgggagaggccgctgaggatccggaagcaggaatgtctgctgtgggtgagcctctgttctcttttgaacaagagaggctaggccctctgagcagccgcactttctcaatggcaggtaagtgcctcctcttggcgttccctgcccctcgcatgttctgcctccgaggtacttgatgttcctggtgaaatgccattttccccaagttgagagtgacctttcattccacagcctcatttccattccagccctccctatcccggctctggatgagaagttcctgttgatttgcagagattctttataagcacagttcaggccagtgcagtcctctggaggagagggctcagcccggcagctctggcaggcccaagtcagccagggtgcagaccggtcctcgagtttctgtgggtctaagagacggtcagcgttggaggaaataatcatttgctaatgcgagcggttttcatttacaagttcctcctggcttaggcattctctgctgcgaggacaattttgcttcctccccacccccaacctttgctcctgatttcttacttctatgctctgccaggaggaaattccggacttttgtctctttatgatgtaattactggttggggagggccccaaatattcctggggaagggaggcctgtttgggtacctgctctgtgtctttgggaaacgctttgaagtgattaaccatgctctgctttgctgcttctgggggagcagcagtgtgtggtcatgtttgaagtaggccaaggggaggactggtgattacgaaaagggctgtagagcaggcctctgcttctgaccctgccttcacagttactgggggaaacctggcattttcagtctgattgaaatgcagaaatcctgtcctgggctgattctggtctccagtctacacaggccggtgttttccatagctttgaacttgtggaattgatttaacatgctccttccagaaagcaagctgtgtttttggagtggggggcggtagtcggggaggaggtggaagagaagcaagaaaaggaggaagagtgattggttaaaaaaaatacagttacccattagttaccattgaataggtgcttactatttgccaggtattatactaagagctttacgtgaattaactcattgacttcttcgataactttacaaggtaccacttgtaaagtggtaaactctctgaggcacagagaggttaagttgcctttttacggtcacactgcaggggagagcacagccaggttctgcatgcattttgacgccagaaagctgattccccaccactgtggcatcctgcctctctgtcgtttgcaacctggcccatgagagcatatgccttgacctatgtgtcctggtttgcccgggacccagctaagcacatggttggttgccctactcctgtggcctgtcatgcctgtctcagcctgtggaccaagcttctcttttcgttcaggccccagcaggcttgctgtcgacatcattaaggaaattaaacacccacaaaaacacaagaagctcccggcctttcagctgcggccctttcccttgagggaggagacaattccctgtaatggtgtgtcatttcctagcccctggagaacggcatgtgctgtgactcaggcaccggatgtgggggcaggagtggggtggagggcgggtacctgatgtggcctgctggggaggcctagccttgatggaggctggaaaaggggaggtgagttggccctggagcccccagcctatttcagggactgatgccactgtttggaaattgggaggtgaatgtgctttctggggactgcctttgagagaacggtgtcatcagtgaatgacacgactttccaccttttcccagttcctgaaactgtttgttggaccttctctgtccctatacttccatctgcagtttaggggaaaaaaggcaaaatgagagtgtgctcttaaatcatagaccctaaattagggagtcctcttgctacagggctgaggatgaggccctcctggtacaaggccatgtggtacagagattagaagctggccctcggagtcccactgcctgggttgaaatcccagtactgctctggccctcggagcctcactgcctgggttcaaatcccagcactgctccttggtagctttgtgatctcaggcaggtgacttagtggggactacaggaaatgcattttgaacattgcctagaatatcacatataataaaagaaactcttagctttctttctttttttttttttttgagagcgagtcttgctctgtcacccaggctggagtgcagtggtgcgatcttggctcaccacaacctccacctccctggttcaagcaattttcctgcctcagcctcccaagtagctgggattacaggcgcacaccaccactcctggctaatttttttgtatttttagtagagatggggtttcaccatgttggccagactggttttgaactcctgacctcaggcaatctgcctgcctcggcctcccaaagtgctgggattatgggtgtgagccaccacacctggccgaaactcttagctcttcatactcttggctcaggaaagctatgagcctgtgttatcttgaattaagatgccccttaaatcaaaagacatccaggaagtgctgagctccaggatgatttctggtggatcacaggcttgggaaggatctcctcatatgcttggttccttttttttttttttttgagacaaagtctcgttctgttgcccaggctggagtacaatggcatgatctcggcttactgcaacctccgcctcctgggttcaagcaattttcctgcctcagcctcctgagtagctgggattataggtgctcaccatcacattcagctaatttttgtatttttagtagagacggggtttcaccatgttggtcaggctggtctcgaactcctgaccttgtgatctgcccaccttggcctcccaaagtgctgggattacaggcgtgagccaccgtgcccggcctcatgcctggttcttaatacccagtagaccttcccatattgttacaatttcagcaaaatgtcacaaggagaggaaaattctgctgctttccgctccatgccaagctgttttcctgagtcactgctctgtcctctccataaggctgcattcctccctcacccacgttaactcattcagaaccactcatttttgggggatgggtgagaggcagagggttgtgagtgagccagccgggcggggtcacaggtcctactccctcagaaaaggcagcagaaaagtctttcagatccagggtgaaccagtggttcagtcgacagtggctgtttgtcattgttcaaagtttatagatgaaatgcactgggcaatacatccttgtcagaattaaatcattaaagaagaaaaaattgactcagctttctggaaagggtccttatggagcctgggtaccacggctacagtcaggtgtacacccaccagtccatcatcaccagaggcccagcccccactggagtggggggcatttaagtaataatgcccccctgctgtctcatccctccgaaggataccgaatccagcaggcatttcctaattcttctccctacaacccttcattgaaatctcctgctgttgactgatgtgtctgttgtttggaacctatcaaatttcgaccccttggatacagtcactgaactctcatcaactccagggggaattggtgtttgtaacagcaaacagaattggggtttttatgttttgctgaaactagaaggtttggaatactctcaggtgtgggcatgcttgggctaggacccacctccccctacctcttgctgagcagaacctcagtttccccctttgtttcctggtgggcttgggtgatagtcccttgccaactctaaatcgcttacaagtatattactgtctagtgattttttttcccactttctcattaaattaagtaatgttgaagagggacttttaacatcctctgggggccctgaagtttttaatcattggagctgaggacacctttgcaaaggtgaaggaagctatgactccatgtccctagaaattgcactcctgtatacagtgatggcctgttcaagggtccctggagcactgtctggtctttaaacaagaacttctagtctagtccctttctcccggctcttcccattttgcaggtgaggccctgaggccctgagaggtggagacttgcctggggttgtttcctgtttagcctcattctccagcctgactcccttgcttagcttctatcctgagtcctgaaccaacccctcaaataatgtctggaagtagaggccattggctctggctcgccagtgtggaacaggattgtgtagagttgagaactcagaccccatctcctaaacacatacacataccctagcgttcctcaaactagtgtacctcccagtcttcgggaggacttattaaaacagattgctgggccctaccccagagtttctgattctgtagatctggggtggggcctgataatttgcattctttttgttttgttttgtttttaaagatggagtctctctctttcgcccaggctggagtgcagtggtgcaatcttggctcactgcaacctctgcctcctggcgccaagtgattctcccgcttcagcctccctagtagttgggactactggagcgtaccaccacacctggctgatttttgtatttttagtagagacaggattttaccatcttggccagtctggtctcgaactcctgacctcaagcgatctgctaacctcagcctcccaaggtgctgggattacaggcgtgagccaccgcacctggccaattttctttattttcgtaacgtcatccagtcacatgataaataagtacacaagggtatagagtggaaaataatccttccctggactccccttccctggactccctgcaggcacccctcccaaggcaaccagtagtccccaagtcgagctttgttgtacttttgtgttcatccaggaatattctaggtttatgcaaacattgatgtgtatattaaatctttttttgggaggaatattggtccattaatggtgctagatacactttatttattattaatttttttgagacggagtcttgctctgttgcccaggctggagtgcagtcgtgcgatctcagctcactgcaacccctgcctcctgggctcaatcgattctcctgcctcagcctcccaagtagctgggactataggcacgtgccaccacacccagctagttttttgtatttttagtagagatgaggtttcaccatgttggccagtctggtctcgaactcctgacctcagatgattcgcttgcctcggcctcccaaagtgctgagattacaggtgtgagccaccgtccccagcctaattattattattattatttttttgagatggagtctcacccctctgttgcccaggttggagtgcagtggtgcgatcttggctcactgcaagctccgcctcccaggttcacgccattctcctgcctcagcctcccgagtagctgggactacaggcgcccgccaccacgcccggctaattttttgtatttttggtagagacggggtttcaccatgttagccaggatggtctcgatctcctgactttgtaatccgcccgccttggcctcccaaagtgctgggattacaggcgtgagccactgcgcccggcctccagcctaatttttatattttttgtagatgcggggtttcaccatgttgcccaggtgtttttagatctttttaaagaacttaaaaatttttataattaaatttttttttttttttttcagagacagtgtctctccttttcacccaggctccgacgtgatcatagttcacaataccctcaaactcctgggctcaagcaatccttccccctcggcctctcaaagtgctgggattacaggtgtgaacactgtgtccggccatgtgactgtaatgtattcttagagcagtcctctgtttgcagacgtttgtttcaagtgctttgggtacagcccacagtgctgcagtgcagtcatcttgcctttgctccttttccactatgtttgtagaatgtgtttctagaggagattgttgggtcaaaggccaagtggagaaaaagttttcaggaacagtggcgagagtcgggtgaggacccatgtgggagggaggggaggtttctctgggggaatgtgctcaccccgggctgcacctctctctcttttttttttttttttttgagacggagtctcgctctgtcgcccagactggagtgcagcggtgtgatctcggctcacagcaacctctgactccagggttcaagtgattatcctgccccagcctcccaagtagctgggattatgggtgtgcgctaccatgcctagctaatttttgtgtttttagtacaaaagtacggggtttcaccatgttggctaggctgacctctttgtctctttcgtgagttttcccactaactagctgctgtgtgcctttggtccagcgctttgggctctctgggccgcccttttgatgtctgtggtttgatctctggactctcaggtctgttcaccctcaaggtacctgttgttagcatttaatttccactcatgactgggtctccacgcagccccctgaatatttgttcaggattgtccagaagcttgcatggtgaggctggagagttccatcctgtagattgggttttgggaaagtgttcattgtcttcctttgtgaatctgctggaagatactttgccttttcatgaaagtcaaccactaggaggccttgcgtggaccacgttggatgctgttaatctgctgtcagtgaccctcctacagacagggagacagatgcaccatgcagcctacatgctgagtggtaaaactggggcaggagcatctttggtaattgacatcttcgcagatttcacatcccatcccaccccatcccccctatggtcttggcacagctcacccctcttgtggtatttgtagctttcgttcctcaggatgtcaggtacaccaggctgtgtcattacatcgtccctaagttaagaagaccaccattgggcatggagtggattcaagtccttggaggtgaagattgaatggatggtagtggaagtgtacctgtgtttatgtatttttattattatttttgagacagagtctcacttttgtcacccaggcttgagtgcagtggtgtgatctcggctcactacaacctctgcctcctgggttcaagcgattctcctgcctcagtctcccaagtagctgggattacaggtgtgtgccaccacacccagctaattgtttttgtatttttagtagagacggggttttaccttattggccaggctggtcttgatctcatgacctcccgccattgttcgtgaaaactttttctccacttggcctttgacccaacaatctcctctagaaacacattctacaaatacagtggaaaaggagcaaaggcaagatgactgcattgcagcactgtgggctgtacccaaagcacttgaaacagacgtctgcaaacagaggactggttttaccatgttggcccagctggtcttgatctcgttaacatggttttaccatgttggccaggctggtcttgatcttgtgacctcaggtgatccgcctgcctcggcctcccaaggtgctggggtttataggtgtgagccaccgtgcctggctgaagtgtacatgtgtttaaatgagatgctgaaagatgaaaagaaggggtgcatgaacaagagtggggctggtgagaatccacaaggatgtaatttgtattgatctttttggaggagggtctcaaacacgaggcccagaggcggtgggagcacgggaacttcccggtgggtggggtgtgttctttccacacaattacagttcatagcctattaaacacgaataaatgatgttgttttccacaaaggagaatgtatgccttcatttccttgaagtatggccttcctggtctatcttctttggtttcctgcttttgcaatcaggcatgggcatggacaagtcgtatttctttggggtaagaacaatactggtccctgtgtgatgactgttggcaggttggcctcggtctcatcagcagggacgtagtggggaagagtggcgattgcacatgtttccatctaaaagtggggtagctgttactcagctgtatctggtgctataggggcctgcaggtcctaatctgtttttttttttttttttttttcacgtcggaggcttgccctgtcccccaggctggagtgcagtgacacaatctcggctcactgaaatctccgcctcctgggttcaagcagttctcctgcctcagcctcccgagtagctgggattaaaggcatgtgccaccacaccaggctaatttttgtactcttagtagagacggtattggccaggctggtcttgaactcttgaccttgtgatctgcccactttggcctcccaaagtgctgggattacaggcatgagccaccgtgcctggccctcctaatctgtttttttaagaaaagtgaaaaatctaggttattacatgaaatttcctgatttttgtatcttggcaacaagttaagattttacaaaaatgttacataggtcaaagaaatacttgtctgactgttgaagcagacagtgaagaagggggcacgtatattctgggaggaggaacactgaagtggcttcgggagttgggggacagaatgcactctgttcccacacttggttcctccacacctcctccctgtggggcccaggcctccctgactgctttaaaacctgtggtcctgtatctctttcagatcctggctctgcagagagaacagcccagaaaagaaagttccccagccctccacattcttccaatggccactcgccgcaggacacatcaacaagccccattaaaaagaaaaagaaacctggcttactgaacagtaacaataaggagcaggtaaagcagccgctgggaacggtgtcctcactggtgggacagaggccagctagtagcgctgaacctctggatccttgtaagcgccggctttcttggatttagttagctgccttgcgctggctgtcatttgccttggacaaaaaaagatggctaaaaatgggcctgtgtagaaatttccagtgggttttcagatctgtttcggggacagagcagggacccagatgagatgagggtatataattctttagggtttggggcgtttccttgtatttgtatttttttttttttcatgcttttaggactgttttccccatgtggcctgaggagttttcccctcctgggccatgcccacaggactagttctcagctctgtctggaagcggttgcttggcttgaggcaagttcccttctggcctcagttttctcatctgtaaaatgaagggtttagaggctgggcctggtgactcatgcctgtaaccccagcactttgggaggccgaggcaggtcgatcacgaggtcaagagattgagaccatcctggccaacctggtgaaaccccgcctttactaaaaatacaaaaaaagttagctgagcatggtggcatgcgcctgtagtcccagctactcgggaggccgaggcaggagaatcgcttgaacccgggaggcggaggttgcagtgagccgagatcgcgccactgcactccagcctggtgacagagcgagactctatctcagaaaaaaaaaaaaatgaagggtttaggttctttggtaagaggcattgccaggggcaggcttaggtaattggtcacagttccttttcgtggaagcacagaggattctttccagagcccaccctcccttggcagctagcaccagtcagctagataggaaaaatccgttcaccgtttggatcttttctaagggacattctagctttagaattctctggggcaggctagatactcttcagattacaaaaatggagaggcactttagtggacttactggtggattgtatctatccccctggactatgaggtcggatctcatagcactgaaggaaacagtgtcccgttggttctgatgccacttgttcttcagcagtgattcctagggatgcattcatccactttgtgcattattgagtagaggagtgggccctggggatggaaagttgaattaaacgagattgttgctttcatggaaggagacctagcaacggttaaatacccaggcctgtgagaggtgtgtgtttctgagcatgaatctattttcactctcaaaattacatagtgaaatgccagccctgcttttgctccgtggctgtgggcaagttaacctcttttgtgcctagttttctcatctactgaaatggggataatgatactaccacaaatttcacagggttgtgaacattgagctaaatgccataaatagtgatattaaaaatgaaacataaagtcagtttctctgctaagtagaataatcatacaatctttatatgaaataaacaattcctgtaaaaatgctcatgtctggccaggcgcggtggctcatgcctgtaatcccagcgttttgggaggccgaggcaaacggatcgcctgaggtcaggagttcgagaccagcctggccaatgtggcaaaaaccctggccctactaaaaatacaaaaaattagccgggcgtggtggcacatgcctgtaatcccagctactcgggaggctgaggcacgagaattgcttgaacctgggaggcggaggttgcagtgagctgagatcatataattgcactccagcctgggcgacagagcaagactctgtctccaaaaaaaaaaaaaaaacctcacgtccaagatggtagccacaggtcacatgtggttcttcagtacttgaaaatggcaagtgactgaggaactgagtttttcaattttttttttttttttgagacagagtctgactctgtcacccaggctggggtgcattggtgtgatctcggctcattgcaacctccacctctcaggttcaagggattcttctgcctcagcctcccgagtagctgggattacaggcgcccgccgctgtgcccagttaatttttttatttttagtagagatgggatttctccattttggccaggctggtctcgaactcctgaccttgtgatccacctgtctcagcctcccaaagtgatgggattacaggcgtgagccaccgcgcctggccttatttatttgagatggagtttcactcttgttgctgaggttggagtgcaatggcgcaatcttggctctctgcaacctttgcctcccaggttcaagagattcttgtgtctcagcctccacgtagctggaattacaggcgcctgccaccacgccctgctaagttttgtatttttagtacagatggggtttcaccatgctggccaggctggtcttgaactcctgacctctggcgtgagccactgtgcccagcctaccctctttttaagagatggggtcttgctatattgctcaagctggacactcaagttatccttctgcctcagcctcctgagtacctgggctttccggtgtccctttatttatttatttatttattttttgagacggagtttctctctcattgcccaggctggagtgcagtggtgtagtctcagctcactgcaacctctgcctcctgggttcaagcgattctcctgcttcagcctcctgagtagctgggattacaggcatgcaccaccacacccggctaattttttttttttgtagttttggtagagacggagtttcgccatgttggccaggctggtctcaaactcctcacctcaggtaatccacccacctcggcctcccaaagtgctggtattacaggcatgagccaccgtgcctggccaagttccggggtccctttttttataagggcactaatcccattcatgagggcagggccctgatcacctctcagggccccacttctctaatgccatcaccttggggttagaacatcaacatagaaatttgggaggtacacaagcattcagaccatagcactcagcaaaatctagcaaccagctggagctgagtcaagcctgcccctttagacacaggcctgtgcttgcttgtttgccacactgcccaccattccctgttgtctcatactcagcctgctctgctcatttcatccacctctgaatttctttccatgtccatgttcttttgactttggcatatgtgaagattctccactgtcgtcttctttttcttcactttagtttctcttctttgttccattgttccagaaagaaagctattctcacctcataaagagcaaataggctgggctcaggactgtaatcccagctacttgggaggttgaggcaagagactctcttgaacccgggaggcagcggttgcagtgagctgagatcgtgtcaccacactgcagcctgagcgacagagtgagactctgtctcaaaaaaaaaaaaaaaggcaaataatccatatatttccatttttggtagagatgttttattaccatgtgaaaatatgggatgagttttaagtttggtccctattccacccatttatcatatattaggaattcattttagggaagtttatttttatttgtatttttattttttgagacagggtctcactctgctgcccaggctggagtgcagtgacatgatcacagcttactgcaacctcaacctccccggctctgcaggctcgacctccccggctcaagcaattctcttccctcagcctcccaagtagctgggactatcggcacatgtcagcacacccggctagttttttttattttgttatagagatgggggtctcactttctttcttgccctggttggtctcgaactcctgggctgaagtgattctcctgcttcaacctcccaaagtgttgggattacaggcatgaaccactgcgccgagccaaaagtttaaagagctttaaaacacattttattttcagggtttaaaagcatcctaaggtttaccatgcatttttaaaagacctttggtccagtgttttcaccccttaggaaggtttgagaatgcctgggaagatgctctcggcgttttgtggaggagggtcaggttgctaaatggatgtcctgtagtatatggggcaagaaatgccttgccccaaatgacgtcagggtctttacagataaataccactctgctctttagttctgacacatttgagttcaaacatcctgttgggaggtgttttggtttttttcccttgcattaaaggattgagaaataacgtgccagcagatttgtacagaatggccttaggtgcatctttgatcaaatatagcaaagaaatgatggggcccctcttcaccttctctgaggacagggtgtctgcatatcatgaatgagtggctagtacttattttcttgggcccacatgttgccctaaaaactgggacacttgaagtctttttttgcttgcttttttttttttttgaaagaaacaaggctttgcaggcccaggcctggtggctcatgcctgtaatcctagcactttgggaggctaaggtgggcagatcacctgaggccaggagttcgagaccaacctgggcaacatggtgaaacctcatctctactaaaaatagaaaaattagccaggcatggtggtgcgcacctgtaatcccagctgctcgggaggctgagacatgagaatcgcttcaacctcggaggttgtagtgaaccaatatcgcaccactgcactccagcctgggtgacagagcgagactctgtctcagaaaaaagaaaaaaaaaaaagaggcagggctttgctctgttgtccaggctggagtacagtggtgtcattgtggcttactacagccttgacctcctgggctcaagtgatcctcccacctcagcctcccaagtagctgggtctacagctgttccccaacatgcctggctaattttttttttttaactttttgtagagatagggtcttgctgcccaggctggtcgcggactcctgggctcaagctgttctcccacctcattctcccaaattggtgggattagaggtgtgaaccactgcactaggcccacagaagtcttttgttgggctgagacagtgtattaacagttgagatagttcaggggagtgcagggattgccagtttctccccaaggtcaggcaacactaggagtttgtgtctgcccaactccttggatcactggagctgagtgggggctgcctctgtaagatgggtctgagctctgcccagccctgctgtctcccccactgcgaggttgaatgccagtgcatcctcacactccagggctaggtggttctttcttacatacttcacagtattcatgcttttaccagatgtaggagaatgatagctgaagctatggtttttttcactcaggtatggtccctgtgtggcctctgtaggaactggagtctatggtcctcatcgtccacacatggaccttgtgtttacacacagccagagcacccatactctggtttatgtagaccaggtgtctgcaactacagcctgtgggctagatgctgcctgaagcctgtgtttatagagttttattggcacacagctacagtcattcatttatgtactgtctgtgtgtgcttttgccctacagtggccaaattgagtatttgcgatagaggccttatggcctgcaaagcctcaagtatttactatccttatagaagcctttataggaaaagtttgccggttcctggtatcattgaaggtattccagaagcaaatagacagggccttttctactttcttgttagccagcctatggaagcagggaaataagaacattttctcttctgcagtatcccttaataacctgcaaatattccatgataacacaggttgcaacctgtttccctagttatcaaactggtaacacacattatacatgtaggggagaaaaatcatatctcagaaatgatttgctttccctttttaaaatgttccatatttgttatcagattatttttatggaacaggaaacacttacaagcagcagataaggaaaatatctgattgataaggagattaaccaggcatctagctctcagcaactgctgctgtttcaggaaaggagaaaatcttctgaaaagagtacagagcagccaggcagtcctcgggatcctcctaggggcagccagccccagccaggaggtggtggggttgggaggggagcaccaggagaaacttaattttggaggatcagtacctcggctactatcagacagagaggatttgagttgctggttagggagatgtacagtcatatttgattcttccagcttcttttttttttttgagacagagtcttgctctgttacacaggctggagtgcagtggtgtgatcttggctcaccgcaacctccacctcccgggttcaagcacttcttcctgcctcaacctcctgagtagctggacaggcgcccacctatagttttagtagagacggggtttcgccatgttggccaggctggtcttgaactcctgacctgaggtgatccacctgccttggcctcccaaagtgctgggattacaggcgtgagccactgtgcccagctgattcttctagcttcttaacaactcttcctattgtattattaacttactgaaaagaagtcagatactgaaaatacggctgactgttatctttcaaaaaccacagtagcatcctagaagacctcactcggggtagaaatagttctgaaaaaaaagaaaaagaagggaaatagttctgcttgcttggtatgtatagcttatctttcaacaggagttccccgccctctcttccccttcctgctgctcctcacccatctcctctttagcacccccatacccctacaataaattcgaagcaaccattttcctaggcagagagcagaccctctacattagtggttctcagctagggacagttttgacctccaagggacgttgggcaaagtctggagacgtttttggttgtcctaattacgtgtgtgagggtgttagagtattactggaatctagccaggtatgcttctacctgccctgcaatgcacaggacgtctcccacaacaaatacttttctggcccccagtgtcaccagtaccaagattgagagcctgtgccctggatgctgtccccttctgtcaggtttttagtagtcatcttatttttcagatgttttttcccctctagctttgtgcactaatctgaacttagtttgcattgcagataatgttctctgagggggtctctaagtcaacacacactctcctggattcaacgttgtcttatgagggctatagggaagagagagtgtgctgggagacccaggtttgagtctttgctctgggctccaaggtcagataaatatctttaaccaagtaaccaagtttttctacacatcaagtaagactagtatgggttgagtattccttattcatcttgggaccagaagtgtttttttttattttttaatttggaatatttgcatatacatagtgagatatctcggggatgggacccaagcctaaacacatagatatatatttttttgagatgatgtctcgctctttcgctcaggctggagtgcagtggtgtaatcttggctcactgcaacctgagttgaagcgattctcctgcctcagcctcctgagtagcaggcatgtgccaccatgcccagctaatttttatattttttgtagagatggagtttcaccatgttgcctaggctggtctggaactcctgatctcaggtgatccacccacctcggcctcccaaagtgctgacattacaggcgtgagccaccgcgcctggcctaaacataaaattcatttatgtttcatacatactgtattagtttgtttgttctcatgctgctaatgaagacatacccgagactgggtaatgtataaaggaaagcagtttaattgactcacagttcagcatggctggggaggcctcaggaaacttacaatcaaggtggggaggggaagcaaacacgtccttcttcacatggctgcttcgaggagaagtgcagagcaaagagggggaaaagctccttataaaaccatcagatcttgtgagaacttactatcaccagaacatcatggaggtaactacttccatgattcaattacctcccactgggtccctcccatgacacatggggattatgggaattacaattcaagatgagatttgggtggggacacagccaaaccatatcacataccttatacacatagcctgaaggtaattttatacaatattttaaataatatatgtgactcatcacaagagatcacttgtggcttcatgttagtgctcaaaaacttaaggattttggagcatttttgatttctgattttctcattagggagtgctcttagtacctttctgggtggttgtcaggataaaatgaagatggtgtgtgcaatggcatgctgaaaatgtaacatgaaaaaaatattgtagcagtgatattccctggaaaccaagtagagctctatcttaaaagttggtctgacacagggaaataactgggctaaagaattatgcagctgggagcagtggccaacacctgtaatcccagcactttgggaggcagagacggacagatcacctgaggtcaggagttcgagaccatcctggccaacatggtgaaatcctgtctctactaaaaatacaaaaaattacctgggcgtggtggtgggtgcctgttatcccagttactcaggaggctgaggcaggagaatcgcttgaacctgggaggcagaggttgcagtgagccgagatcacgccattgcactctatcctgggcaacaagagcggaacaccatctcaaaaaaaaaaaaaaaagaattatgcaatcacatttataagtattagctacttactttgcagaaatgagaatagagaggcttagaaacattggtttacaaaggtctactaagcaagcatctacaaggctcttcatcaaggattgtggaaataccaggcatttgggaacagtaaaacctcttaataccagcctgggtaacatggtgaaaccctgtctctacaaaaaaaacaaaacaaaacacatcacacacacacacacacacacacacacacacacacacacacacacaaaattagttgtgcatggtggcgctcacctgtagtcccagctacttgggaggctgaggctggaggattgctggagcctcagaggtggaggttgcagtgaggtgagatcttgccactgtactccagcctgggcgacagagcaagaccctgtctcaaatactaaacaaaacctcataataaaagctgggaacaagatatgggtgcctgccttcttggcaactcttgcacattattttggaggtcctagccattaaaaagaaaagtcgtgttaaagtatatgataggaaaagacaaaactgatgttacttagagtaatatgattttcagtcaataaactattggaactgtctatatatgaggtctgtattagaaatctgacagcatttctgtctatcaatgataaccgtttagtaaatccccattcgtagtatcatcaaaaagtatgcaggatctcaccaacgtagaagatatttgtggaggaaaccatcatgttttactgaaggacagaaaagaaacatgttatacagtgagatttattcgagggtagggaatatggttgtggctaaactattctctgtggttttattgccagggaattgaggctcaaagtgggttgagtcactttcttaaggtcacatagctagttaccaggtctttttgaatcttcccacaggacttacatgtgtacttcctaaataggatttcgtatttgtttctgatagacattttcattatgagtttctcctgagtgagtttttgtgttcaagtgtggctttgctggattccataatataccataatattccataatataccaggaagaggtcgacctcccatgagttggccacccatctcatctttctgccattgctgatgtcaaataagagatatgtctccctagcaaaaacaaggacctaccatgctcaagaattatggctttaggaagcctcttgttggctcataaatgctttatgtattgggggtaaacttaaaaattagataactggccgggtgcagtggctcacgcctgtaatcccagcactttgggaggccgaggtgggcagatcacgaggtcaggagattgagaccagcctggctaacatggtgaaaccccatctctactaaaaatacgaaaattagccgggcatggtggcacacgcctgtagtcccagctactcaggaggctgaggcaggagaatggcttgaacccgggaggcagaggttgcagtggagccaagattgtgccactgcactctagcctgggcaacagagcgagactccgtctctgaaaaaaaagaaaaagaaaaagaaaaaaaaaattaggtaaccattttttggtgactgaaaccctattgatctattctctaaatgtctgccatttgaagaatcccagggcaaactactatgcttttattggctttgtaaattgggacttccataagttgggcttccaaccacattagcattgttagtatggtggcattttgataaacaggcatacattatatcaccccatttaatagcaacacagtaccatgaagtgttaggcattatcatctccattttacagatgagaaaattgaagctgagaggttaagagacttgtccaaggtcatgcacctggttaatggtagagttaaaatctgaacctaggtagatgtgggttataggcaatgtgccattctgctagggctgccttgtaactcttagataccagcttttaatcgtggcctcttaaaatagaaaaaagaaaaatcctcataattttaacaacttgctaattatatatttagtagagtaacctaagatagtttggctttttaatgaatttgtgaaatgctgttattttcttttgttgttattgatgtacttgttcaaattccttttgagaatgcacatttgttttgaaaccaaacctgtctttttgcctacatttcagtcagaactaagacatggtccgttttactatatgaagcagccactcaccacagaccctgttgatgttgtaccgcaggatggacggaatgatttctactgctgggtttgtcaccgggaaggccaagtcctttgctgtgagctctgtccccgggtttatcacgctaagtgtctgagactgacatcggaaccagagggggactggttttgtcctgaatgtgaggttagttcctgatgaatgaatgcattacctgcctcgtttcctctcctttctctttcttccttttatttttaaatttacaaataatccagatagatggaaaagagaaatttcttgctttccacctgttctatcctggtcacccccttcttgaccaacaccggcagtggctgcagtactgcagctcttggaaagacaattgcacggaatattatttctgatttctcatgagtccttggattccttggagatctgtagtcgtcatctctgcatcttctatgatgaactttttgaaagttaactcccaaatcatgaacggctcacacattttgaaaagatctcattctgttttctccgtcttggatgttgttgcctgccgcatcattgaatcatcagcagtagccaagctgagaagaccacgtttggttgcatgttccctgtagtggccgtctggtgctttcttttgtgcaacaagtatttcttgagtgcctattaggtgctgggaattcgacagtgcacaaaaacaggcatggatcatttttttttttccagcagaaaaggacaaaaaccaaaataaataaagttccatataatgaattaaaagaaaagtgctgtgaagaaaacaaattcaggatgggaataggaggtccaagggagtgcaaggtgttttcattttgaatgtggtggtctgggaaagcctcactaaaatttgagaaagacttgatgaaagagaggagtgagccatgcagccatttgggggacaacttccaggcagacggccggaggcagcagtgcatgggcgtagtcggggcagtgtgtatgcctcctgtgtagcaaaccccaggcaccctttattaagccaactattagggtttccactgtttggaggtggctcctgttcttggagacccccaactctgatgtttttttggaattgctgaaaataaaaatgtcatctccacaattatttaatgtggaatgtctcttggattcaaagatacattggaggctgagcgtggtggctcatgattgtaatcccagcactttgggaggccgaggcaggagaattgcttgatcccaggagttcaagacctgtctgggcaacatagggagacccccatctccacagaaagtttaaagaaattagctgggcatggtggtatgtgcctgtagtcccagctacttgggagggtgagcttggaggatcacttgagccgagatggttgaggctgcagtgagctgtaatcatgccactgtattctatcctgggaaataaagcaagatcatgtctcaaaaaaagaaaaaaaaaaggtacattggagtttgatctcaaatgtggaagctttctatgtgtgaaatggaaagatcatccagatgtctttagtagggaaaaaagccagctataggacagtgtctgtcatacttttgtgtagggagaggagaaaaataagaaatacataaaaagaaagtagacatgaaatcaatatgatgacgatgatattgtaatggtgtcctctctaaaatggcaaaaggcggctgccgttctctttgggttactctagatggagaaatatgtagggtttgcattgtacagcggcgccctcctctgcacgcagaggctgacctcattctactacatttgtcatgggatctggaaccttcaccaattttctttagtcttggccaacttttcccaattgtttaatgatattacaaagatgacagcagctctgataggatgcttttgctgcaaataatagttcttttatttttatttgagacatggtcttgttctgttgcccaggctggagtgcagtaacgagatcttgctcactgcagccctgaccacctgggctcaagcgatcctcccacctgagcctcctgagtacctgggaccacaggtacacaccaccacacctagctacttactaagttttttgtagagacagggtcttgctatgttacctaggctggtcttgaactcctaggctcaagcgatcctcccaccttgacctcccaaattgttgggattataggtgtgagccactgtgcccggccaacaaaatatagttgttaatgcaagcactagttcctgatagaagggggctgaaacaatgtggatttattatcatcagaacctagaggcagggccaggccagagtttattcagagccagactctttccatctcattgttgaggtgacatgttctccatggccataagttgactgctagggttcaggtattatgtgtggatagacaaaaattctcccaaaaggaggatgtctctccttgcatctctttttatcaagcagaaagattttgtccatcatcccccagctgatttgcccctgggctcattggtcagtattgcatcaccagtccttgtacaaaaaagccttgaaaattgcatatgtggtgctttttgtgttgtgggaaccaggcactgccagccaggaagaaggagtggggggtgagagggaatgaatgatagttgggcaggcagcccaagtgtttgccatggataagttacctggaaacaaaccagaatcaaacaaacaggtgctctgtgtctaagattcggggctctgaatttcttccagggatgagttgttacggcagtcaactgggaagactgaacgttgcaaggctgtggtagctaagcaaatagatgcgtgcgtcatgcactgttttcagcttctgagtgactcttgtgttggccttttcctcgacaaccaacgagacacatctgagagttccttttggaggccccagagatgtgaaaaatggaaacagaatccaaattaattggagaaaacttttctcagctctccctacacagatggttaaagagtgtttcctgacatgatcagaatttgctatttttgttgttgctgctacataaggattctgaagccttaagatgtagtaccagatttacatagcagaatctggtttcagacgttcctttgggtctcttctttgatgggaatttcccttaggagctgatatctattacccatggagatagacagttaggttaggttgtgctccttgtgtactttgacacagtgccttaggtgggttcaaagtaagggagatggacaatgaagtcatacgtattattagtccactgctttcccttgtaatctttctgcagggaagtctgtccctttccatcagtgatgtcattgaattaatgccttgtcagtttcctgaatgacagcccagaaccttaagaggatcaggataaatggttgataagtacccatcctgtgaagtaatcaccctgaaatcatccgtggcctttactttctttttttatacatacatatttttgagacagggtctcgctctgtcacccaggctagagtgcagtggcacaatcatggttcactgcagcctccgcctcccaggctcaacccatcctcccacctcagcctaccaagtagctgggactacggatgcgtgccaccatgcctggctagtttttgtatttttttgtagagatggagtttcatcatgttgccaggctggtctccaacactggggctcaagcaatctacccacctcagcctccccaagtgctgggattacaggcgtgagccaccacgcccacctggcctttgctttcatatcccattcttgaaacctaaaggttataataatgatgatttttcaggcccctgtttagccacatcttttctcagatcatgtcgtcttcctgagctaaaaatgcttcctgataaggaaatagattgatacgctttttaatagttacccactgatctggtacattttgttccaggagtctttgctaagtgaaacaacaagtctcattgggatgagaattgctttttgtctgtcagttgactgaaaaaatagaaatcagtacatggatggtaatttcttttttctaaccggacgtttatgtatgactttgactttgtagaaaattacagtagcagaatgcatcgagacccagagtaaagccatgacaatgctcaccattgaacagttatcctacctgctcaagtttgccattcagaaaatgaaacagccaggggtaagaagaaagttcctcttggtataagcgtaaatgaacgtaatgacatatgttttgttctgttaatagcttagctttttaggtacctgatgtattctttgggcctccttgcatccccaaattcaagtatgtgtaaatcacacatgaggtatgatgccattcagttaattctctgtcgtagtaagcactgtatgtcccagaggagtttaattggtacattagtctgttttcacactattgtaaagatattacctgagactgagtaatttatgaagaaaagaggtttttttttttgtttgtttgtttgtttttctgagatggagacttgctctgtcacccaggctggagtgcagtggtgtgatgttggctcactgcaacctctgcctcccaggttcaagtgattctcgtgcctctgcctccccagtagctgggattacaggctcccgccaccgcactggctatttttttttttgtatttttagtagagacggggtttcaccatgttggccaggctggtctcaaactcctgacctcaagtgatcctccagcctcggcctcccaatatggtgggattacaggcatgagccactgtggctcgccagaaaagaggtttaattgactcacagttctgcatggctagggagccctcaggaaacttaaaatgatggtggaaggcgaaggggaagcaaggcacgttttacatggcagcaggagaaggggggtgggaagtgccaaacacttttaaaccacaagatcttgtgagaactcactcactatcacgagaacaggatgggggaaaccacccccataatccagtcacctcccaccaggttcctcccttgacatgtagggattaaaatttgagatgaggttgggtggggacacagagccaaaccatatcaattgggcaatgacatagtaaaacgttgagggggattgaaaattctgactggttgcaaagtgaaacctcctataacacccagcaaggggagctttgtgctccttcccatgggagttaggaaaatccatttcaatgaggaagctgagcacaacacagtttatttatgtcccagatctgatgatggaaccttcaaggaaaactcaaccagtgacttttctgtagagggtgagaatttggttagttccttcagttttgagatgagatttgatatacagcctttgccccttgaggaaaatctgcatgtgggggaagggttggccagttgtgtacctcacagtggtgcctcacctgtgagtcccaggtcaaaccatggccactgtggtttgtatatttatcacaatacttttcaggaaaatggcagaaaaataacttgtttttgaagatagtattattttgacaatataataagcatattatgacattttttctatagatgaatattttcctttcctccctccctctgtccttccctccctccctccctccctgcctgcctgcctgcctgcctgcctgcctgcctccctccctccctccctccctccctccctccctcccttccttccttccttccttccttccttccttccttccttctttcctcgtccctccctccctccctacctccctcccttccttcctttctttttttggaggcagactgttgctttgttgcccaggctggagcgcagtcatagcttactgcagcatcaacctcctgggctcaggcgatcctcccacctcagcctctcaagtagctggaactatagatgcacacaccgccacacccagctaacttttttattattattattttttgtaatgacagggtctcgctatgttgcccaggctggtcttgaacttctggccttaaatgatcctcctgcctcagccttccaaagtgctgggatcacaggcatgagtcacggcgcctggcccctacagatgaagagaaacttgcggacatgatgccccctacctgatttgcacaaaggcaccataggggctagtggtgaccctttgtacaactcctgagagtactgtacagaaatgtagattcttggggctaatcactgtggttttatatctttaaaaaaaaaagaagcttttgctttgagattatattctgaaattttgaagagatgataaaaaaaatttagagcatgctgattggatatccttcaattgagaacctttaacaaattggactcttttaaacaaaatctcaatcagtggaagcaaaaggtgtagccttagtttggtttgcacaatttttttgttttttttttgctatggtataatttttatgttgagtgtggcaaggaattaccttcgattttcataggctaaattatatgtgctaatgactattaacaaaaagaatgagtcatgtagatttgtcagccccatagaattaaaaaccaagaagaaaaattgaagagggcgttaatttctcaagtaaatcgttgaacgtcaaatcagtcaggggagaaagtgctgattttgttaaagcatctttttaacttacagtgcgtattgtaattgtcaatcttaatgtaagaggacaggatctgtttcttgagtgtgtattgaaaaccaagaataaaattggatcacaattgggcttataattatcaataaccaggcagaattagaaggtagaccaatttggagctccccacggtcatcctttatggaaaactttagaactatattgtctgaaaagttgtctcaatttttcaagccttttgttagcattaatgcttggttttccatagtaatgatgggttcgttcctctgcatatcttctcttttatagacagatgcattccagaagcccgttccattggaacagcaccctgactatgcggaatacatcttccatccaatggacctttgtacattggaaaaggttggcctccgtcaaagaacctcaccattctagcccacagttgagatgcctaaggctcttccctcactgcctatgctctatcacaagttggacataacaatcttaaattgtttctctatattttcattgctcctttatttggatagaagaactcttgattctctaacgtctttcctttgtaacattcttccaagattgcagtggaatgttgaaattctttggtaatacttttgcgatgattctagctttttacctgcaaaagccatagcttctaagagttagtgatttgattgacttgagcgttacctcctctttctttcggaggtgctaatgagagcagcaggaaggaagaagagaaaattaagtgtctgggaagcctccagattagcaataaagatgtggcttcttagaatttgacttactctactgattaggttttttcttgaatgcctgaaggttttaaaagttcatgctaaaattccacgctgaaaattacacttggaacactgtagattgtgcacattattctgatgctgattttccaactatttgcagcaaaatatgggcagtgaaatgcatccacgaggaagaaacattacttcatattgtcttccccaataactcccaaaccataaatccagtctgtttttaggaaattgcacataccttcatggtgtggtggaaaaaaggaggcattcaaaagagatggagttggaaacctgactttatattaattaagttaagagctgtggaactttagatacattccttaacattactgtatctcagtttgcctttctgtaaaatgggtatgataataagtacttcattaaattattgtgaggtttgtgtgagaccatatgactaataataaataatgtataaatatatgaaataccctgtttggccgggcgcggtggctcaagcctgtaatcccagcagtttgggaggctgaggcgggcggatcatctgaggtcaggagttcgagaccagcctgaccaacatggagaaaccccgtctctactaaaaatacaaaatgagctgggcatggtagcacacgcctgtaattccagctattcaggaggctgaggcaggggaattgcttgaacccgggaggtggaggttgcagtgagccgagatcacgccattgcactccaacctgggcaataagagcaaaactccacctccaaaaaaaaaaaaaaaaaaaaaaactaaataaataaactaccctgtttattggaagaagctacatgataaatgacagctactataagatgagaaaattccagttattgtgttaaattcaaagagtgcatttttatagggttatagatctcaaaaataaaagcattctttagtcggggtgttgtaggttaaaaagaagcatcttgggaaatgaatagaagaacactaattgatttggcaaatgactgctacaaaaattatgtggggacacaagagtcactgactgtggcttgtctagactcactgtgattatgctccatcgcttttcttcccagaatgcgaaaaagaaaatgtatggctgcacagaagccttcctggctgatgcaaagtggattttgcacaactgcatcatttataatgggggtgagtggcttagatgactcctaagaaagagtatgctgtgtatgtgttgcacaaattcctgtccttcatgaaaaatcaggctcttaattcatattgagaatacttgcgtatagattgtgctaatatatgtgaataggaggcagtgaccaagttcattttaaggtatgagctgacatctaaagtggcttgcagctgcatggtgctgctgccttttagtgttatttctacaaaccttattttaatggaagtataattgcataaaataaaacatacagattttatgtttatattcactgaatttgacaaatgtgtaaccacaagatccagaacattcctatcagcctgttggattctcatacatgccattttctaggaaacccactctcaacaggaaccactttctgctttgtgttaggatagattaattttgcttcttgtagaatttcatataaatggagtcagagttagtgctcttgtgtgtctggctgctctcatgcagtgtaatattttgaggagtcatctgtgttatgtgttattagtggttcctttttttttgttgctgattttttttttttcattcgatcaatatgccgccattcatccatttaccttgttgatgctcatggatatttgggttgttctcagctttgggctgttaggaataagctgctgtgaacctgcttgtgcaagtctttgcatggacataggtttttctttctcttgggtaaatacctaggagtggtgttgccagctcagtgagtaggattttatttaacttactacgtttcaccaaacagtttttgcaaagtggttctatcattttacattctaccagcagggtatattagagttctcttttgctccacacactataagggttgatattgtctgccttttaaattttacctgttcttgaaggtgtaaagtattatgtcacgatgttttaatttgccttttcctaatgatcagtggtattgcgtatcttttcctgtgcttattagtgacttgtatgtcattttttgtaaacatctattcagatattttgttcattgcaaaaataggattatttatttatttatttatttagagacagagtctcactgaatcgcacaggctggactgcagtggtgtgatctcagctcactgaaacctctgcctcctgggttgaagcgattctcgttcctcagcctcccgagtagctgggattacaggcgtgtgccaccacacctggctaatttttgtatttctagtagagatggggtttcgccatattggccaggctggtctcgaactcctgacctcaagtgatttgcccaccttggcctcccaaagtgttgggattacaggcattagagaccacgccagcctgtttgctagtgtttaaggaaagatatatgcatatctgctttacgcaccatattgcattactaactatagcagggctgagagtgcaaggaggggaaaaaggagaggcactaggcattaagaatgtgtgggtcaggtgcagtggctcatgcctataatcacagcactttgggaagctgaggcgggcggatcacttcagtcaggggttcgagatcagcttggccaacatggtgaaaccctgtctctactaaaaatacaaaaattagttgggtgtggtggcgcatgcctgtaatcccagctactctggaggctgaggcgcaagaatcgcttcaacccaggaggcagaggttgcagtgagctgagatctgcgcccctgcactccaacctgggtgacagaacgagactccatctcaaaaaaaaaaaaaaaaaaagaattggtgtaaagattataaactcaaatatatagaaaggccccgcctatcaaattatataaacaagtggatgaggtcaggtagaagaacaaaaacattagcacaagccaagaaggctgcaggtcaagtgatgtgctgtggatcatggagaacagaaaactcctacctggcctggaaaggtcgctgttggcagctccagtgctccattgattatagttactggatcttctgagttttcaaggcaaaccagaaatgtaggtatattgtgtgtttgtgtgtgtgaaatcttcgtgtcaacaaatttacaatttctaaaaataccataaagttcaaagaaaacatgactttggaccatcttgtcgtctggtttagtgtagagttagacctggggctagatggttactttattagctaagtaatgtaagtggtgactcctgaaccttggcatactcattcattaaatgggcacattttgtccctgcttcctagtatgacttcttgaggagctgagaagaaaatgtgtatgtgtgtgcgtgtgtgcgtgtgtgtgtgtgttgtttttttctagaggtggggtctcgctatgttgcccaggctggtcttcaactcctgggctcaagtgatccctctgcctcagcctcccaaggtgttgggattacaggcatgagccaccacacttggcccaagaagaaaatgtgttttgaagcactagccacaccagagctattcaagaaaatgtcttctttctcttgtattcttcttgggttggcgtctgggacaatgggtagaataaggccttttttcattaatttgagcctttagaatgtcaaagcattttaagaatattaatccatgatctctagggaaacccacataaattgctcagttgcagagaagatgacatcgaggcgccaaagagtcgtcgacattgatgggaggaatcacataatgtgaattactattagaagccaggaacctctggttttagcctttaaaagcttaatcctgggggaaaagcaagtaaacacattgttagcggaagtaaagtccccaggcccggtgttgcggtatttccattagaattaatcctgttttcttattcccttaggaaatcacaaattgacgcaaatagcgaaagtagtcatcaaaatctgtgaacatgaggtatgtgtttcccactgtcctgttttagatgcacccagaaggaggggatggggcagctgaagtttccatttgcagaatctcctattaggtagccgaggtgattttggaatttgttgaggccacacccctactcttcaaggaaagtaaaaagaacaaagaggggcccgagtatattataaaacacccttactgtagcaatgatctaagggagatggaaaggattttttgttttttacccttgagtcaccagtaagcaccgggcctcctgtcttttcctgattgcctagatagaattcgtaatttctgaccttggccccacagcctggtattgtttcaggtcccttttggtcctcttgcagaagaggatttgatatctgggggcatggccttgactgcttctgggagagtggcccaggtgtccaggagaacctgttttcttgcaaatgcccataattgtgatggcgtggatggaacagacctcttaggcgtgtgagctgtgaggctctggtggttgtgggacaggctggcagccaaaatggtatgagggagcttttctttattagatctcattgtgagaataaaaaaatgagatggaatgaccttcaacctgtcagtgtgctcccattcattcataaagaaaaactgttcagatagcactgggacccatccatgtctttttatatatggatatatagatctagatctagatatatccagatagatagatagatgatagatagatagatacctggccaggtgcagtggctcacacctgtaatcccagcactttgggaggctgaggcagggagatcacttgagtccaggagttcaagaccagcctggccaacatggcaaaaccccgtctccactaaaaatacaaaaattagctgggtatggtggaacatgcctgtaatcctagctaaactgagaggctgaggcagaagaattgcttgaacctgggaggcagaggttgcagtgagccaagatagcaccactacactccagactgggtgatagagtgagactctgtctccgagaaaaaaaaaaaaaatctatccttataaatttatatctatatatagatatagttatctatgtattttttgaggcagggtctcaacatggactgggtgcaccatcacacccagctaattaattagcctggctatttctttttaaattaattattattattttttttgtagaaatggggttttgccatgttgcccaggctggtctcaaactcctgggctcaggcgatccttctgcctcagcctccaaagacgctgggaatataggcctcagccaccaagcccggcttatgtctgtatatttatgtagagagagttttataaactgctttctcacttagtttattttatgtattttctctgtttcctaggtaattaaactcgtaggaagaacagaatttttcatggctgtatagtattacatacaacacatggacattcatttaattactcctcttgtcattaaatagtacccagttttatcagcatcttaagtaacaaggtgatgaatatcattgcgcatttgatgatttccttagtttaatttttaggaataaaactactatgaggctgtgaacatgtcagatgttccagttacaatgaggctatgtcctttccaatattgggagttgtaattacaaaactatatgtaaatatgtgcccccctgccccaacgatgtgatctgtaaaaacggtaggcatcttactgtgattttagtttgcatttccttgaagaaagtcatacaggctgttttggatatgttcctttggaatagctcagaagtagagtgggcttagaagcaggaggtgcactctgccatccatgcatttgtttgcacattcattcgcttacttactcgctgacctgtgaaatctgttagtcttataattattgagcacctgttaaatatgtggcaccttgcatgataagagttaaagagaagaataaggcagatagtggtagaaaggaataacaaatatcagtgcagtggtgacctgcatgggctttggagcccgactacctgggttcaaatcctgaccatgccactttgttgctgtaagaccttgggcaggttactaaactttttggggcctcattttttttttaatctcatgaggtgtaaggaatacaatgagttaatacttacagaattctgagaatgataccagcacactctaagtcttcagtaaatgttaatgggcaatattgattactctgtcacttgaagcactttacatttatctcatttaatttcttataacagccctttgtggtgggtgctgcttttttttctcttcaatagatcaacatatgggggctctgagaagagaagcagcttaccctaaagtcacagagctagtaaatggtggagtctgacttgagatccaagaagggagcttctgggatctttggctctaagctacaatgttattctaggggaatgtactttcttatgagagaaaaggacaataaataagttaattgaattttcggattgtcgtcagtggagctgaaatagggcaacatggtattaattagctactctggacatagaattgagcttggcaagcagagcaggccagagtggctggaaggggttggggagcggaactgctgcaaggtgagccgagacaggtgggctggggccagatcacatgtggctttgagggaacctgtcaggtcattagacttcattgttagtttctcagcttggtactgctgacacttagggctggagaattctttgttgcagggactattgtgtacatcttagatttcagtagtcccgcatccctcctttgggctacttgtgacaatcaaaaatgcctctagacattgctatgtgatccctgtgggtggggggaatggttaaagtgctctgacagagaactactgggtataatgggaagtcactgggggcttttaagcaggggaaggacaagaacagatttatgtctataaaaggtggctctgggttgggcatggtggctcacacctgtaatcctagcagtttgggaggctgagacgggtggatcgcttgaggccaggagtttgagaccagcctggctaacatggcaaaaccctgtctctactaaaaatacaaaaattagctgggcgtggtgatgcacgcctgtaatctctgctacttgggaggctgaggcacgagaattgcttgaacgcaggaagcgaaagttgcaatgagcccagatcgggccactgcactccagcctgggcagcagagtgagactctggaggaaaaaaaaaaaatggtggctgtggctgctctgcagggaatgtctataatgggggtaaaagtggaagtgggtgacgtggggagttagctgttgcattggtccagagagaaaggacggtggcttggactgggtggaagcattgggagcgatacatagtggttggattcatctccaaggtgttccctctatgggactttaaaacatcttaaccttcaaaatcatcaagcattgattgaggtccacaagatatccacccctggggtgacacattctaatgtatttttgctttacagatgaatgaaatcgaagtatgtccagaatgttatctagctgcttgccaaaaacgagataactggttttgtgagccttgtgtaagttggatttactttgcttatttcatttactgaaccctgtgccttggatgactaccctgagacagctttttccaggtggcttattagatgaaactttggatggagttttaagataattttttgctgataaaattatggcagaaggaaagtaatccaggtaggataaacctcttaggctgaaagttcatgtgccagagatagcatcatggcttcctgggttgattagcctgggcagactgcaaggtgcagcataaaagagagctcatcagagatgtgggatgcagcaaagcttttcagataataagatgagcttaaatcagtgtggatttacaaatcatgttggttctattttaagaggtttgaaaatacttccctggattaactccatagtccctccaaaacatgattcttgggggaaataaagtcaccctagtttccctgtggatctgccttctccaagctggggttctgcagagagaagtacattgttgggctgcactggtgtgtgtgttgggggtggggttggtgggttggagtgggtttggaggcaagattaggcaaggaaagttgagaaaatatactttgcatctcttcgtgcttttggagattaacaccggaatagctaagccttcaataaagaataaaggtagcaaaatactgccccttattagatgctaggtatgatgcacatttaatccaaaaacagaaggtattggtgtcattgtctctgtgtatgttgcacagaaaggtgaaatgtcttgctcgtgcctgcccagataataatggtacagctagaatccaaccctggttttctcatctttcttttttttgtttttttttttttgagatggagtttcgatctgtcgccctggctggagtgcagtggcgtgatttgactcactgcaacctccacctcctgcgttcaagtgattctcctgcctcagcctcttgagtaactgggactacaggcgtgtgccaccacgcctggttaatgtttctgtttttagtagagatgggatttcaccatgttggccaggctggtctcgaactcctgacctcaggtgatccacccgcattggctttccaaagtgctgggattacaggcgtgagccaccatgcctggacttcattcagcttttgatttcaccatttaactccatttgcagttttgtccaggtgtcttggccacataccttttagggaataccacacaggccgaccctgcttgaaactctttttccactcatggcctgtgtcccacagtcctgcttcatcctcacataccaaactttagtgagtatcttgctgtcaaatatgtacaaactctggatcttgtttttcttttcctagagcaatccacatcctttggtctgggccaaactgaaggggtttccattctggcctgcaaaagctctaagggataaagacgggcaggtcgatgcccgattctttggacaacatgacaggtgggagttaataacaggcttggaacatgtagctttcactgaactttgatactgttatgagataagaaaagaagtggaggctgcagctattattctcattattgtcatgataccaaccattgatcttgttgttgaaataaatttcctgtggtatgttaagcttggtaatggcgtgggctacagttttctcaggtgtgttagaaaatcatcttactttactgggtctgttgatgaaaccaacattggaatgggttctgtggctgtttgaagtgctgctgttcttttttgttttggtttgattttttgggagggggtttctgaagtaaattaaacctccatggaaactgctttccaaatcattctttcaaagaatagaagtagtttcctagattgccagtaaatgaatctcttatcatcatgctgagtagttctctcctgttcccttttctctgaagctacagtgggaagttataaggggttgctgttttgacaggtgtgagccctccctcccagccttcctgccctcccctttccctccgtacacggcagagtgaattattccagctaatagcagttccctgtagagcagagcctgctgtgtgcttgagaacaacaggtaggcagagatgagcagcggttaatatcttagttctcttttatcaagttatgattaagtaaggcaaagacccttttgaagccctaccaatcagtttgagaaagcgtgttagtatgtagcgagactacttaaaatatatatactacaaattatgtacacacacagagtgtccagaagctgaaaattggtttcccctgttaaattttgctagtcgtcttgcagaccaaaagagtgaattcccaagtcatttgcaaactcatttactaggaatcccaatggtccactgtcagaagacaaaatggaaattattgagatggtgctggatttggtaggaagtattgcaccttgactttaattcctgtattccttcattcaaagaaatacatatttgatgactgctgcgtgccagcctgtgtagtggaagctggtgattcaaatgtttctgcccatgtgaaggctgacatcctagcggggaagaaggatgatacacaagtgaactaataggcaagataatctcaggtcaggaggtagtggtgggggcctggtgtgaagatctgggatgagggaccaggaagagcagaggtcgggaggggaagggctgaggctgagagggttcaggaaatgctgggagaatagtggggtttaaacagggtcggggaggagaggatgctcacagctggagtcagaggggtaggcaggagtttgttttttatttgaagagcaggaggaattggtgacaggctgtacatccctcctcttcatcagagcatgacaaatgtgaaccatcttgatgatttgagattcttactctataggttgatacagtaatacagtatgagtagatatacttaggacacaggcaggatgggaaaaaataatacctacccccttgcacccaatattcccagacccttatggttgatggctgtagtctctcagctgtgactgctctgcagggacctccatctctcacccgtcagacagcgactgaaggtggcttacagagcatgaaggacggcgtgtgagttggccagctctgtgtgcagaagctgtttcccaaaaccatttgtgtgtttaggtcttggttctggatgagagctgtcgtggaagctggcccccttctgtttgtgaaaaagaaagcagcatgggtctgatggtcaccagtttcgaagcccctctcagcacctgctttaagggagtgcaccgtgttgttgggcttgttttgggagaggggatcccctggagggagttgttcaggaccttccacagtggtagagaaacaactttggaggtcttgggatgttttagtaggctttgggcagggagtctctgaccaccattctttttttttttttttttttggagcagagtcttggtttgtcacctaggctggtgtgtgcagtggcgagctctcggctcattgcagccttctcttcccggattcagccattctcctgcctcagcctcccaagtagctgggtctacaggcatgtgccactacgcccaactaattttttgtattttcagtagagatggggttttgccatgttgcccaggctgatcttgaactcctggattcaaccgatccatctgccttggcctcccagagtgctgggattacaggcgtaagccactgtgcctggcctggttttgttttatagatgcacagttatgtaaaaatataggaaatattttattaaatgcctgcagagttaaaaaaaaaaaaaagcggacaccaaccaattgccttttatgtactgggcagtgttttaagtgcttttttgtagaagctgcttttatgtctattttatcaataagaaaacttaaggtcagagagtgcctagggtcacatagctagggagaagccaccgtggggttagatgtgagataatgtgaaactagatattgtcccccgcagagactctattttgtcaagcaaatctaatttcgcttgaaatacttcctgggcttgttttattatttatttatttatttaagaggggggtcttgctctgtcacccaggcttgttttatttatttatttatttgaggcggggtctcgctttgttgcccaggctggagtgcagtggctcattcaagcaattctcccacctctgcctcctgagtagctggtattacaggggcgtgccaccacatccggctaatttttccatttttagtagagatggggtttcaccgtgttggccagactggtctcaagctcctgacctcacgtgatcctcctgcctctgcctccccaagtgctgggattataggtgtgagtcaccatgcccagccttggacttgtttgaaagaaaagagactcttttccttccctgccaagcaatttcatggaaaatagttgggggaagggaacagtgagcgccttagataccggacagaagtgtgtgggtgaggtgggtgtggagcaggtcaggggggcgaggttatgataccaggaccaactggtgataagctcctggtggccctgcctcttgattctccagagaaggactcactctcctttttctcggtgacagagctgaggctagctcaggaagggggagtcatttgccctaggacagcactggagaccctgatgccttctcagatctgtcctgtctagtagtcctgatctgtgcccgctcactttgaacgcagaatctcaccgtgaggcaaactcttaccttgagagcatctggcttctgttctgctctgcccctcttggtggagatatggttcttcaggtctcaggagaaagacagcagtcagaatggatgagaagctggtgatttccagccctctgatagagcagatcgatatttttggggtgtttagttttagtttgtgttacgatctggtgtcaccgagacttgcaaacaatccgcctgtattgtgaattcggtcccagggatgtgctttatttctcctgggttgttttctcttagatgccaactgttgaaatgggggtaaaatgtaacataagaagtctattttgtcttcttctctttaaaatattggaaaatgtggcagtgttgggtccagattcctacatggttgctttggatagcaactgagtagatactgctttctccctttccaccagacgtgagttttctgcttctgcaaagtcccctttgctccccactgctttctaccgggcttcagtttgtggtctgtgaaatctaaaaggccaccttggaggttgggtgcagcggctcacacctataatcccagctcttggggaggccaaggtggaaggattgcttgagttcaggagttcaagaccatcctgggtaatgtagcgagaccccatctctacaaaagtatacaaaagttaaaaaattatctgggtgtgttgtggcgcgtgcctgtacttccactacttgggaggctgatctgggaggattccttgagtccaggagtttgaggctgtagtgagccttgatcatacttctgctctctggcttgggtgacagagggaaaccttgtctcttaaaaaaacaagcaaaaaagactgggcacggtggctaacacctataatcccagcactttgggaggctgaggtgggtggatcacgaggtcaagagttcaagaccagcctggctaacatatagtgaaacaccgtctctactaaaaatacaaaaattagctgggcgtggtggcacacacctgcagttctggctacttgggaagctgaggcaggagaattgcttgaacccaggagacggaggttgcagtgagctgagatcatgccactgtgctctagcctgggcaatagagcgagactgtctcaaataaataaataaataaataaataaataaataaaatgaattaattaaacaaacaaaaaatcccccacaaaagccttccttggaaagcttattctcgccagtttttccagccagaaactgggttgaggccagcagatcatacatggtagccaagttatttctgggatgtccctgtatcagctgcgtggtcacccgcagcagcggttgtggtgtttgcacctcccccgggggccactggctctggttccagaaaagctgctgctggcattgtttgttctgcaaaaacatgctgtcatgggtctttgcagagcaaaattggaatgtgggatatggatgttaggaagatggaactggcctgggatgggaggtggaaagtgcacgcctggaggcgaatgggctcctttttcagtgattttctgtgtgaattatcttacattcaaaaacatgtacctccttttagggatgcagtattccaaagtttccttctgttcctatttcaaatggcaatgggaaaaggaagctttttatgtctgagtgtaacctgaggaataagtctcttttcagaggtgttgtcagatgcagtggctgatttatttttctctactaagagaaaaccaaagaggattgtttctttagtggctcacaatgactaagtctgttgcacttttaaatgttttcgccgaagttttgttgttcatgttctgttatggtagaacatgcttgttaaatggatcattaattaatccttcaaaccaagtttttttttttttttttttaatggaataagaatcttggcaaacatgcttggctaatttggttcacatcaagaaaaaagcaatcttggaaattactgaagttgacttaaactctctttatcttttgcccttctagggcctgggttccaataaataattgctacctcatgtctaaagaaattcctttttctgtgaaaaagactaagagcatcttcaacagtgccatgcaagagatggaggtttacgtggagaacatccgcaggaagtttggggtttttaattactctccatttaggacaccctacacacccaacagccagtatcaaatgctgctcgatcccaccaaccccagcgccggcactgccaagatagacaagcaggagaaggtcaagctcaactttgacatgacggcatcccccaagatcctgatgagcaagcctgtgctgagtgggggcacaggccgccggatttccttgtcggatatgccgcgctcccccatgagcacaaactcttctgtgcacacgggctccgacgtggagcaggatgctgagaagaaggccacgtcgagccacttcagtgcgagcgaggagtccatggacttcctggataagagcacaggtcagctccgtgcgggggagcggggaggaggccccttggacacgggggtttcccatgggtgcacacttggtgggcccaagcaggtgagcatcaagcaatcgtggggaactgtagggggccacagagcagattttcaagaagtcaccagtggagttcttgctgctagtaacccagaaatgagaaaagtgtccccaaaaggccacctggaggttatacctagaagtagatggagatggccagaaatcttgtggagttctgttcagatgtcgctgcattttggattattgactttccataacacaaataattttgttttagttgaaattgtatttttctgtcaaaaccctacattcatattaaacagtgcaaatcttagagaaacacatatgataaaaaataatacttgaccaggcgccgtggctcatgcctgtagtcccagcactttgggagggcaaggcagtcagattgctttagcttgggagttccagaccaacctgggcaacatggcaaaaaccttgtctctaccaaaaatacaaaaattagctggtcgtggtggcgtgtgtctatagtcctagctactctgggactatagttgaggtgggaggattgccggagcctgggaggttgaggctgcagtgagctatgattgcgctgttgtattccagcctgggcaaagtgtgaccccttgtgagaccctgtctcaaaaaacaaaaacaaaaaaaggtaaaaaacaataatagtactctgtcttcccagtgtgatcccattcccttaaaggtcatatcctttaatagttgtgttgtgtttttttttttttttggagacatagtctcgctctgtcacccagactggagtgcagtggcaccatctcagctcactgcaacctccacctcctgggttcaagtgattgtcgttcctcagcctcccgagtagctgggattacaggtgcgcgcactactatgtccagctaatttttgtatttttagtagagacagggtttcaccatgttggcctggctggtctcgaactcctgacttcaagtgatccacccgccttgggctcccaaagtgctgggattacaggtgtgagccactgggcctggcccaaagtctgagtttttaagtaaaacctccaattcttaaatgtcaggtttttaagtaaaatctccaattattaaatgtcagtttaagatgtcttggaagattttctagaatgaataaagcaggttggagtaccagctttaggcttctggcctaaagccttggacagcctttcacactcgcttccttccttggtctctctctctctccctccctctctccctcactcccttcacacaggaattctttaaggagcaagcatcagttcttcaggataccatgaatgtccccaagagttaaaataatgaggatttagttgtgaactcaaataattctactgactttgcttgtgttgtttcttgggaaattttttttcttttttcttttccttgggttattttcaagaactgcttctagctgctccccagatggtggtaggaggggtagagagagcctgtggcttttggttctgtaaaataaaggctgcagtctatatctttctctagttctgattcatagctgtgtggtcctagacactcatggttgagtcatagagctttgttttggaattgacataatttgtgttgacacagtttcagaaaagtcttcctttttacccccttgtttctgaccagagtccttaaaagcttactttgtttcatgacacggttccatttaagccaagttcacaaaacatggtacttaattacacaatccttcggcacattaattcccataaagagcatgcttttcaggaaatgtttaaaattttaaccttggcagcgactttgtgaattagtgttgcctgaactttcattgccatggttttctgccgtattttattacatacttaaatatgaaaattgtaatgcagctttgtcctaagctaaacacaatgtataggctcgtgtgtttaaattgcttgttgtggcttttcctaatatatgtgaaattaatacataactagtaaaatgaaacatggcatatatatgaccattggttctcctgcaccacatttcaaaaaattcagttttataggaatataagaacagggataatgtgtttaatttagcttctgtcttcccttgggaggtacaaaaggagaaagataaatgacatcagacttcctggaaaaatacctcattctttgagtgctttttaggtgagaagttagttgaatcccccatttgagtagactttaaagtccctttcctaaaatataatctccttgctggtatgtgcttaggtcattttactaatcatgaattagccaatgtgtagtgtaggaagagagagtgatattgaaaattattttactcttacaaattgcccccttttctgtcaggggctagatagtatgtattttaggctttttgggtcttttttccaactctgcaactatttagtcattgttgcagtaacgtagccacaagctgctgtagtcccagctactgaggaggctgagctgggaggatcaattaagcctaggagtttgaggccacaatgacctgtgattgtgccactgcactccagcctggacaatagagtgagaccctagctcaataaacagctagctagatagaagaaaatagagcagccgtagacagttaagacttttttaatggacaccggaatttatttacttatttaaatttttatattttttgagatgaagtcttgctctgttgcccaggctagagcgcagtgccacgatctcggctcactgcaacctccacctcctgggttcaagtaatcctcccacctcagcctcctgagtagctggaattacaggcatgcgctaccatgcccagatgttctttgtatttttagtagagacagggtttcaccatgttggccaggctggtctgaaactcctgacctcaggtaatccacccgcctcagtctcccgaggtgtccagacactggaatttaaatttcatataagttgcatgtttcatgagctattaattcttttccccccaaccattaaaaaaatgttaaaatacctttcttcgcttgcaggcccctcaggaacaggtgatatgcccaatttgacccttgagctatagtttgccaaccactattacagactaagaggattagaagaaactgagtcattttacagaaggcaaattgagagccatgcagagtgtaagggaggtgtgaaagtccccacagccagattctgcatccatacctgtttcctttctctgcaccctactgccatctgctgttagcagtgataatagcatttagtggagggagatgggaaatttgtattaaaatgcttccacagtcaggataatataattgagataagacagtagttcacccaaaatcgtgtaaaataattgccatgtcatagaatagaaaataatatagtagcctcaccagtgaaagttttgtaaccagtaacataaaactacagattgaaatgttattgcataaaacttgtacaacagtgtagaaatcttgtttttgtttagaagattggagaactcagagctgtgtgcctataatccttagaactggatatttagctttctaagaagcactttgctcagccagaagtctttaactcacagtgtcctataatcttgctagctaggtggcctaagtggttaatattctgagtgatttttgtagtttcccctttatatagacctcctggccagaatggttaccttcaccggtatttgtttgcgcgatctcgatgtaagttattaatatgtattagggtcagagtcggggggcctgacattcaccaccctctgggctaatggtcctttggtctggtagctacactgtgagttaccatttaagaaaggaaagagggtccgggtgcggtggttcacgtctgtaatcccagcactttgggaggtcgagacaagcggatcacgaggtcaggagattgagaccatcctggctaacacggtgaaaccccgtctctactaaaaatacaaaaaattagctgggcgtggtggcatgtgcctgtaatcccagctacttgggaggctgaggcaagagaattgcttgaatccgggaggcagagcttgcagtgagccgagatcgcaccactgcactccagcctgggcaacagagtgagactctgtctcaaagaaaaaaaaagaggtttcatattactccccccccctttttttataattgtgaaatcaatatgtttttgtcataaattagttctttattacagaatttaaagtcactgatggctgggtgcagtggctcatgcctgtaattccagcactttgggaggccgaggtgggcggatcacttgaggtcaggagtttgagaccagcctggccaacatggcgaaaccccgtctctactaaaaatacaaaaacttagccaggcgtggtggcacacgcctgcagtcccaactacacaggaggctgaggcaggagaatcacttgaacccgggaggtggaggttgcagtgagcttgagatcacgccactgtactccagcctgggagacagagcgagactccatctcaatcgatcagtcaatgaaataaagtcactgagaatctcacctctcacagccagtccttagattgtgtttccagcgctttttatatgtggttataagtcctactgttaagctgaaagctcaaatacagggatcaggcagatatggcagtgagtgaggttggggagtggtaggtagagactgggatgaatgaaagcagacatacgtttctttccatacctgttacacatcgtgtgcttttgtgtgcatatgggtgtataacacttaacccaaggggtgcggacttttctgatacatagtgcatgctagaggtactacagcagcttggggctactttagtgctacaatgataagcagctctttcataaggaaatacaatagggcaaatgctagcatgcaccatgtgtcagaagagtcagtagctcttgggtaagttttacacacccatgttacccataagtgttacacacggctaataggtcatgagctcccaagacgctgagctagagagttgtgcctttctgaaagagaccagggaccttttcctcctgctggttcttgccacataggagtatgggctctgtattgagagatttctggtttttctttcttttttttttctttttagacggagtctcactctgtcgtccaggctggagtacagtggtgcgatctcggctcactgcaagctccgcctcctgggttcacgccattctcctgcctcagcctcccgagtagctgggactacaggtgcctgccgccacgcccggctaattttttgtatttttagtagagacagggttttaccatgttagccaggatggtctcgatctcctgacctcgtgatctgcccgcctctgcctcccaaagtgctgggattacaggcgtgagacactgcacccggccgatttctgttttttcaagagaaccctcaaattaaaaaaaatgggaactactccagctttttctttttctttctttctttttttttttttttttttttcagagacagggtcctcactatgttgcccaggctggtctcagactcttgggcttaagcgatcctcccgccttagcctcctgagtagctggggctacaggcacataccaccacacccagctatcaacttttatgtactggctcacatttttaactaaataaaagctacatcacattaaatgcacctgtggactccttggttcatggatcacctgtttgcaatgtctggtgtagactgtagaatttatttttttaaagcttaaccttgtattcttttttaattttttatttttatacattaaaaaaaactttttttttttttttttttgagatggagtttcactcttgtcttccaggctggggtgcaatggtgcgatcttggctcactgtaaactctaccacctgggttcaagcgattctcctgcctcagcctcccgagtagctgggattttttttttttttaagagacagggtcacactctatcactcaggctggagttcagtggtgtgatcatggctcaccgtagccttcaactcttgggctcaagcagtccccgctgcctcagcctcctgagtagctaggagtacaagtgtgcgccaccacacctagctatacacctagtatagatgatgtcttgctgtgttacccaggctagtctcaaactcctgggctcaaacgatctgcctgcctcagcctcccaaaatgctgggataataggcatgaggcaccatgcctggtccatagccttgtattctgaatatgtttctgtgttagtgaataacccttcaaaacagcatttttaccaacacatcctgacccatcctagaccatctggccatgctctgctcatctgtgcatggcaccataggagttgtgcaaggtgcggcactttgaacatacaggttgtttctgaggttttataactggaggacatttagcgtgaatcattcactctgcctttccaccccacccagagtgctggggtgcatgggagggaaagggcatttttttcctaatttaattccaaggctcatgtttcctactgtagtcagaacaacccttcacgcaggccaggattttgtaaatgtagataataaatgatgtgtttcagcccacacttgtgaattgtacatcaaaatatgaaatctggtaaaattatttgtgacttcagaggcaattagttcttcctttgggcaaaatgtatggctttataaaaggattggcatctgtttcagagttttaattgaaacaagcatttccaagtctttttgcttttgaaatgtctggagtgattcgaagcaggtttttctcaacctcaggaccactgacatttaaggccagataattctgtattgtgaggctgttctgtgcacctaggatgctgagcaccatctctggcctccatgccagtaccacccacaccctcatgtatattgacttggatttttttgtgatctgcttagtcatatctgtttctttatttttatttatttattttttttgagatggagtcccactctgttgcccaggctggagtgcagtggcatgatctcggctcactgcaacctccgcctcccaggtttaagcagttctcttgcctcagccccccaagtagctgggattacaggcatgtgccaacacacctggctggttttttatttttagtagagagcggttttgccatgttggccaggccggtctcgaactcctgacctcagatgatctgcctgccttggcctcccgaagtgctgggattacaggtgtgagccactgcgtccggccttgtcatatctcttctttggattgttaatcactcttttagcaagcaccttgtgtttagtaggtgtataacattggggagattgtttgatatttttgtatgaaaaaggttttatctggttgtcattgtttctttttctttttttttgagatggagtctctgtcacccaggctggagtgtagtggtgtaatctcggctcactgccacctccgcatcccaggttcaggcgattctcctgcctcagcctcttgaacagctggggttacaggcgtgtaccaccacgcctgactgcttgttgtatttttagtagagacggggtttcaccagggccgggcacagtggctcacacctgtaatcccagcactttgggaggccgaggcgggcggatcacgaggtcaggagatcgagaccatcctggctaacatggtgaaacaccgtctctattaaaaatacaaaaaattagcccggcatggtggcgggcgcctgtaatcccagctactcgggaggctgaggcaggagaatggcgtgaacccgggaggcggagcctgcagtgagccgagattgtgccactgcactccagcctgggtgacagagcgagactcccttctgaaaaaaaaaaaaaaaaaaagagacggggtttcaccatgttggccaggctggtctcaaactcctgacctcaagtgatgcatctgcctccgcctcccgaagtgttggaccagtcgagactcactgcgaccggcctcgtcattgtttgtttattgcttatcatgactacagcagtgagaagagaaatggaaacctccttcttcaattattttatgcactgctcattcagtgaatgtattaggcacctgataagcatccagaggtatcctggatgcctgctggccagcgcagatcctgctctttcagggccaatattttcatgtcaaaaggaagacagtaggccagaggcactgggccactttaggtggccaacaagggaggccttcgaggaggtgatgtttgagctgggacctgaccatggaggaattcgagccagtgtgatctagggtgggcgtgaaagccttcccttgggaacctcaggcacaaaggcttgaggtgtgaacagacttgatcttccagggtggccctcaggtcactgtggccggacattccaggaggtagaaaggaaaggttgggtttgaggttggagaggacgttggattttattctggggaatgaggtgcctctggatgtttttaggtgatggagcaatatgccctcatttcaggggttctgccctggctgctgtgtggagagtgccctggaagaagggtgctgtgcacatggtggggagacctgtgggaagtgcttacggggtctccatgggaaatgataggcagggcagtgttgcccagtcttttaattgcccccccccgccccggccctgaaccattttagacattttcttcctatttactccccctgagatcttttaaaaaaatgaggtcaaattcacataacataaaatttaccattttgaacagatcagtggcatttagtgcattcacagtgctgtgcagccaccacctctgtctagttctaaaacatttccatcgctccaaaataaaaccctgtacccaccaaacagccactccccatcccccacaaacttccacccctacctctcaccccacagcctgcccctaacaaccaccaatttgtgttctgtttgaactgactttcctattctgggtattttgtttcagtgaaatgaaagaatatggggccttttgtgtctggcttctttaacttagcatcatgttttcaagtcagccacactgcagcacgtatcagaacttcattccttttatggctcggtaacgttctattgtggggatacttcagtttgtccattgatggacagtcagttgtttctacctcttgcctattgtgaacagtgctgcttgtgcacattcgtatccaaggatttgtttgtgtacctattttcaattttggataggtacttacctaagagtgaactttcatgaaatttgaaaatattgtagatctgtttatgtactgtctatacacaccacacaccacacacacacacacagagtgctttgtacataaaaggaatagtaagataagattttttcaccccctaaaaattatttttgccccgttgggggccatatggtccctgttgagatgcatggactagggtgatagtaggggaggtggagatgagtgcagagatttgggatatgtttaggaagaggagtgcagagttcttcctgaagatttgggtaaattcaggcatgagagcaaaggaggaattaagaatgggctgagtgtagtggctcaaacatctgtaatcccagcactttgggaggcctaggtgggtagatcacctgaggtctgcagttccagattagcctggccaacatggtgaaacccccatctctactaaaaatacaaaaattagccgggcgtggtggtgggcgcctgtaatcccagctgcttgtgaggctgaggcaggagaatccgcttgaacccgggaggtggaggttgctgtgagctgagattgcaccattgcactgcagcctgggcaacaagagtgaaactccatctctctccccgcccccctcccccccaaaaacaaaaagaatgatccaggtgtgtttggccttgagccaccaggtgggtggccgtggcattcatgatattgggaggacaaggcaggtgcagggtgtttcacacactggggaggtaggattggtggcactaggaggtggacataggagacctgtttctcagggagatgcagaggagggttttgcagcgtgaggcttgtgggttgctagtgactctcatgtatgtccttttcctgactccatgaagctttgcagtcccagatgccttaggaggatgggccctgcccttcactggctgggtagagtgtgaaccagacccatctccatgggaaaccaatgttttcctgacacccttattcttgccatatccaagtgctatgcttaaaaccattttttaatatttagaacatacctcttaaatctcaacacttgtttatttattaacaaaggaaatagatctatcaaattaaaggcctgttctagttattaattttttagcacacatgaatgtatatacagaattataaaaataggctgggcgtgatggctcacacctgtaatcccagcactttgggaggccgaggtgggtgggtcacctgaggtcaggagttcgagatcagcctggccaacatggcaaaaccccgtctctactaaaaatacaaaaagattagttgggcatggtggcacatacctgtagccccagctactccggagactgaggcaggagaattgcttgaacctggcaggcagaggttgcagtgagctgagatcaccccactgcattccagcttgggcaacagagcaagactttgtctcaacaaacaaacaaacaaacaaacaaacaaacttgacctgtcgagcaggaaaatggattcacttggctgtgttctacgtgcaacagcatctttgcgtgtttttgtttgtttgttcctgctaccctttagggttggacgtccttgtcaatgttctctgcagtcccaagcagggtatttgatagtatagtaaggccctccctgttagaccttgccagtttgcttatgggaatacaattagagaagccccggtctttaatcctcaaggggaatctattacacagatatttgagcagctgcaaattgcttttggaatgaggtagaacataaatgaattaataaggttaaaaattctaatgctaaagattttattggtaatacttccgttaaaatgcctatatatatatatatatatgtatatatatttttttggggacagggtctctctctgtgtcccaggctggagtgcagtggcatgatcacggttcactgcagtcttgacctcccaggctcaatggatcctcccatctcagcctcccaagtagctgagactacaggcgtgtgccaccatgcccggctaaattttttgtatttttagtagagatgaggcttcgccatgttacccaggctggtctcgaacttccgagctcaagtgatcctcccacctcagcctcccaaggtgctgggattacaggggtgaaccaccgcacctggcatattcttgtttcttcgtgtaacaaacacttcagttctatgtcttacagtaccagtgataggactagtaataatatagcagccccccccagtgaaggaatgtggcatgccacgtgctaggccaattctattaattcttgcagtaaaacagatttattgtgttaaaaacttaattataggctgggcacagtgactcatggctgtaatcccagcacttcgggaggctgaggcgggtggatcccttgaggccaggagttccagaccagcctggccaacatggtaaaaccctgtctctagtaaaaatataaaaaatagccgggtgtgatagcaggagcctgaagttctagctatttgggaggctgaggcaggagaatcgcttgaatccaggaggcagaggttgcagtgagccgagattgcacaactgcactccagcctgggtgacagagcgagactccatctcaaaaaaacaaaagcaaagaaaacttatttcttaaaacaatttctaatatttattgagcacttgctcggcaccaattgacatagatcgacgacattgatcctcactcccttatcattcccggatgaggaaaaggattcccagctgcatgcctactccatccctatgcggcgtgtcagtttcagcacttttgacgtttggggccagataactctttcttgtggggggccgctctgtgcatggcagcagatttagcagcgttttggtctctagctcctagatgccagtagcaaccccccactctcctaaaatgtctggatgcaatgcccagtgtgccctggagagaagaattgctcatagctgagaatcagtggttcagaggataaccccaaagccctagaggttaatggggaaatagaaaataaaaccactctaatagcaaacagtaacagagtacttactgcatgccaggcactgttcagatgattgatttaatcctcacggcagcctgatgagatgtagctactgttattgtccctttgtatcatattattagtgtctctctttgctgctgccaggaagagggaggcagaggtgccagtaactggcccagggttacacagcagggcaacagctgagccggggcttgaatccacagtgtctggcttctaatctgtgcttgaatccaggcctctttacttctggagtctttccccctatattacattaacagtaatgcaggcaggtcctggcaccagagctgcctagcttacttggattcaccagccgagtggtatgtgagtttcaacacactgaagccttgttctgagttttctaatttgtcaggtgaggaaactgaggcaagtgctgcccacacaagtgtcccagcactttcgaagcccctggggagtctcagttcctaactccaatttgccatccacaaatttctttccagcaccagatcaactcagaatgtttcttgctcatcttggaagagttggctgtcattgttgttagtgatgcctttagtcccagctgtttttaaatgggcccaagaggcattaacaggacagtcccagtaccatggaggggcaaggacaaaggggcaggatttgaaggatctttaggacgcttgttggcccctatgaatgcttgcttttttaaacgtaagtggtttattgtcctaaccctgtgaaatgaggcaggggagaagcaggtcgtaggtcattttaaggtatttttaaaagccttaggcataggtacagttctctctcctcctgtgaaagtttgaaatacagtaaagaaggacataatttaccaacgtctccctcactccatctggtactgggtttggctttacatagcctcaagaacctttgaaatgggagctggagatttcccaaggggccaagttggtccctggcaggtgcagtggctgcgtgtgagctggccgtggtgtctttccacaaacagatgatacgcatttgtaagcctggctcccgttctccacatctggaccatgtgggggttggtttaatcgctatttatgttgagatttatatccgtgaatgggccaaaccaatttcagtggcagcttagccgatttgtcttagagctttgtgcttaatagagtaactggggagaccttcttcatttgtggctttaacggtttcacatccggttaaagccctttgctgaaaataaatggccaacctgctatgctccaccccaccccattcgtgatactgtagcggccttgctgaaatcaaacacaatttcataatctctccattctctccctacaccacacctacacgttctacttgtttatttgtaaacctgtcttttaacaatgccatactttttcagcttcaccagcctccaccaagacgggacaagcagggagtttatccggcagcccaaagcccttctctcctcaactgtcagctcctatcacgacgaaaacggacaaaacctccaccaccggcagcatcctgaatcttaacctgggtcagtcagaatttttgccagtatctttctgtggcaactgtggatatttttgcaaatgacgtatcctcttgtgtatgtggttcttgaaccttcaactcttttctctatgcaaaaaatgcaaaagtttcagaggatgaaggtgagaaaagatctgtgaaaagaataagtaagggatttcttggggcttattgacatacaaattacttttttttttttgagatggagtttcgctcttgttgcccaggctggagtgcaagggtgcggtctcggctccctgcaacctccgcctcctgggttgaagtgattctcctgcctcagcctcccgagtagctaagattacaggagtatgccaccacacctggctaagttttctatttttagtagagacagagtttcaccatgttggccaggctggtctcaaaccccgacctcaggtgatccacccacctctgcctccaaaagtaatgggatgacgggcataaaccaccatgcctggcccaaagtgcttttatccaggccagtgtttccacctcagttgtccttgaccacattaacccagttctatttgcaaattatacccatggcacagaagcaagtaggaggaatcagtacttacctttcctatgtgcagcatactctgatattccttaattctcttcttctaattcttacactctggtctttattccctggatgatgatgatgatgatgatgatgatgatgatgatgataactgtttttttagagatggggtctcactctgtcacccaggctggagtgcagtggtgtaatcatagttcactgcaaccttgaactcctgggctcaagctatttcctgcctcaccctccctgagtagctaggactacaggcctagctagtttttagctacatactcagctaattttttgtagtgattgggtcttgctatgttgcccaggctggtcttgaactcttggcctcaagcagtcctcccactttagcctcccaaagtgctgagattacaggcataagtcactgcacctggcccattattgattccttattattattattttttttgagatggagtttcgctcttgttgcccaggctgcaatgcaatggcgtgatcttggctcactgcaaacttctgcttcccaggttcaagtgattctcctgcctgagcctccgagtagctgggattacaggcatgcaccaccacgcctggctaattttgtatttttagtagagatgaggtttctccatgttggtcaggctggtctcgaactcccaacctaaggtgatctgcctgcctcagcctcccaaaatgctgggattacaggcatgagccactgtgcccggctgctgttgattcattattgattgattcattgcatcctcaccattgatttttcttgaacatctattatgtgctgtgcactattctaggcatggaaatagagtacaaagcaagtcagctaaggacctgctcttgtagaggctgggtttttagaaagatagagaaaataataaaggcaaataacaaggcagttcacaccatgagaggcagttcacaccaagatagttcacaccatgatggatgtctggaaggtaatgtgatgaggcaagagatgggcaagttgcgaagcagatgtcacagttcacttaggtggaggggttaaacggggcctctttgagaggcgatatttgagctgaagtttacgtgacaagaaaaatcagccatgccagtgtcaggaggaaaaagattctagaaggaataagagattttaaaggctctagggttaggattaagtgggtgtgttgtaggattagcaaggaggccagggtggctgcatcccagtgagtgagggtgaggccagtccgtggagtcggagacagtacgggggcctcgtagaccctggtgtggatggagggttcagcgcaggagggatgtgaatggacttcacatctcagaagaagccctcggtgctgtgtttcaaatagtccatatcagtcaaccattctcatctgggggcaattttgtaacacttccccacccactggcaatgtttggagacatttttggttgtcacacctggggttggggtgctcctggcacctaatggagggaggccagggagataccacccaacatcctacaaaatgtagaacagggcccccaacagagaatttctagattgtgtcagtaattgtgctgacagatctgggtatggcaggagaagccaagggtctagtttagattacgtaaatttgagcagctgttacacccctaggtggagaggtcaatagggcagctggaggcaggaattagggttccctgtggccaggttcaggcaggaggtgtaattctgggaatcttgacgtgtacgtgggattgggttagagtggtagttcttgaaatgactttgagggggtgatggggacactgctggcatctaatgattggtggccagagttgcgctaaacatcccccagtgcataggacagcctcactcaacaaagactccagccccattggcttactgaggttgcgagtcaggggtagagcattgagcaggagtgaggcccctgggacattgaggatgtggagttctggttgaggaggagaagcaaggcgtggagtagccacaccaggggagtgtgttgccctggagcctccagtatgggggtttcagaaagagagggcggccacctgtgcccagtgacgcttaagtgtgaattccacgcctttggtggttggcgccctccaggtccatcttgtcctacagtgccattttcagatggagaaactgagggaggtctggagaggaggcatggggtgcccaggatcccagaggcagcagggctggagcacagcctggctccaatcctggctcacctgtgagtacagccctgatgtaataggatggtcagggcagttgctttcggggctcccattcagaccaaccagttggttcctcacttgagtgaaaagggacacacgtgcttccttgggaacattcattgttcccaaatctgtggtttgctttctcacaccctccttccacctccacaccctgaaaagaaatgctgtttggaggcgttctcacggtgacatttcctctctgccagtcatgcttgtcaagaatagctctttgctgaaactgggtggtcattgggcttcctcgtgacactgtgggtctttcagtttggcttgatctgttgtgggagtgaaaggtttcttcctgttgtgtgtcttggtgggtgggcatggtggtgggtgagcaccaggggaaccgaggccctcttgtgtctcccctggcagctcttccggttcaggacacatttcttatcttcgtcagcaggaacaagagcattgggaatgtgggcgttttgtgggctgggattgcaatgacctaacgggaagaggatcagctagggaccgatggaagtgccgtgggtggggaggagatcagaacaagcagggcaatgttaaggaattctccagtgactgcccagggactgaacaaatgctttatagggcttgattctgtctgtcagccgtggaacgactttccccagacagggacaatgaaagggagcaccctggataatgatgaagttattgtagctaacaaaacaggatttccttaaaaaatatatcagaaaaggcagaattacagagatggggaacagatgagtgatagctgggggttggagtgcaggagggtttgcctacacattgggagggaactcttcgggagatggacctgctctgtgttttggttgtggtggtggttacaggaatctatgcaggtgttacgactcataggactgtattctcccaaaagtgaattttgctgtctgtaaattaaaactttttaaaaattacaacaacctttaaagtaggtaatatctatgtttcacagaagtgtaaactggggcacagagaagcaagttacctacccaaggatcaaccatggtttgtggtagagtttggccttcaggcccaggcctgtctgctgcaaagcttgagctcttagctgagatacctgaatgtctcctgtgcctattggatacatcagcttttttgggggtcagggggtaaggtgaagttttgaaatttgtaaaggatgtggctcttgccagcttaacccacattgtcggactgaattgtcaggaaaaacagaactctagattattacaggaactctcctagtttttaaaagctgacaatcaatttcattaaaaacaaaaactggctaggcttggtggcttatgtctgtaattcccgcacgttgggaggctgaggcaggaggattgcttgagcccaggagttcaaggttgcagtgagctatgattgcatcactgcactccagcctgggtgagagagtgagaccctgtggtacaaaaacaaaaacaaaaccccaaaactctatttgggccagacaaacacatacaaccaacaatacaaaaatagtccataggttgtcagtttttatttatactatactgtaattatattatactgttacactataattaagaatatatggtatataagtatatggcattttagtatatgtatgtgtgtatatggtatatgtatgtatattgggtatatggtatgagtatatgtatgtgtgtatatggtatgacagtatatggtatatgggtatatttgagtatatgtatgtgtgtatggtatatgatgagtatatggtatatgggtatgtttgtatattgggtatatgtgagtatatgtatgtgtgtgtatggtatataagtatgtatgtgtgtgttgtatttgcgtgtgtgtatatggtgagcatatagtatatgggtatatatttgtgtgtgtatggcatatgagtatatggtaaatgtgtatatggtatgtgagtatatggtatttgtgtgtatgtatgtgtgtatatggtgagtgtatgtgtatttgtgtatatggcatatgagtatatgtatatgtggtatatgagtatatggtatttgtgtgtgtgtatggtatatgactatatggtataagatgggaaggtttgtacagagacctggttcttgcccaggttgctaattcactgtttcccctcatttgctgtctggggcctttcctctcctcactaaaaaacaaggagctgagcccagtggattattacgagccccctgtatgactcagcagtgattataaataagtcataaataggaatgagtttctgagactagaagagaagaggtgggcccggtccttttcttcttccagactcctgtttgctttctctgatgatcccatctcctcttatttcacagagggtgtttactttgagctgaagaaactcagcagtcagtagtcctgttagtgacagaaatgcgccttgatgctctgttgaaaatgcaggcagggccagggaacgtcgtcacaccccgagactttctgtttatttctccactgttaatgacaggaggcatcctttctttttgtgcataaagcggtatcttggaagtcgggctttctttgagagcatacatggagtgcctgggcccagatttttcagatgttgtcttgattttctttagagtgaatgaggtggggaagatctctgtttggctttgactgaaagatagtgtctgccagggtctctctcttttttgagatggagtcttgctctgtcgcccacgctggagtgcagtggcgcgatctcggctcactgtaagctccgcctcctgggttcacaccattctcctgcctcagcctcccaagtagctgggactacaggtgcccgccaccatgcctggctaattttttgtattttttagtagagacagggtttcactgtgttagccaggatggtctcaatctcctgacctcgtgatccactcgcctcggcctcccaaagtgctgggattacaggcgtgagccactgtgcccggcctctctttttttaaaaaataatatagagacagggtctcgctatgtttcccaggctggtctcaaacttctggcctcaagcagtcctcctgcctcagcctcccaaagtgctgggattacaggcatgagccaccatgcctggccagctagggtcttttgtctaagtgatattgctcccttgaaggaactgacattttgtagttcctggaagtccatccattgtagtttgcgttcagctttagaacaaaaatctgtcttttttttttttgagacagagctttgctcttgttgcccaggctggagtgcaatggtacaatctcggctctctgcaacctccacctcctgggttcgggtgattctcctgcctcagcctcccaagcagctgagataacaggcatacgccaccatgcccggctaattttttgtatttagtagagatagggtttcaccatgttggccaggctggtctcgaactcctgacctcagtatatggtgtgtgtgtgtgtatatatatatacatacaaatatatatatatacggtatatatatatacacatacaaatatatatatataccgtatatatatatatatatatatatatatatatatatatatatacacacatacacggtatatatatatatatatatacacacacacacatacaccatatacatatactgagtatatgtatatggtatatatatactgagtatatgtatatggtgtgtatatatatatatatacacacacacacacacacacacacacacacacactgagtatatgtatatggtgtgtatatatatccaccatatgcatatgtatatgtatatggtggatatatatatttatatctccacctcggcttcccaaagtggtgggattacaggtgtgagctaccacgcccggccctgtctctctttttttaaatggaaaaagaagttcttaaatttttcttttatagagtttgtttttataagtaatgagtacatatggtaacaaaaatttcaaagcacaggacatttcatgaaaggccagcgtgtctgtaacctccaaccacctgtctctatacccctgttcctgcacgtcaccactgttgcaagtttttagtttctagagcccttctagatatatagcatgagttctgaatggtttttgtctcccaggtgacatttggcagtgtctggagatatttttatgttttatttatttttttgagatggagcgtcgctctgtttgcccaggctggtgtgcagtggcatgatctggctctccgcaacctttgcctgactccgcctcctgagtagctgggattacaggcgcgcgccactacgtccggctaatttttgtatttttagtagagatggggttttagtagagacggggtttcaccgtgttggccaggcttgtctcaaactcctgacctcgagtgatctgcccacctcagcctcccaaaatgctgggattgcaggcatgaggcactgcgcctggcctggagatatttttattgtcacaactggtgtgtaggtgctaatagcatctagggggtagaggccagggtgctgctgaacatcctacaacacacgggacagcccctccaccccaccccacccccaccacaaagacttatccaggacccaaatatcaatagtgccactgttgagaaaccctgagaatatatagccttcccagcgattttccatttccttcttggctcccctacagcagtgctaaggtgctccaccagtctttgctttttcatgaaacaggttggcttttcatatcaacacacagaaatcggccttcatttcattttagcagctgtatttaattccatttaaaggtaaactgtaacatttattcaggcgccttacttactgacgctacgcttctttccatttttgctattgaagacaactgcaatgaagaacccttttgcccacgtgggagggtaatccataggataaattcctagaagtggaattgagcatcagaggccacatgcggcgacattttgagaggtatcgcccaactgccctctaaagaggtggttctgatttatgctccctccagaaatgtaagatcgtgcctttttctctagcgtgagtatttttcatccctggtttccatttatagcctaagctgtcttcatatcagctgaaaagttcaaaatgttggcagcaagggtggattctgaagatattcccgatatagaagggcaggggtggaagaagtcccgataagctacatgagctaaatgagaaagtgaagctgttttctctctgcggaggaggggagagtcaaatgcagctgcaggtttggataaagatcattacattcggctaaactcctgaaggtcagcttccagggcctgggcccagcccctagccatttggtggtttattctaacaagaataaacataacagcagcttactgaccagagaaacctcagtttgtaaaatgagggaatttaccttctttgcatttttcttgattatgaacattccagtgctcagtctttttaggctaaagttaatgggtcgcatttactgtagccatacgtgtagacacgcaggtgcacacacagagctcagttattcaggtgaggtctaggtctctttttatggaccctaaggtttagaaaggttgtcctgttaacacacacacaggagttaaggcaaatagtgagttttctttactcacatagaagattggtctgatacaggggttctcagccttagctgccaattaggatcacctggcaagtttattgttggtgtggttttttttttttttttttgagatggagtctcattctgttgcccaggctggagtgcagtggtgtgatctcggctcactgcaggctcctcctcctgggttcaagtgattctcttgcctcagcttccgaagcagctgggattacaggcaggtgccatcatgcctggctaatttttgtatatttagtagagatggcatttcaccatgttggtcaggttggtcttgaactcctgacctcaggtgctccacctgctttggcctcctaaagtgctggggttacaggcatgagccactgcgctcgacctcctggcaagtttgtaaaaggctgatgcccaggccttcccctcagccaattgagtcagagtctctgaggatggggctcaggcctcaggattttctaaaactttacaggcaattttggtgtgcagccagggttggcagtcactggactagtatagaagatggcagattttacggctttcaggccaaatctggcccccacctgtgtttgcaaataaagtttactggaacacatccacacccatctgtttatgtagtgttcatggctgcttttgcaacagagcctgtatggcctgcaaagcctgaaatatttactctctgggcttttattttattttttgagataaggtctggctcttttgcccagtctggagtgcagtggcctgatctcggctcactgcaacctctgcctcctgggctcaagcgatcctcccaccttagcctcctgagtagctgggattacaggcgtgtgccaccatgcctggctaattttcatatttttagtagagacagggtttcaccatgttgcccaggctggtctcaaatgtgagctcaagggaactgcccacctcagcctcccaattgcagggattacaagtgtgagccactgttcccggtcctctccaggcttttacaaagaaagtttgttggtctcttttgtaaattttttcgttaactgtgtattctagtagtatataggaatattgaggacactgatgaatgtgtcacttgggtagccatggagagtatttttgtgagtatacgtttccatctttattcttgaaaaggctggcttttccctctggaatctagcatgcttcttcatttctgaaagtggaaattccgagggaggcctcaaatccctccccctttgctgtcacatttgcatgcaactcagctgttaagtccttgagtcctgcctactggaactctttaatctgggctttttttttttttttttttttgagacagagtcttgctctgtcgcccaggctggagtgtagtggtgcgatctcgctcactgcaaccttcgcctcctgggttcaagtgttctcctgcctcagcctcctgagtaccggggattacaggcacccaccaccatgcctggctaatttttttatttttagtagagacgggatttcaccatgttagccaggcggatcttgaacccccgacctcaagtgatcctcccgccttggccttccacagtgctggattacaggcgtgaactgctgcgcccggcatttctcttttctttctttctttttttttttaaataaacttttaatttaaaagtaaactttagtgtcaaaaatgcaaactcggggagggcagaaagatcacacacaaggctgccactttacacctggaggcttgcatggcggccagacagaggtgctcctcacttcccagatggtgcggggcggggcagaggcgctcctcacttcccagacggtgcggcggccgggcagagatgcactccttgcttcccagatggtggggcgactgggcagaggcgctcctcccttttcttttagtgttccccattccttatttttaaaattattttaccctataatttctctttgttaagctacttcagatttcttgccggacagagacgggtataaagagttttctagttctttgtccagtaaattttttttttttttggagacaggatcttgctcacccaggctggagtgcagtgacgcaatcatggctcactgcagcctcaaactcctgggctcaagcagtcctcctacttcggcctcccaagtagctaggtttacaggcgtgcaccaccaagcccagctactttttgtattttttgtagagatgggggtcttgctatgttgcccagcctggtctcgaactcctggcctcaagcaatcctcctgcctctgcctccgaaagtgctgggagaggtgtgaatcactgtgcctggccccactgcagtaaatttgcacattcttcaccctctcagaggtggctgtgtgaatgtctgcagtcctgtctctagtagcctgtctttaaagccctgataagtgtgcacacacacatgcatgcacacagatactgtttttgctatttttcttgaattacagggatagtgtctctgcttgctttgagcactcacttctggaatctccctgggtctgggaggggcagtctgtaagtgtgatttaggaaaagacccatctcttccctccttttttttccttcaaaaaaaaaaagtcttgctctgtctcccagtctagagtgcagtggcgtgatcatagctcagtacagccactaactcctggctcaagccattctcctgcctcagcctcctgagtagctgggactacaggtgcattccaccacacctggctgggaaaagacctctttctaatcttatcctgggggctgataaaattaagttggagcaatttattgcttctggtcacctgtgagtggattgggtggggcttttgggaggctgcttctagttactttgaaggagctgatttctgggtatgcagtgtttgagaactctcccttactgcatgaacaggaaagtggttgggtcaggccaaaggaaaaaggtaggagagagtgatggctttaaacagtgcttccagcccagctctcagactagattctggggcctctttcacagcccaatgaatggaggtggcctgaggtatggagggagcagggagatgaagcacgaagtccagggagcaacctgatagctgttgggaacaggctcagaggtggcttctcctctttgtgggttgattggattccacctgctttctgacttattttttgggatcggccggagtaggacagatgcctcacactcgctttgggtgggttggaggggatgccagagggtggcaggcacagtggaggacagtaggccccacctgcagagttgcttgttgctttctggacctttgcagccactgaaactcttaatattttgggggcactggagtcggtgggagaggaatccaagaaatgtaagctcactgactttggaatctgtcctgctggtcctacaaagagccctcgaagaagtgaggggacaggacctccggcctgagtcaccccccagaggcctctgcctgggaactaggctgaggaccttggactcttacttgagcgagacctgttagacagaggttgagtatccagggctaatctgttccccttgcctcacatagatgctgtgagccacaacacactggctggaaggtctgcctatcttatattccctgccctttctagtttccaccccagactaggtccactgagaatgaaaaatgaagcctctgtggcaaataggcatttagggcccccaattatcagggtgttttcgagggggtcgccatctttcttggatacaagtcctcttcaatctggacctgaagttacaagtacaccttgaccaggctcagtgttgctttgttcactgaaattgagattgaatatctgcccataacctttgtctttggagggtccctaatgatgttgacttccacacactgagccatctggctgggattgtccattttaaatattgaaagtcacccagacgattgttcagtggactgtttaaacctgccaaacgtgtttacgtgggccattatcttcatgtcaccccatttggttgagcagatgatattgttgggatgaatgacaaaaaaagtatctccccctcccccatgttctaaaatgtgtgttttgctctgactttgcaaggacgaagctccgtgatgaggatggtgtgtgcctgatcttacgagggtgtgatggtttctttcagatcgaagcaaagctgagatggatttgaaggagctgagcgagtcggtccagcaacagtccacccctgttcctctcatctctcccaagcgccagattcgtagcaggttccagctgaatcttgacaagaccatagagagttgcaaagcacaattaggtatacctttggttttgttttttttttccagcagtatcattgttatcattactggtagggataccacctggatgaaatcaaggttgaatcctggctgcttttagcagctgctttaactttcaactatttgctcagctaaaatatatttccactcatggcaaaagacttcagacttgctagttaattcagggctttttgaactcatcagtttattctttggtgaaagcagtctggaaactcgagatacaggtttgaatcatcaaggtttgcaagcagaatgaggatcctctgagttttgcctctgctctccttctcagtacgcatcagtgtctccacacgagtagtgagtgtgttctgtaggtgtccgacacgaaaccctttccctccagactggtctcctccccaccgggcaaaccctgcttctgtagctgttgcctttcttcctcttccctgtgctgcctgccttcacactgcctacctgaatcctgccttctgtgaggctgagctcagatctcacctcctccaggaagtctcccctgactgccctccccatctgccctcctcctttggtacttcattgctcggaagtagcaatggtccctttgtgtgggggtgtccctcccaatctagactggaagctccttgagggcagggaggccgttttatgaggatttgccttctctatggtacttggtctgtgcacatggtagatgctctggaatgtttgttgaataagtaagtaaagctaggagggcatttgtaaagaagtgggggatggctgggcctctggagagcaagctcctctgagtgtcagtgggtgctctgcatcttcaggtgagaaagcagctagagttagggacccatctggggctatccagaggacaacagctcccgttgggttgcctgtttggtgaggacattgggtggcatgggtgaaatttggcatgccatttaaataatcctcttgggtccttccatgcagctggcccaactcttgatttgtttttattgctaataagaattttattatttccatttactgagtgtttccttggacactatgctaagcactgcatatagattgtcttgggaggttgatacttttatcagtcccattttgcggatagagaaactgaggctcagagagataaataacttgttcagggtcacaccagtaataaaaacagaaaagcaggatttgaattcatgtcctttggactgcagtacccaagcttttcctatcacatatgtgcttacacttttccttcttgtttccaatcattacctaccagtagcacaagcctaggatcccagaattataccagatctgggtgtttgtattttggcttgtgttcttcctgtgttgccctggctagccttgaactcctgggttcaagcagttcttctgcctcagcctcctgagtagctgggaccacaggtgtgcaccaccatgcctggctcgacttgtgtttttgattgagccctggtggaggcagatacattccccaatgatccagctgatcccccatgccccgggctgttcatggctctggtatttttgcaggtttctttttggtgtatacaagtcggacagtggcaccattcacagtggccattgctctagaatgaagagattgcacagacttgattgggttttctttcctctttctaaaagtttaggatatggtattattatctacagtatgatggcataacatatggttgggggcaggagccgtaaatgggttaaatggaactattgttagaaatgtgcttctgcccatttttgtttgtgtgtatgaaacacctgctagtttgtgcttcttccttttgaaagagacagaagtatgtgacttctctcttgactcctttaccagtggaagagcaatgcacaccgagtggcagttgactttccacgagtgcagggaacaagagggagggctgggcacccgggtcacctggagacaagtgtgtcccccgcctagaggagccagtggctttcctgttccagccaatgcctggcaggctggtgacccagagcggctagattttccgctctttcatcagaagcccctgctttgatttctatatgaaatttcctgatttgtgagttggacaacacatttataaattaaaagcagacaagataccctgtgggccaaaccagtgcctctcgcatgaaacatgtctgcaagctagatgtggcttgtgggctgtttgcaacctctgctttaaggctttggcttattttctttggcctagacacaaaggatcaagaactttaacgctttggaaacccaagggaagagtgttggtggggagccaggaacccggggttctggcctggcctctgtcttgtgtcctagggcaggtgatatccctgggcctctgttttctaatctgtaaattggatcagtttgaacagcttgtccctgctgttcccttccagccctcttcattctcaataatcccaattagttatcaacgttgcaaaaatttggcaccacatgtttagtgccatataaatttaaaatctccgttggtaggtcctgtgtctcctaacaaccaaaaccctctcccaaggcaagtaccacttggcagccgtagccagttgccacttgagattattactggccccatttaggccaatgtgatgcgatttgaaacgtgcttttcttattccagcatttggtgtggaaaaatgtttgcatttttcatcctgctctttattttgtgactacgccacatgctgggttttctttttgaatttaggcataaatgaaatctcggaagatgtctatacggccgtagagcacagcgattcggaggattctgagaagtcagatagtagcgatagtgagtatatcagtgatgatgagcagaagtctaagaacgagccagaagacacagaggacaaagaaggttgtcagatggacaaagagccatctgctgttaaaaaaaagcccaagcctacaaacccagtggagattaaagaggagctgaaaagcacgtcaccagccagcgagaaggcagaccctggagcagtcaaggacaaggccagccctgagcctgagaaggacttttccgaaaaggcaaaaccttcacctcaccccataaaggataaactgaagggaaaagatgagacggattccccaacagtccatttgggcctggactctgattcagagagcgaacttgtcatagatttaggagaagaccattctgggcgggagggtcgaaaaaataagaaggaacccaaagaaccatctcccaaacaggatggtaagtgattgtatctgtttccagttttcttaatttggtttagaatcctacctcgtacacttactatcaaaagttatgtgacccttaaagaaacaaatcagaagttatgtgaccctctaacacactgagagagaggcacagtgaagctgtgtttggtttaaggttgcctagctagtcatagaacaggacctggactcaaacatgggcctgcctacctttaacctgctcggtatccagtatgattgattttgagtacagaaagagaagtctgttagaaaatgatggttacttttagtgaccaagtcatttttagtctgagcagcttcttttccaatatgctcatttatttccccaaagtgtttgttaacatttggatcttgtcaaatggtccttcagtgctgcattccacagacatctcattctcttttgacaagtctcaaacggttaggagtgttcatttcaagctgggcatggtggctcacgcctgtaatcccagcacttggggaggccgaggcgggtggatcatttgaggtcaggagttcaaaaccagcttgacctacatagtgaaaccctgtctctactaaaatacaaaaattagcggggcgtggtagcaggcgcctgtaatcccagctactcgtgaggcggaggcaggataatcgcttgaacccaggaggcggaggttgcagtgagctgagattgcgccactgcactccagtgtgggtggcagagcaagactccctctctaaaaaaaaagcagtgttcatttcaaaggttttgatgatttcagctttgctttcctcccctcatgccacctaggcatctccaagtgtattttcttacagtagtaggacagtatttgggtgattggtgccagaatactgagtgcttcttagggcactagaaaatggagtatggtggatatgtgtattggcttttttggggagggggggcggacagaatttggctcttgtcgcccaggctggagtacaatggtacaatctcggctgactgcaacctccgcctcccgggttcaagtgattctcctccctcagcctcccaagtaactgggattacaggcacctgccaccacgcctggctaatttttgtatttttagtagaaacagggtttcaccatgttggccaggctggtctcaaactcctgacctcaggtgagccacccagctcggcctcctaaagtgctgggattacaggcatgagctactgcgtctggccttactggcttttaatcttatttgcatttaacttagctcagagtttcacaaccttgcacttctgacagtttgccctggctaattcttagtcctgtgtattggaggatgttttccagcatccctggcctctaccagccagatggcaaccttacttgctcagttgtggcagtcacaaatgtggcaatcaaatattgccaaatatcccctgagtctcagaggctacggttatattctgaaccagcagtgactaccccacagcctagtgcagcctgggcatgttaacaagcccaacaaaaggggtgtgggaatgattggaaggatgtccttcccactgacaaagtattcagcacatttttgagttggcttggcaattaggttagaggattcaacatgctcaataaagatactgaagaattaactaagggcccagaagaaacattgccccaggacaaattacaggttgtagccataaaaccttatgtatgtggcgagtgacttaagggatagccaggtttaaatcttgactgtgcctaacttctatcaggagctaacttgtcaatgaaacccttgaataagatgtaactccatgtcctttggggtttccattgtctggtggcttaaagcaagtcagggatgggccttgagaatctttctgctgtggttatggtcaacctgggctgctctggaacctcagctgtcagagtgagagaggattcctgcagttcagctaaagagaatgtctgtgagaggtacagtggaggaagagagagatacagttacataagggagggaggataggccatcaaaccatcccgacccatctgttagatttatagatggcctctgaaaaatatgagtatgttatggattgggttttgagagactgtctctgttgttgcagagaacaataggagtagcatttatttcatgaggatcgtaggaatatttgggtgcagatggcagtgctcctatgagtgacatatttatactgttctttctttctggaacagatcttttgattgattggttttgtgcccctacctcttccagaaagaatttgcaacagattgacaaggatacataaccatatgaaacaagatgaaaataaagacatccatgtaaaaggaaaatgaaggtagaatagcaagtggtctggggaaaggttttatacagaaatctgtactatttcaatcttcagagttagggaagttggctctgaaagcagaatgggaaacacagtaccttagaagatctcatactttccaaaaaaacaaaaaaccattctagttgattaaaagaagtagaacttttcctcacattgatgtctgaagggaatttctccaggaagctttagtagatggtggacaattaagctgaagatgattctaaaacacagttcagttagagcagcttcctaaggcttggggcaaaaccaattgatcttaaattcagagctgatggtggtttgggtcttgaaaaattctcgtgtcagactccgctagagagcatcttttcaatgatgtgttttcacttaagagtttagtaagtgaagggcattttggattgcgctgttgtgacctccagcttaccttccactagggatgcagcttatgggtagaatatgaatcttcagatggcaaaacagcttttatagctaataacctcagaacagaagcaaagagagcacacttagactcttcgctgtgctttcactggcacatcagtaatttccatccttctacaaaggggatgctaatttttctcttaaaaagtccttgctttataaatgaaaaacagtgaccagtgacaaattcaggaattaagtaggttaatttgatagggcagcttctcaggtgctgaccctttaaaaaaaaattcaccctttttttcccgctacaggtgattgattatgtactccagatttctgggacaaatgaaatttcctgtagcctcattttgtctccataaaccatcaggattcctggaaatttaaatattttgatatctaaataacttcaaacaattttgagcctggaatcttatcggattgtatactctagttctttatttggcagagagccagctgtgatcactgcagagcagtaacccctccgccctgctggctgtttgcttttgcaaatcaggagagagaaaacgaccattttgcggttgcccttacggtggggagacaggctagctcatcaacaataacagtatattttttggtaatgtggcaggaaaggaaggcattgaaggcacttacgtgggttagaagctctgctaaggcactgccccctgccctcctcttagaagggcccagttcaacacctcatctccacctggaagaggcggggactgtgccccatatctggcaggtggccctggaagcatcggagttcttcactgcaggaagctctccttccagacccaccccaggctcttgctgaccagcttggctggattctcctctctggggaagtacaagggccagcaacatctcgataaccatcgagaacgccctctgaagtcgggatagtcagcttgtctctttccctccttggcttcttaaaacccacagcttactgaatgaaaatccttgctggagtaatcaggctcatgtctttttctgggtaatactgatcttaaaaagacagacataggccgggcgcagcggctcacgcctgtaatcccagcactttgggaggccgaggcgggtggatcacaaggtcaggagattgagaccatcctggctaacacagtgaaaccccgcctctactgagaatacaaaaaatgagctgggcatggtggcgggcacctgtagtcccagctactcgggaggctaaggcaggagaatggtgtgaacccaggaggcggagcttgcagtgagccgagatcgcgccactgcactccagcctgggtgacagagcaagactccatctcaaaaaaaaaaaaaaaagaaaagaaaaagaggcagacataatccttatttaaaggagtttgatgtcagggagcatagtccaagatcggggtgctggcttgtacctgggtgtggtgtgtgttccccagatatcctctctggggcataggctcaccttaccgggggctgaggcctgtgcatccataactgagccacctttacaaatgagctcccgtgtggtcatcgcctctacgtgctgctcagtgcttctggctctaacctcccttccagcccctcctccctgcctgccctcacttactcaaatgctctgtattcctagacatatcttggctgatgctgttccctccagattctcactttccgcctgttgaaatcctaccctttattccccaccagcccagctcctccaagatgacatactccatatggcagcgtttttcaaacttgagtcattcacattcattgtctttcccgttctcaagtcctgcttgtataatttttgactttttttatttaaagaatcttttttttttttttttttttgagacggagtctcgccctgtcacccaggctggagtgcaatggggcgatttcggctcactgcaacctctgcctcatgggttcaagcgattctcctgcctcagcctcccaagtagctgggattataggcacacaccaccatgcccggctaattttttgtatctttagtagagatggggtttcaccatgttggccagactggtttcgaactcctgacttcgtgatctgcccgcctcggcctcccaaagtgctgggattacaggcgtgagccactgcacccggccaagaatctcattctttaaaaataaaattaagctcatttaaagcgggacacagtagcacgtcccgtgtagtcccagctattcgggaggctgaagtggcttgcttgagcccagccggggtgatatagcaaaactctatctctttaaaacataaaataaaataggccgggcacgttggctcacgcctgtaattccagcactttaggaggccaaggcggatggatcatgaggtcaggagttcaagaccagcctgggcaagatggcgaaaccccgtctctgctgaaaataaaaaaaattagctgggtgcggtggcaggcgcctgtaatcccacgtagtcgggaggctgaggcaggagaatcgcttgaactcagagggcggaggttgcagtgagccaagtttgtgccactgcactccaccctgggtgacagagtgagaatccatctcaataaataaataaaataaactcattttatttacttttcatttattattattattattttgagacggagtctcaccctgtcacccaggctggagtgcaatggcatggtctcggctccctgcaacctccacgtcccgggttcaagcgattcttctgcctcagcctcttgagtagctgggactacaggcgcctgccaccgcacccggctatttttgtattttcggtagagacggggtttcactatgttggccaggctgctcttgaactcctgaccacaagtgatccgcccacctcagcctcctaaagtgttgggattacaggcgtgagccactgcgcccggcctattagtaatattttttgagacggagtctcactcactctttctcacagaccggagtgcagtggcgcgatctcggctcactgcaacttccgcctcctgggttcaaggaattctcctgcctcagtttcccaccacgtctggctaatttttttgtatttttaatagagacggggtttccccatgttggtcaggctggtctcaaaatcctgacctcaagtgatccgcctgcctcagcctcccgaagtgctgggattacaggcgtgagccaccgtgcttggcctcatttttttagtaaaaaaatttcccctgaaaaaagcatctgcaagtataaactcattttagacttgaacaccacccaataagaacagtagcacacagtatacataaaagctggtgataggaataaatccaatcaaaaccaaagcaatgctactcaatcctagatcagtaccattgcgttgggggaaggttctggccttggggcagaatttgttttcctggtattgtcctggctatcagtaccgccttcaaactttgtcctggagggaatcagaagagatgaaaagaatacttttctttctgggtgactgagtgttactgctttggccattgggaggccatctggctctttggaggtattgctttctacgttccctagccaaagaattgctcttcctgtctggattgacttccgctgggcccttctcaaggtgccgactagattttaactttgcgaaaagggcgtgaacattgaatctgttcgcccaccgcattgtccactaggtgtaggggagcttgagcgcaggagccgggtcttgtttgcctcattctcccctagaggtcttgacttgtatctcagatgtgggccggcgctcagtaaaggaggccgctgctcgcggagatggaagacgccgcagaagtggcctcagcgttaggtgagaatgtactcctccagcgcggtgtgcttggcacgtcgaattggttcggcattcctggctttcataggttttacccagaacttggtggcgtcaagaccgtgcaggtgaacctgagtgaaatccggtttttgtttgttttttcttcatgcattggctagttgtaggtaaaactccaccatccacgacggtgggcagccattctcccccggaaacaccggtgctcacccgctcttccgcccaaacttccgcggctggcgccacagccaccaccagcacgtcctccacggtcaccgtcacggccccggcccccgccgccacaggaagcccagtgaaaaagcagaggccgcttttaccgaaggagactgccccggccgtgcagcgggtcgtgtggaactcatcaagtaagtttcaaacgtcctcccaaaagtggcacatgcagaagatgcagcgtcagcagcagcagcagcagcagcaaaaccagcagcagcagcctcagtcttcccaggggacgagatatcagaccagacaggctgtgaaaggtaccgagcctccccttctgttctccgtggcgcccgctcccattttgccacatcgacaggagaaagtcattgctcttttattttttttttttagttctcgtttgtttccgggccattgtatcttgaaggccttgcacattccatttggcattatttttaaaaattgttttgctacttgcttttttactttcaaaaagttttttttgttcattttataaatgatacatgcatatattctccttaaaaagggggcagaaagttttacataaaagtctgttatcccgtttaccttccatttcattctcttcccttccacagtggccagtatcaaccgttgtaaaagcttttctatgcatgtatgcatgtatatgtatatatacatatctgtatgtatatatgtgcgcatcatgtatatgatgccataaaattagtcctttttcccccctttttttcttttttaaaacataaaaatggtaccatacttgcttttttcccccacccatcagcatgttttggaggtccatccacatcagcacatacagccctgccttgttcttttggactgctgcatagtatttcatagtttatttaaagcattcctctactaatgggcatttaggttgctttcagttttttttctactgtgagcagtgctgcaatgaatatctttgtataaatttccttgtgcacatgagggaacctcttggagttattttggaaaaagtacagtgcgagaagttgatagcgaaggttaccttagtaactggagattcgtcacacacacaagatgagccagcctcaagaaccacttgctgaagttgcagaatcagaactcccaccagtcctgcaggaggctccatctggagctgaaattaggccaaacacagtgctgatctgactggttggtaccagtttgcctggcttttgtgagcattgatgtagatctttctaccaggaaacctgcatctagatcctcaaaggctgggttcttcaactgaaactcatagtgaatgcgcccctgtgaggggggctcatgagcagcagaatgtgaggttgaaaggtggccaggtcttgaattggcccccagtgaaacccttcacagatggcgagggagtgggtcctgaagaattggccaggcaaaattgagagtacagttggattaatcttgctatttaaaaagttggtggggcaaagccgagtctaggatatttgagattgggattgcggcttcctgtcttctgtcttcatatctcataagcaggagacttccccaggggagtttaattgctaccaagaagagggtcgggcgtggtggctcacacctgtaatcccagcactttgggaggccaaggcaggcagatcacttgaggccaggagttcaagaccagcccagtcaacatggtgaaaccccatctctactaaaatggaaaaaaaaaaaaaaagcaaaaaactagccgggcatgatggcacatgcccgtaaccctggctactcaggagggaggcatgagaatcccttgaacctcggaggtagaggttgcagtgagctaagattgcaccactgcactccagcctgggcgacagagtgagactgtcaaaaaaaaaaaaaagagcgctgccaaaaagtggctcattgcttcagattgtcttacgccaaagtaaagcctagttaaaggggtaaagaccaatttaaattggtaatatgctactgtaataggggcaagagtctagcataagctgaaattaactttgatttgtacaggggtgactggacattttaaagggagaatgagggagtagggatgggagcgagttgggcctcagtagagtcagggaagttaaacatcttgatttgctaacgggcacttcatgaagttgggcccctactctcccatagacactgggatgctgaggtcctgtcttcaggtgttggctggaacaaaactgtcagttcttttgccagcattgagttttcccaggcagtcgctttaagagggggttggggtcatcctagcatgcactcttgagctcttagaaactgtcaatgtttgctcaagtctttccaggccaaggttagggcctagttgagaaacctggatagagtttggtcaaggggagcatctttgtcatttaaaagtagaaaagctctcaggatgtctattaggggctttgcttctacaccacagctttgtgctgggatgggtccttcccacgtggggtaatcaggatgctttgccttcctagctgtccagcagaaggagatcacacagagcccatccacgtccaccatcaccctggtgaccagcacacagtcatcgcccctggtcaccagctcggggtccatgagcacccttgtgtcctcagtcaacgctgacctgcccatcgccactgcctcagctgatgtcgccgctgatattgccaagtacactagcaaagtgagtggatgggagagctaccgtggagatggcagacacctggcaggatgccagaatcttggtctcccgaggggaagcgtgagcgtcttaaccttgcagtctttagggagtgaagacccttttttttaaaaacagaatctccaagaccacgttctttaatttgggtctaacagagaaatgtagaatggactgaatcttactccaagtgggcttagattctaaagtcagttcataaagtgcaaatgacataatcagaattaccttcgagaattcaagtcactcattaaggcactggaacacatgactgatccttcagtgaacagctgaccaggggtttggtttgcatttagagctttgcatgtggagcagaagtgacagagacttaaacatgagactggcaaggtgagatgcccacactttgatttttccaggaatcaagatggatggggagggggaccaaggggactccctctcccctgtctcctgccctctggggcacagtccccattaagtggcatggtgggcaggattgcctgttgttggtgaactcatgggaactgtctcagcacaggccccttctttttttctcttaagttgccaagtgcttttttttttttttgagatggagtctcactctgttccccaggctggagtgcagtgacacaatctcgtctcactgcaacctccgcctcctgggttcaagcaattctcctgcctcagcctcccaagtagctgggactacaggcacgcgccaccatgcctggctaatctttgtatttttttagtagagatggggtttcgccatgtcgaccaggctggtctcaaactcctgacctcgggtgatccacccacctcggcctctcaaagtgctgggattacaggtgtgagccaccaggcccggcctgccaagtgcttttatggtcactgttgaattcaggtagataccatctgcagttctcagcgtcatgtgagagtgcgctggactgatgtgctgtgtatcttgtcattagaccacggtggtaataataaccaccagaatgtcaggtccacaaaggcaggaatttttgtctgttttgctcactgccaaggcctagaacaatgcctggcatgtagtaagtgcttgacccatagttgggctttgtttttattggcttcaattattatcaataacttaataatagctattgatttataatctactgagattagttagtaaattactaagtagttaataatttattctttactgatgagtagattactaatactgatgagtaaacagttctagtttttagaatggatgaaaataattgaggatggttgtttctagaattctttctttttaaaaaatgcaaacagggtctcattttgttgcccaggctggtctcaaactcctggcctcaagtgatcttcctgcctagtcctcccaaagtgttgggattacaggtgtgagccaccacacccagcctgtttctaaaattcttatagtcttaataataaagagttagctttattatattgagttaagggaagaggaatcttttaaaattctgagtggtgagagaaatatatatgaatttttttttttacacaaatgagttttcattggtcatgtttctttttatttcttctgtgtaggtgtaattgttatctattgctgcagaacaaattaccacaaaacttagcagctttaaacagcacacacctttattatcctacagtgtgtgtgggtcaggaatctgggcatggctccacggggctctccgcttcaggatctcttgcagttgcagtcatggtgtctgcaagggtttgggactcacacaaaggctcaactgggaaaggatccactctcaaggtcatttaggtggtggcaggcaagattcacttcttgagggcaagtggcctgggccaccctcagttccctgccatgtgggcctccccagcatggcagcttgcttcatcaaaatcagcaatggaggctgggcatggtggctcacacctgtaatcccagcactttgggaggctgaggtgggtggattgcatgagctcaggagttcaggaccagcctgggcaacatcgtgaaaccccatctctaccaaaatacaaaaaatcagcctggcatgatggcatgcgcctgtagtcccagctacttaggaggctggtacacgagacttgcttgaacctgggaggtggaggttgcagtgagccgagatcttgccactgcactccagcctgggctacaaagcgaaactgtctcaaaagccagcaatggagagagcctgctggcaagatggaagtgacaggcttacttaggccagtcacagaagtgacacctcattacgtttgctgtattccattgggtagaagcaagttgctaggtcagagggaggggattacagatgggcacaaaatattagtaggttgggatcatcgggagcccacttagagtttgcctaccacataaggtagcaatatgtctgcatagcatttactctaggctagatgctgtcctaagcactttttgtatgttacttactcagtcttcttgacaaattgatgaagtgtaggtactgttatcaccccaattttatagatgagaaaactgaagcccggtgaggttacacagtgtgtctagggtcacaagctagtgaatggcaaagctggactttgaatgatagcagccaggccctagagagtgtgcacttaacctggctttgaactgctttgtgcatttcaaacaagcctgctgaccacaaatgttcatggtccacaaactgttgccacatgacttttataagcaactcctcttaggattcagtgtggctgtttgagccagtggctgtaaccgcagcactttgggaggctcaagtgggaggatcccttgaggccaggagtttaagaccagcctgagcaacacactgagatcttgtctttacaaataaaaaaaaattagctgggcctggtggcacatgccggtagtctcagctattcgggaggctgagatgggaggattacttgagcccagaagtttgaagctgcagtgagctgtgattgcaccattgcactccagcctgggtggacagagcaggaccctgtctcaaaaaaaaaaaaaaaaaaaaagcctggtgcggtgtctcacacctggaatcctagcacttcgggaggcccaggcgggtggattgcctgaggtcaggagttcgagactagcctggccaacatggcagaaccccgtctctactaaaaatacaaaaattggcccggtgtggtagcaggcacctataatcccagctactcaggaggctgaagcaggagaattgcttgaacccaggggatggacgttgcagtgagctgagattgcgccacttcactccagcctgggggacagagcgaaactcctctgtctcaaaaaaaaaaaaaacaaaaaaaacaaaaaaaaacatgggggaggttgtcatgaaagtgttaaaggcataacagcaccaaactgagacttcttgctgaagcaatctgtaggattattagagaattgaaagcgggtaattttttcgttagtgatataagtaggtgtctggttttgcctgaatgatctcttgttctaccttcggttgtccttacatcaccttcccttgatttagtcccagctgtttgcttatgaatgggaaagctgaggcctactgagtgggtctgattagtggtttgcaggaaggctgttttctcagctcctgcagccattttaattttgttaccttctgcatcccctttgttctttaaaaaattactaaaagaaattttttttttttagagttggggtctaaccctggtgcccaggctggccactcctgggttcaagcgaccctcccaccttggcttccccaggtagctgggtcttcaggaccccagctccccttgacacttttggcaaaactttatttatttatttatttatttatttatttttgagacaaggtctcactcttagctggagtgcagcagtgtaatctcagctccctgcaaactcttcctcccagattcaagcgattctctcgcctcaccttcccaagtaggtgggattacaggtgccctgaccaccacacctggctaatttttgtatttttggtagagacggggtttcaccacattggccaggctggtctcgaactcctgacctcaggtgattcgcctgcctctgcctcccaaaagtgctgggattataggcgtgagccactgtgcctgtccaggaatgacttttttgataagtgttttctttgaagttaaaaaaaatgaacacagtgacattttttgggagctgatgaacttttcctgtctctgagttgacctggagtggaagacgcagttctgtgtgttttggcaaagtggtgttctttaccgatgttgaagtctttgctatatttggaagttaagagtaaaaggcagtccatgaatgcatgatatctttgaagtggaatgtgaccattacattagcaatgtattgaatttcacccactttttaaagttttcttgtaaagccatttagttgtaatttttaaaatggacacagtgggtgcaacagagcaaggaggcaagtgcaggagggctgcaaagccgtggaaagcgcagagtgtttttgctggcaacggcctggtgtgggctccgcagcaagccgggagcggaaatctcaacagagattttattcattttactccattttggggtgaatttgggcctactattttggggtttggcagcaattacgcaattgcatacttacatgaatttctttttctttaaaaataagatgaatgggtatttctttatgaacacctactccgtggcaggtaacgagctgcagtgtttgcgtggtttttttcatttaatcctcgtgcacaccctaccggggcggcatgcagttcttgtttttttgtggggaaaccgaggcttagaggcagtgcatagtgaggcatcagataggaggctgctctttgtcccgccttctccctgaattggggcatctagaaagcactggagagactcagcaccagtcaagccaggcctgagacagagcctgatctcttgtcccctcctctttctgctgtaatgggggaagagtcagctggcaggtgggaggtagaagagaaattcatcctattaacatagtcagcaaatccctgggtgcctgctgcagggaccttagctgatgtcaccaactggctgatgccttcaggggtcagatagttaaagatgggaaatgaaccgcaaagacagtgtcctgactgaaggcattaaaatgacaaaccagccatatctgtaaaatggactataaaaaggaatgaagttccgctgcctgctgcagcacggatgcgcgagtcacagaggaccttgagttgtgtgattccatttatatgacatgtccagactgagcaaatgtggagagacagaaggcagatcagtggttgtcaggcgctgggggagcgggggatgggataccaggaggtgaagactaaggccgggggagtgggattttctttttggggtaatgaaaatgttgtgaaatgattgtggtgacagatacacaactctgaggtactaaaagccattgaattgtatactttaaatgaatgaatggtatagtatatgcatatacctcaataaagcggtgctggttttttgacgggaaataatgaaaaccaaaacaaagtaatccttctctcgaacctactgtgctgggcaaataaaagacatctgggggtcaggcacagtggcttcagcactttgggaggccgaggtgggtggattacttgaggtcgggagttcaagaccagcctgaccaacatggtgaaaccccgtctctactaaaaatagaaaaaaaattagctgggtgtggtggtgtgcgcttgtaatcccaactacttgggaggctgaggcaggagaatcgcctgaacctggaggcggaggtagcagtgagccaagatcacgcccctgcactccagtctgggcaacagagtgaggctccatcttaaaaaaaaaaaaacaacaaaaaaaacaccacacatctgggggccaaatttggcctctccggtttcagccaaactgtagtatggaaactagctttatgtgggtatggaaactagctttatggttatgaagtggcaccacaatgcgatccatgaaatttgttggaaatttttaccccattaatgctggggtttcttaacctcagtgctagtgacattttgggctcgtaggtcattgttttttgtgtggggtccttccgtgcctttagcatggttcaggtaggaagtttagcagtgtccctgcctcgaccctctagatgccagtagcagctccttctccttgctcctgcacctgtcatggcaaccagaaatgcccagtgtctcatgcgggacaaaattgccctaagttgagaacctctgctttatacagatagattttaagtatttgtcaccaggaaaagcctccaagaagtgatcagctgaattgtttctgtttttatctttcagatgatggatgcaataaaaggaacaatgacagaaatatacaacgatctttctaaaaacactactggaagcacaatagctgaggtcagagatgacacatgaatttcttatttgctaagagtgttttgtgggctgctttaaaggtggtaccatgaagaagcttctctggaaacccctctggggtcctggcttggtcactaagctggctctactgattgtcattatcgatgggggtattttttcctttagccagacggctggggctgtggagacatgccctgctttgtgtgatcaattcatttctaataaaacagccaaaatcagagcttcagttaacctactggtgaaactggacaccagttctttttgcttcatgtaaaactggctcctgaatcttctctggaagtttggactttttaatacaagtgcttcttcttgttcaataatttgtgtactggagtctccataattatgtgattgtgtagacaagaaagtggttaagacatttcattggctgtgcatgttggctgtaatcgcagcgctttgggaagttgtggtaatcccagcgctttgggaatcctgaggattgcttgaggccaggagtttgagaccagcctgcacaacatagtgaaaccccatttctacaaaaattttaaaaaaacaagcaggagatggtggtgtgttcctgtaggaagctaaggcaggaggattgcctgagcccaggagtttgaggctgcagtaagttgtgattgtgccactgtactctagcctgggagacagaatgagaccctgtctcttaaggaaaaaaaaaaaaattaagctatctacttataaagcatccgcttttaaaaatacacctccctgaacttcccctttaggctaattccctatcagggcttggagagtgggccacttgccggctgtctgtggatggtacaatgtaggccagatgcaaacgggttatcaggtgaaatgacaaatggcaggacttacagaggtcatttaaggtgacgttggggagctgtgggaatcctttgcagagctattgaccttttaggacttggcagcattaggctggtgctcagacgaagaggagaagatcttcaggaaggcaacctggtggtcccttcaacagaagacaatgtgaatacaaagatttaagagacccaagaaaaatcaatgaatccccttgaatagttttgcaagtatgacctttatgattatgctttggacatcaaataagaagggaaagaataaggctttagaaacagcttcattcttgtttgtatacgttgtaagaattggtgtgtggttgaaaatacaggttcataatatctcacctgaaacctggggtctggatgtatgccagaattttttttggattttagagaggttataatatgcagtcccccacaattagagacaccatttctgcaatgaaatgtgattgttcacactacgtgaattaatcaggttttctcggccttagctatactgacgtttgaaccagataatttctgttgtggggctgccctgtgcattctaggatgttgagcagcatccctgtcagcaacactgctcaattgtgacaaccgcaaatgactccagacattctcatgacaggggagagtactcgaaattgccccagttaagaactactgcgataattaaacactgtttattattattttttaaattaaatttttttttttttttttgagaagagtctcgctctgtcacccaggttgcagcgcagtggcatgatcttggctcactgcaacctccgcctcccgggttcaaatgattctcatgcctcagcatcccaagtagctgggattacaggcgtgcgccgccatgcccggttaatttttgtatttttagtagagatagggtttctccatgttggctaggcttgccttaaactcctgacctcaggtgatctacccaccttggcctcccaaagtgctagcattacaggcgcgagccaccgcacctggccaaaacactgtttaattagtttcctatcagatcaggtcgagtttgtttgtttatttgccctttcaaatgagtttggatccaaagttacacttcctctgcccagaaataccctttggttttcagagatgtcaggctttggaatttcaggtgaataagtgtggatcccaccacctaaatgttatgtaagagtgaaaatccagctatctttgtatttgttacgtatttatagaccaaaatcctaaataacccttaatatattatttatatgaaagtctggtccttgtcactttaagtggctttccctcgtgccagtatttcttggaattgatggcctgtttatacttggttttctgaaccagtgtttctggtgaatttgggttcacccaccagtgatcacctctctggactatagctgtgggaaggttagcatgattcccatacccctcacagccagccgtggttgagcttctgagccctcctggtgaactgcatgagacagcttttgaagacgctcactctccctcttccagattcgcaggctgaggatcgagatagagaagctccagtggctgcaccagcaagagctctccgaaatgaaacacaacttaggtaaggcctgacacactggtctggactgaggagggttttgggtgtgaacttctttgcacctctggagtcaagccgagatgtgagtgcaattaaagctaggctaggattgtatgactcgtagggagaccacagaatcctgagagtctgggcctggagaaaccaggtgtaagagtgggtgttggcgggagcccccctttcctctgttcagaacaccagcctcaacaataaaataatgaggattggtcaggcacggcagctcacacctgtaattccagcgctttgggaggcccagatgggaggatcacctgattccaggagttcaagaccagcctgggtaatctggcgaaaccctatctctacacaaaattttaaaccattacctgggcctggtggtgcgctcctgtggtcccagcttctcgggaggctgaggaaggaggatcacttgagcctgagaagttaaggctgcagtgcacttaactaatttcattacacaaactgttgtgataaagggatctgttatatccctggttttcctttcctttttttcacactccgcatgcgtggacatatccccagttttcaagggaagaaaccgacgtgttgaggaaattattcaaagtcacacggccacagttcaagtctgggcactcttcaccctgttcatcatggaatgctaggcactttaacaatatctggatgcttcctgtgcactgctcagtgcggagaaagatactttattggtccctggattagattgacagatgttttggcctgtcgttctgtatagttaagcttttccccaaaggtagaagtgattgcttcagcccctcacgtagtatcagatcagatgggctgctggcagccaggagaactcttaggttgaggacccatgcccaggtgtgcctacctgctcacttgtggtcagcatctaagtcacaccttgcagacatgaatcctttcagagccccctggagaggagcccttggttcattctttctggacgctgatttgggtgttgttgcttctcgttttcctttttttttttttttttaagacagagtctcactcttgtttcccatgttggagtacagtgatgtaatctcagctgactgcagcctctgcctcccaggttcaagtgattttcatgcctcagcctcccgagtagctgggattacaggcatgcaccaccatgcctggctaagttttgtacttttagtagagacggggtttcagcatgttggccaggctagtctcaaactcctggcctcaagcgatccacccaccttagcctcccaaagtgctgggattacagatgtgatccactgcccctgccaccacttcttgtttttctaataaaatcagggaatcttactttcataaaatccttttctttttatgtgttgactgcacatttgaaaaaattacctgtgggctggccaaaacttagctatggtttgcagacccctagttaaaggtagttagattgactcaaaggttctgtctggccacaggtagttaacttctttatgaggggttaattttactttataaagttcaggaagagtatttgaaggaattgagggaccattcccctcccatcccctcccctcccctcccctcccccctgccctcccttcccctcccttcccctcccttcccctcccttcccctcccttcccctccattaccctcccttccccttccttcccctcccttcccctcccttcccctcccttgtcaatggagtttcactcttgttgtccaggctggagtgcaatggcatgatctcggttcactgaaacttctgcctcctgggttcaagcaattctcctgcctcggcctcccaagtagctgggattacaccatcgcgcctagctaatttttgtatttttagcagagacagggtttcaccatgttggccaggctggtctcaaactcctgacctcaggtgatccatctgcctcagcctcccaaagtgctgggattacaggcatgagccactgcacttggcctatttttcttttattacagccagcaggtcactcctaaatgaattaccagtggacttaactgtctgaagtaaaattagagaaatcttggtagactgagtaggttcatagttgtcctgttagtataatcatcaaccacagtcccatctggatccagtgccacaggagacacctacaagaaagcacgcctgaggtctaggcccagctagctgtttgcctcggtttcctcatctgcgaaaggggtagaatagtagtacttaccccgtaggattattaggatgagggttatatgagttaatatttataaagttcttagaacagtgccttcatgtagtgggtgctgtataggtatttgattgataggggggaaaaggcttatgttaatgaataataggatagaaagtgagttttggtggcagttgtttcaagggttactttgaggaattcccagaatgtagtctggtgtggaaaatcctctggggctgcagttatgtccatgctgggcacctcatgtccactctcaacaggcagcaccatctggtcaccatgatgaatgccctatttacagatgaagactcgggctaggttattgcccatgggcacacagccagggcttctcccagccaggtcttgcatccacgtctgcctgaatctgggggcaggaataaccccacaccccaggctggggtcaggtgatgagcggtgttcttcccctcctccaccagagctgaccatggcggagatgcggcagagcctggagcaggagcgggaccggctcatcgccgaggtgaagaagcagctggagttggagaagcagcaggcggtggatgagaccaagaagaagcagtggtgcgccaactgcaagaaggaggccatcttttactgctgttggaacaccagctactgtgactacccctgccagcaagcccactggcctgagcacatgaagtcctgcacccagtcaggtaatgccctgtggggctgcctcccgtcctgggctgcagtggcttggcattggtctcccctgtggacttcaggggtctcagggctaattgtcaagggagcttgcctggcttctggacactttcactcaaaaacaattgtgtcttacacacaggtgagcagtgtgcaggcacatagctaaaacttgagccatgggcattttgaacctttgatctttgcagaacccttgatctcttctcaggcctaaagtgtcagtagtactgaagttgagacactgtgttttttttggcagtaatggacttgtggctttagataatatggattcccaatttctttgttaagtaaaaagtgttagtttggtactaacctatctttgacactgctgtaatatttgtaatcaccctttccaacatagaacaagcagtccccaggcctagagcttccagcaggaagcactatctagttagaatttatccttttttttttttttttgagacagagtttcgctcttgttgcccaggctggagtgcagtggcgtgatctcggcttagtgcaacctctgccttccgggttcaagcgattctcctgcctcagcctcccgagtagctgggattacagaaatatgccactatgcccggctaatttttagtatttttagtagagatggggtttctccatgttggtcaggctggtctttaactcctgacctcaggtgatccacctaccttggcctcccaaagtgctgggattacaggcgtgagccacagcgcctggcatcaataatattttatgaattattattattattattttgagacagagttttgctcttgtcccccaggctggagtgcagtgacacgatctcggctcactgcaaccctgcctcctggcttccactgattctcctgcctcagcctcccaagtggctggtattacaggcacacatcaccatgcgcagctaatttttgtattattagtagagacagggtttcaccatgttggccaggctggtcttgaactcctgacctcaagtgatctgccggcctcagcctcccaaagtactgggattacaggtgtgagccaccacgcccagcctataagttattttttaccattagcttttatttgtggcaaatgatactagctttgtatggttggaattaaacacttccattttaaagaatttcaagtgtcccataaataatacaataaagtagtatgtctgcggattggcaaaatttgcaaaggtggtatgtaaatgactcaagtgtgagaagcttgaccaggggttggtaaactttttctgtgaagggcgagagtgaatattttaggctttgtacaccatgtggtttctgttgctactacttaactctgctgttgcagtgcagaagcagtcttagatgatatgtaaatggatggacatagatgatatataaatggatggatgtggctgtctgccaataaaacaggcagcactagcttgccagctcttgctctagacaaatctgttattttattattttttaaaaggcaatattggagaataccttgccctgttctttagtctttagggagatgtcttctttgtagagacttttggtctcttactggagtaaagtctctttgtgttttccctccgttctggaatgtgtctgatgagccttttgctgttttgccaagatggccaaaatgtccttcggctttcctttttttgtgacataattacatctgttcttcctaaattcctcccagacgcgtttttcttttccttttttttttcgttgagacggagtctcgctctttctcccaggctggagtgcaacggcgcgatctcagctcactgcaagctccgcctcccgggctcatgccattctccttcctcagcctccctagtagctgggactacaggtgcccgccaccacgcctggctaattttttgtgttttttagtagagacagggttttactgtgttagccagtatggtcttgatctcctgacctcgtgatctgcccgcctcagcctcccaaagtgctgggattacaggcatgagccgccgcacccggccccaaacgccctgtttttctatgtgtccaagtttctgccatctccagattctctgggcctctgatagcatgtcgcctttcacgtggttttcctgtcccaccttagaaggaagaaagtctctggggctaaaaatataggtctccacctagaaatgactaaatagagtaactaaatcagcagttacaggttggctcttgttgatgggctttatttgttccaggaatatactttcatctccagaatgatttaataaaacttgaattgctaaccattaaaaatcaacatgttggctaggcacggtggctcaagcctgtaatcctagcactttgggaggccgaggtgggtggatcacctaaggtcaggagttcaataccagcttgaccaacatggtgaaaccctgtctctactaaaaatacaaaaaattagtcggacatggtggtgtgcacctgagtcccagctacttggtgggctgagacaagagaatcacttgaacccaggagacagaggttgcagtgagctgagatcgtgccattgcactccagcctggctgacagagcgagactccatctcagcatgtttatgttaaaatttggaattctaaagtttggaattccagcttctggaaaactctggcaatctggcccccttgagcctccacttttatgccctgggtagggctgagccttgggtgccactgggtgcagggcggggctccatgcatgtttcaaaatcatcgtactctgtgtatatgtggcgtctctctctctcctttgtccccagctactgctcctcagcaggaagcggatgctgaggtgaacacagaaacactaaataagtcctcccaggggagctcctcgagcacacaatcagcaccttcagaaacggccagcgcctccaaagagaaggagacgtcagctgagaaaagcaaggagagtggctcggtgaggatccccccatgcctttggctagtgacatctaccctttgtgccaagtggacttaggaccccctgtctgccgccctgaaagttccgtgttgtgggaggcttgtcctaacagtgtgccggcatttccagtggatgtgtgggaacatggagcctgggccggcgtgtgtgggacctggcagctgctccccagtactctccgctggggaccctcaaagtgtagaatagtgttgcccaggagaactttctgcgatgatggaaatgttctgtacttcccgtccagaatggtagctgctagctacatgcagcttttgagcacttgaaatgcagctagtgtgaccgaggacctgattttacagttttatttaattttaattaattgagatttcagtagccacatgtggctagtggctgccctattgggccacgaaggtttcacctccttgtttgtttgccagggtgtgatgtatgtgacattgatggtatgcaaagactattttcatgagtatatagttttttacatttttagtcactgtatatctatttcattgcatattaggaaaaagataaatcgttagactgtcagttaaaacatgttggtttaactgatagtattacctagtcagaggctagcatgaattaaaagcggactgacagaattttgaagtaatgtactttctccttggatatggcaaaaatctggagggggttctgttagtgagtggagtttaggaaacagtgaatgttctagggtacagtgaggggccactctggtgctgcgttccagtctgttcagtgtgggagatggtacctggggtttggccacctggccgccctgtgcccatcactcccacctgaccgtgccaggcagaggacactgagatgctttgggggcagcgatgagcacccccatgactccctggatttccctgtgggggcgacagtagcctcagtgccttgagtccatctttttctttttgtatttctagacccttgacctttctggctccagagagacgccctcctccattctcttaggctccaaccaaggctctggtatgttgccccctggtgggcgaacggtgctttcacatttcagatgggcagatggggagccattttgtcagggagaatttgaagggtttattccaatggtttccaaacgattatggatccttaggggtgcctggggtgggtcagtgggggtgagggggtagctgagcatgttaactttcaggtacctcttcaagctgatcggtattacctattgtatttactggggatccacataaaactccatttggacagagggttctgttgctgacctggggtagggtagaagaagtgcatttggattgggaagttttttttttctctctctctcagggaaatgagaacggtaaatgacactgtgtaagattttattctgaggttctgacacctgcatatggtggatgaaggcgctcaagcctttgagaattgaaggcagtgcttaagtggatgatctttctgttaaatcctttccttttggagaataacctggcaggcaggtttggggaaatttctgagacttgacatctaggttttttcttctgtggggtttgagctgtcttccttccttagcccaaagaatctttttcctgcactttcttaaagcagttttgggtcattccagaagggttcagagaaggtgtcttcctggtggaagacagttttacttcattcaaggtttttgcctggcaccacagctccaggacctttctgcctgatgatgatttttttttttttttgagacagtcttgccctgtcgcccaggctggagtgcagtagtgtgatctcagctcactgcaacctccgcctcccaggctcaagtgattctcctgcctcagcctcccaagtagctgggactacagggacgcaccaccatgcctggctaattttttaaaaaaattttggtaggccgggcgcagtggctcatgcctgtaatcccagcactttgggaggctgaggtgggcggctcacaaggtcaggagtttgagaccagcctgaccaacatggtgaaaccctgtctctactaaaagtacaaaaattagctgggcgtggtgacatgcgcctgtaatcccagctacttgggaggctgaggcaggagaatcgcttgaacccaggaggtggaggttgcagtgagtcgagatcgtgccactgcgctccagcctggaagacagagcgagactctctctcaaaaaaaaaaaaaaaaaaaaaaaaaaaaaaattgtagaaacggggttttgccatgttggccaggttggtcttgatctcttgacctcaagtgatcctcccgcctctgcctccggaagtgctgggattacaggcgtgagccactgacgattctcttgagctgaaaagcaaacatttcatttcacttctgcatattgagtgcatggaggaagaagtgatgtccattgttaggggctgggaacggtttccctaaggggctaggccttgaaagttggatgggatttgggggcacagtcagagggagtaatatgagcttgctttaggagggaggatatgaacttggcattaaatatgactgaaccacctattgaaaaagcaactccctcttcacttccccttgtaacaggctcagtttagtgctaagatgtctttagcatctctcatatttcctgattctctttttaacaaagactgagcagactctagattttagccgcatgctccccaccctagaacttttaatttaaggttttcattacattcatttttggagttgcccttgatttaacagcagattttattggttttgtgttttttgttggttaacaataaaagtttagttatttacctaagttacataagtttaaaataaaaacatgaactaagcaatatgtaagaggactatggatgtgtcgaaatggcacaagtggtgtgaggaaggtccaagttagggaaacaccgtttcagacagaggggtgctgttagggttttggagcctcaaagtggcttgattgaaatggcatctgagaagatgaatgatgccgtggtaggatgaatctggcaggagtctgttggcatcaggagggtggcatacaggaaggtagttgggagaggcatcgtattccattctgagctggaggagtattacctagaccagggtcaagaaactttttccatagagggccatttagtaagtattttaggttttgcaggccgcatggttcctgtcatagctgctcaccctgccgttgtagtgtgaaagtagacatagataatatgtaaacaaacgtgtgccttgtgccaatgaaacttgaattgcaaaaacaggcattgagctggccatagtttgctgactcctgacctgaggcacactggcccagggagtggaagggagaggaggcaagaagccccagtaaatggtggggggaagaggggggcgagcagggggaggaaggggcagtttttctgaataaggcagataaatgcctatcttcgtggagtttcaaaggaagtcagaagagcagctattggtgatactgaagagcatgaacaccttatcatgtttttccccaatgtctgtaagagcatagttagtatttccattatacagatgagcaagttgaggtccagagacattaactcagatgcccaggtaactcaatgagtaattatgagagccaagacttcagttcagatctctccagactcatgctttgaaaggtgggtgggtgggatttgggggcacagtcagagggagtaacgtgagctcactttaggaaggatacgaacttggcattaaatatgacggaagcacctactgagaaagcaactccctcttcacttccccttcgaacaggcttagtttgatactgagatgtctttagcatctctcatatttcttgattctctttttaacaaggactgagctttgcaaccatatgcaaccaattgagctttgcaatccagactcatgcttgcaaccatatgtcaggtatacttaggtggacacctataaaattgttgtaactcaaaaatggctgagtaatggcacttgtgcgtggctctgctaataaggcactgatctctaggaaacgtcagcgtgcagatgtggcctttttttcctcacccaattctactaactgtcttgtttctatacctccctccttcctacctccttacccagcttaatttccatggagtactgttgctaatacaacccagtctcccaggcccttcctgttttcctagcatgtccatttggcaaaacctcaccttggatgaaccccagctttccgcttttgatttacctgcacctgagcctcagtgcttaactggagaatgttacacaagaacacaaactcctctcatcacacacgcaaatctgggtcactaacctcagaagcagatattctcttctgccggatcgtcttcccaatatgtttttcttttattaatactttttgtccccagagacctgtgttctttttttattctacttttttgagacagagtctttgctctgtcgcccaggctggagtgcagtggcatgatctcggctcactgcaacctctgcctcctgggttcaagtgattctcctgcctcagcctcccgagtagctgggattataggtgtgcaccaccacacccagctaattttgtatttttagtagagatggggtttcaccatgttggccaggctggtcttgaacccctgacctcaggtgatttcacgtgccttggcctcccaaagtgctgggattacaagcttgagccactacgcccagcccggcccttttttttttttttttttttttttttttgagacagagtcttcgctctgttgtccagactggagtgcagttgcgtgatcttggctcactacaacctttgcctcctcaattcaggtgattctcctgcctcagcctcctgagtagctgggattacaggtgtgcatcaccatgcccaactaattttttgtatttttaatagagacaaggtttcactgtgttggccaggctggtcttgaactcctgacctcaagtgattcacccaccttggcttcccaaagtgctggattacaggcatgagccaccgtgcctggccagaggcctgtgttgtgacccaagttttttgtttttatcaggattccatcgtccatgatggctatttctcaagttctctgctctgttttggacctccctgcatctctccctgcgtcaccatccctgggcgctcagggctgctcctctgccctctgcagggcctccgtggtgtgctctgtccttccctcctgccgttcaaaggcatctgcatcctttgttgtagccagatttctcactctgtattgcttttcttcctaggcacttaaatatcctcatctatctccaagtgccttccttgacaccttgcatctccaatagaacgttctgtgacaatggccatgttcttatatttgcactgtccactatggtagccactagccacgtgtcgctgctgaagccttgaactgtggctagtgcgactgaggaatggaatttaacattgtatcttattgtagtggttaccatattgaatggcatagcttaagacctgtcctgtctccttcctcaacccagttagttagatgtctcttcaagggttgttattctagagctagggcccacctgtagtcccagctacttggagaggctgagtcaggggggttacttgagcctaggagttttgagactgcagtgagtgcctgtgaatagccactgcactccagctgggcaacagagtgagacctcatatttaaaaaaaaaaaaaaaaagttgtttcatttgtctccatttccctttctttacacactccgctgctgctatgatacagtttctattctgatactccaccatccccctaagccattaacagtcatggacatttattattattattattagtatttgagatggagtcttgcactgttgcccaggctggagtgcagtggtgcaatcttggctcactgcaacctctgcttcccaggttcaagtgattctcctgcctcagcctcctgagcagctgagattacaggaatacaccaccacgcccagctaattttttgtatttcattagagatggggtttcaccgtgttgcccaggttggtctcgaactcctgagctcaggcaatccacctgcctcggcctcccagactgcttggattacaggcgtgagccaccatgcctggccgacatttttaattctaaatgttgttttgaaacctaagagacaggatcttgccttgttgccgaggctggccttgaacttggcctgagctcaagccattctcccacttcagcctcttgagtagctgggatcataggcatgtgccaccgtggtcagcagcagagacttttttcttaaaagacgaccagattggctagaatcatggtatcttcatgtcagaaagggcctcctctccagggtttggataaagattgaggtgcacccggggctacactaaaagagatttagccccgcatttaggtcaggcgtggtggctcatgcctataatcccaacaccttgagaggccaaggtgggtggatcatttgaggtcaggagttcaagaccagcctgaccaacatggtgaaaccccgtctctactaaaagtacaaaaaattagctaggcgtggtgacacacccctgtaatcccagctactcaggggcctgaggcatgagaattacttgaacccaggaggcggaggttacagtgagttgagaccgtgccactgcattccagtctgggcgacagagtgagactgtgtctcaaaaacaagagatttagtccgacatttaggacttggaaagaggctgggcagagtcacatcagcacagtgagagcgccatggagcccatggtcagaaagtggcagaaaaagtgcgttttgcagtcagtgccgcagtgattctgagagtgtgagtgagaagctgcagggaggccgcagaggtctgtgcgggaatgcagccgtcagtcttctcagtcttcccgattttctcaccaaagcagtttgtgttgacaggtcacgtcaaagcaaaaagacttcctcagttttgatccccttctaattaattcctcatccatgtcactttacttctgccagcacttgctttctggtgacagcgcacgtgacatatctagaaggaacatgggttttaaaaacgtcaaggcttctgagctatttatgtgcatcaggtactaggacagtacatctaagtttagttggaagagagagaattttagttaggggtatgagctcccttagtgtgtgggcctctcctgttcatcttttcgttttaagcttttagttagagctatatgcatagagttgcagagaataaaatagtgcaggggaaaactcttcctagttccagtttacacggctcattctggtccttctgttacctccttactaataaataatgtacttggctatacctctatttcttgacttcatcattagatattatttgttgacttcgagctttaaaagatgagagttactcttctcttcctcttcccacactactgaggttgctattttatgtgctaccttgctccagtgaaacacttgcctccttagctcttttgttctgtctgctacagacagtatctcttgacccctcttttggcagtccatcttctccttacctctcccacccctgtcatagccaggcttcccacctgtcctgtgactttccccgttgtcaaggttgagaacatgtgcattctgtcctataactgcagttaagcctcactcttgtctgttggcttagtctaaaaagttgcagtgtgacaattctttcttgtatgattatgaccatatcattcatggcagagtcacatagtgtactgtgattatattccattcttttatagcctttttcctggagtttctattttttctcttgatcttactttcaattgttttcctatgaagcttctcacggtatcagctgtttacggagactcctttcatatcactgttttttgactctgatttcagaggtgatttgttggtgtgctaccatcgtagctgagaatttagcttacttgccacctcatctggagccccttccttagtcctcctcatcacgtgtgccttctccatcctctcctccctattctgttatcactgtgggcagttgatgagttattgccttaaattgtctggctttctcgggtgctgccttcaaccttagcacgtttctagtgcctgcctccgtttcccatggttgaattaggctattggcagagctagtggttgaaaatttgtggcttacaaaatgctgagttgcttttatgtcattgtataccttatttcctacctgtaatgctgtgctgtgtccagtgatgctgtttgtggtttgatatgcatttttaaagagacttagtctcctgtgcttgcattaaagttggacaatggtgacatgaatgaaggtgccaactggttctaataacagtagcctgttgatgaacaaaaatagtaagcacttggggttgtgcggaattccagctctctgacagactctgaggctacctgtgctatctcttcagttagcaaaaggtgtgacaagcaacctgcctatgccccaaccaccacagaccaccagccgcaccccaactaccccgcccagaagtgtaagtatgaacctgtcttacgaaagctgccggggcttcttcctggtatgcagaaggcttgttctgtgtgtgtccgtgtatgtgttcctttgtgggtgtgtcttctcctgttcttttgagttgtgggtcttcctttgcaacgtttcttcttcgctgtgcctctggtcgccatcacaaactgcattaggaaatgagagcgagcatgtggcctggcttcttgatggagatcgtcctcgctcttttcataaagggtcctagatgaacaccgattccctcctgtggtgattggctatggcagccagtgtcccgtgtcctctccatatgaggagtgagggcctgcagatccctccattggccagcctggttctgggagagagatactgaactcagcttggccctggtcccatttcttccagtacccgctggtggtctctgccctcaccagagctggaaggacttgatgtggtttgaccacatcactgtaggattttctcccagatggggatgaccagctgcatcactccccagagtccttccggagaaataaaagcataggcatggcggctaagggaagaaggcataagaaggcagattgaggattgttaagaagactccgcccttgcccccagctctgcctaccatagtattgctcccttttggtcactgatgcacatgactaagaagagttctctcctgagtaactacatgactttggagatctttgtcattctcttcactgcttatcttccagaactcatgattacccacacatgcctttttaccaggcagtaagaaatgcagcccccctaggtagtagcatggtcccctccttggcccactccactcttgccctcaacctctttcaaccaaacattatcacccaccttaagaaattaaaaaataattctgtcccagtctgtctgaacttagtacatgatccaggatgtgatgggatcttagggcttggctggaaggtttctccagtcagccatctagcagagctgcagatctgggctgggctgttggctaaagtgctcttcacagacacctcattcggctcttccttcagcttcttcacttatttcttactcagtcactactcagctccttgtccatgtgtccttgaagccatcctaggtcttattctgattctgaattcttcagtcacccataagcttgtccttaccgggagtcagtgggtgtgtgttcccaggtggacttaaccattcttctcctttatgatcctttcccttgggtggacaagtgtgatttggttgtaaggccatttttcaagttgcctatacattgataaaagaaatcccactaacggaagtagactgcatgccaaatttcagtgtctttctccaggggccaaggttggacccagaagtgcatggggtgcttggtgtcgttcagtgatgtagtaaggatacacggttccagacacggcacaagaaatgccttccttggcagttcagcaccttttctacaaatctttattctctgtgagcatgacaccctaccgttttttcaaccggttgtcgttaaatcctaaaaaataagttgttctacctttctgttctacagacccacagatgcagggcagtcagcggtggcagtgtttgaaccatcaattgggaggggaaggtggtttcctgtgcaggaggggcaggtcagattgcaggatagttgtgctcaggcgcaggtgggcaggcacgctaaacacattggttttccccctcagaccattcccggagtaataaatccagttggagcagcagtgatgagaagaggggatcgacacgttccgatcacaacaccagtaccagcacgaagagcctcctcccgaaagagtctcggctggacaccttctgggactagcagtgaatcgggacacaaaccacccaccccattgggagaaaaacccagacgccaggaaaagaagaaacaacaaaggcaggagaacagccactttcagacttgaaaatgacaaaaccctcagttgagcctgagcccccggcgcgggggctgctacactacaggacacccagcatcggctttgactgcagactgttcacccacacgagccctgtgcttttggtgtaaataatgtacaatttgtggatgtcattgaatctagaggactttcccctttttatatttgtattaactttaacttattaaaaaaaaaaaaagaaaaagaaaaacgatttaaaaaaaaaaaaaaaagcaaccaaccccaacaacaaaaaagaatgttttggtattggagaagggatggtcagttagcctgtctgtcacacgacggaatggatactgggcccggggaccactttcatactcacgtcctcatccttggatacccaggggagggcgaaccgttttcgctcgtgtgtctgtacgcagcatgttgggatcgggagtttcggcacagactatcccatcaagccgttggctcctttcagctactacgttaccacgttcctaaaacgcaagctctccggaccagacggacacagggagaagctagtttctttcatgtgattgaaatgatgactctactcctaaaagggaaaaaacaatatccttgtttacagaagagaaacaaacaagccccactcagctcagtcacaggagagaacacagaaagtcttaggatcatgaactctgaaaaaaagagaaaccttatctttgctttgtggttcctttaaacacactcacacacacttggtcagagatgctgtgcttcttggaagcaaggactcaaaggcaaggtgcacgcagaggacgtttgagtctgggatgaagcatgtacgtattatttatatgatggaatttcacgtttttatgtaagcatgaaacacaggcagtatgagagaaagcaaggcccgtcatgctgtccgtacactacgtatgctgtagagccattttgtatgttgtgtaaaacaaaaagcattgatgaaaaagcaaaaggtgatgtatgtatatgagaaaattaattgtacgatatcattccagtacgttttgttgtacattttagtcttgtttactttctcttcattgttaagaggatgcgaactgtacagtttccagctagttacccatattagagaagaaataagagagtattagaagaaaacaggagagaaagaacatttgtgaattgcagttgtcaaaaaaaaaaaatagcctagctggccttatttgtgaagcataattgcttttagcatatggaagtattttttcacattttctttgtataaaatttgtattaaacttaaatatctttttgatggtggtgtttctttgtgactgagccagtagactcacactatatgcttttttgggtttgcccgttccttcccccacccccccagttttttcagatttttttacctttttttaattaaactgttttggaaaaatgccgtggtcgtcctcgaatttgcagttttccatttggtcgggatggctgtgtcaggtttgcacgaccaaacacagaaggggccgtgagaggtcatgaacaccccccacagccaggtggtgggcacactggagagaatgggccctagtgggtgccccccacgccagtcctcgtcaaacagttgggagaggacggagttgtcttcttgaagcccgtagggaggccgagctaacaggcctcgcgtgggcagcaaggatcccagcccctcgcaggtgccctggtccatggctctgggcctggctggaggtgcacagggtatgagtagaatgaagccggcttgaaaggctgaggtttggtttcctgggcagcagtgttccttctctgcaatccagtaactccccagaaaagatctccacaaaccccttcctgtgccaagggccaagacatgacatggccggcaggggaggttggcccgcgtgggcataagttcattcctgccaatcagcaaacacacatcgcgtcaggcactgtccaggcactgaggatcccatggtgccatcaaggagtcgggtccctgccttcatcaaacttgcatcctaatggggacaacaatcgttcagttactcaagtattacaggggacctgtcattagccatgcacagtttcagttactggggacagatggtgagcagggcacaggagccctgtcagggtgggcctctcattcttcacaggaagacagactgtctacaagttattctcattttttgttttttttgagacggattctcgccccgtcacccaggctgcagtgcagtggcgcaatctcagctcactgcaacctccgcctcctgggttcaagcaattctggtgcctcagcctcccaagtagctggggattcagatgtgcaccaccatgcctggctcattttttggtatttttagagacgagggtttcacatattccccaggctgggcttgaactcctgacttgaagtgatctgcctgtctcagactcccaaagtgctgggattacaggtgtaagccatggcacctggactctcctctttttttggagggagagtctccatcacccaggctggagtgcagtggtgtgatagctcactgcaaactcagcctcccgggttgaagcaattctcctgcctcagcctcccgagtagctgggattacaggtgcctaccacccatgcccagctaatttttgtatttttagtagagatggggttttcgccatgttggccaggctggtctcgaactccttgtctcaggtgatccacccaccttggcctcccaagtcttttttttttttgagacagagttttgctcttgttgcccaggctggagtgcaatggcgcgatcttggctcactgcaacctccgcctcccgggttcaagcaattctgcttcagcctcccgagtagttggggttacgggcatccaccaccacgcccagctaattttgtatttttagtagagatgaggtttctccatgttggtcaggctggtctcgaactcccaaccccaggtgatccgcctgcctcagcctcccaaagtgctgggattacaggtgtgagccaccgtgcctagcctccaagtcatttttttaagtgagaagaatgttagcttcccgttcctgggcatgtgtgtgcacctttcctctgttgtctcatttcatcctgaagaccagagaaaggaggggccatggctacgaggggtcatccattgtcttctttcagctcctgcctttctagtctcaactgcactctctgctcctttgacctgataccctcttctgtggctggtacctgattcttcagatgtcactcctgaaatagccacctgcccacgggcccatcatgccctcaatattttcttcatatctctgagcaaagggtgtggggttttattacttctcctgtgtgtcccagttgaatgtgagctgggtgagggaggtgctttctctgttccctgctgtgtccccagggcttggacacaatgaaggtcatgccactcctaagtagcgagcagccagcagctgggctcctaagtagcgagtagccagcagcgcagcattcaaatgcagaggccaccttgaggtgtcccactgcacccccatccagcctctgccgcaacctcccttagaagcaaagacatctagggaagtggcttgcttactcgaggatagagaaatggttgcttttagttttaccattcatctgaccaggtaaaacagcccacatgactcaaatctgaagatacgaaagggcccatagtataaagcctctccctccctgctacctcggtcccctccaatcccccttcccacatagtcctcagggagagtctgcatttacaaacaaatgcagagacatttttctctgctccttttcttcttttttaagacggagtctcgctctgtcgcccaagctggagtgcagtggcgcaatctcagctcactacaacatccacctcctggattcaagcaatttttctgcttcagcctaccgagtagctgggattaagggcacccgccacaatgcccagctgagttttgtatttttagtagagacagggtttcaccatgttgaccaggctggtcttgaactcctgacctcaggtgatctgcccgcctcggtgtcctaaagtgctgggattacaggcatgagccactgctcccggccccctttttctacataaatgatagcatttgatacacactcttctgccctgtccccttgccccgttttttttttttaaacttaatctgaagccttgagtattgatccatatcagtgcagttcaagagcacctccatccatttttagggggtgtgatatctgctatgtggacacgggataatgcatgtggccagcccccagctggtggacattgagattgtccccaaactctggccacggcaaacggccctgcagtgagcaccattataaaatgactccccaggctcctcttagctgcccagtggggtggttattccactctttgtgcagcttggaaaactgagactcaggggttacatgcatttggaggggtcaggtttttagttgcaaataacagaatccactccacctaattagaacactctctaatctgcttacttctcaggccacaccagtgggtcagtgagaggccaggtaggaggggaggggcttgaaggttccagtctgggttgagtgttttcagaatgaggagaagaagagggagatgcagtgaggtctggtgaacctggcagaagctgccagttccttgctggtttcctttggcaatgaccggggcaggaactggctcagaccttttcatgcagtccagcaagctcgctatctggtggccataggcaaaactgcagcctgtggagagatctggcccactggggacagcgagcacgtgggccaaaacccttcattccggagacagctgttcactgagctctctgtatgagtcaagtcctcagtagtgacacagtagtgaacaaaacaggttcggtctctgtccttattgatctgacactctcactgggaagcaatttgatacctgtatgcatgtaatataatcccaggcgggctagatgcgctgaaggtaaataaagctaggcgggtagggagatgatgtgattgggagccctctctgaggggctcaccgttcagtagaacctgaagggggtttctttccgaggggactgagcccaattattttatttatttattttttgagacaaggtcttgctctgtcgcccaggcttgagtgctatagggacgtctctgctcacagcaacttccgcctcccaggctcaccccatcctcccgcctcagcctcctgagcagctgggactacaggcacacgccaccatgcccaactaatttttaaatttttttgcagagacggggtttcacaatgttgcccaggctggtcttgaactcgtgagctcaagcgactcacccgccttggcctcctaaagtgctgggattataagtgtgagccagtgtgcctgtctattttattattttattttattttgagacagagtctcactctgttgcccaggctggagtgcagtggcacgattttggctcactgcaacttccgcctcccgggttcaagcaatttctggctaatttttgtattttttgtagagacggggtttcaccatgttggcctggctggtctcaaactcctgacctcaacgatccacctgccttggcctcccaaagtgttagtattacaggcatgagtcaccgcgcccggccgaccgtccattttaaactatacagtcgagtggcgataatcagagttgagttttccaaaggtcagcatttagctgccaccttcatatcagggtacatcaggaccccatctatattcttatttattttctttagtctagagaagcaaaggtcacctatattcctccaagtgtcgctgatgtgggcctgccccacgtggggctctgtgctgaggctttccatgctgtaatccttcgggttttgtaataactccctacatggagcaggccctcgtaacaggcccattctcccagtgaggcagctgaggttcagagagaaaaaagtgacttgctcaagatcacacaaaaggtcactgcagagccgggactcaaaccagtctgcttacttcccaagccagttcagtgaatcatcaggcaacactgccccagtcacaactagccctgtgtgtgtgtgtgtgacaccgtggtgagtttacaaaatgactccccaggcttctcttagctgccctggggtggttattccactctgtgcagctcgggaaacggacacttgggggatacatgaattgggaggggtcaggtttttagttgcaaataacagaatgcactccagctaatttgagcagaaaaggcatttgttaaaggatattgagtggctcacaaatccctgggaaggccagagagatggattaggagattgcacagcaaccaacaatgtccagattacattgcaggacctttgtgttaagacttcccacattggccaggcatggtggctaacgcatgtaatcccagcactttgggaagctgaggcgggcagatcacctgaagtcaggagtttgagaccagcctggccaacatggcgaaaccctgtctctattacaaatacaaaaattagcaggggcatggtggtgtacgcctgtagtcccagctactcgggaggctgaggtaggagaatcacttgaacccaggaagtggaagctgcagtgagctttgactgcaccactgcactccatcctgggtgacagagcaagactccgtctgaaaaaaaaaaaaaaaagacttcccacatcactgccccattgggttcaaacactgcgactttctctagtgacgctgggcacgacccttctgcctccttgccagattggattccatgcatcagaatccacttccattgctttcacatgtggatgtatctggattggttgagcccaggtcccatgtgggtgcatctgattgactgaacctaagcaccatttaggtgttgtattagtccattttcacactgctataaagaactacctgagactgggtaatttataaagaaaagaggtttaactgactcacacttctgcagggctggggaagcctcaggaaacttagaatcatggcagaaggcaaaggggaagcaaagcatgtcttacatggtggcaggagagggagttcaaagggggaagtgccttacttttaagcatcagatcttgtgagaactcactatcacgagaacggcaagggggagatccaccctcacagttcaatcacctcccaccaggcacctcctctgacacatggggcttacaattcgagatgagatttgggtggggacacagagccaaaccatatcaggggtatttgattgctgagcctgggtgccacctgggtgtatgtgattggctgagcctaggccacatagctaaccttctaactgcaaaggaggctgggaaagtgagattcaagcctcttctggtgcagactcataagttgggaaagtgttcaaacaaaaggtcttgtgtggacaaaacgatgacagtacccactgcagaactgtccaaggtctctgtcagcctggtcagttgtagagagcagaattcacccaaccagtttaagcacaaggcattagtaagtgtactggtcagttccgtgccaacctggctaggctggaaccacatttcccagaatcctggctctcgagtggttcccagttagagttgaccaaaagaggagctgtgtgagatttccaaggctgtaaggaagccacagcctctactgttgcaaggtcgctgtagttagatgtgggacagacaactgcagtggcgccagcaggctccagcttgcccttgctctcctccactctgcgtccaggtcatcttcctgactcctgcatgtcagcacctggcctgtcaccagccgctggactgcagaggccacagatccccattgagtcctctgaacttgccccacagcttctcagatcaccttcttggtgactccagatctctcctcagacccctgcttccccagctcctcccacaattatgtaagatctaatacccatcatctgtgcatgactgctcccaaactcatgggctcaatctcactgatgcattaacagtatttacaagccaggcacggtggctcctgcctataatcccagcacgttgggaagctgaggcaggcggatcacttgaggtcagaagttcaagaccaacctggccaacatggtgaaaccccatctctactaaaatacaaaaattagctgggcgtggtggcaggcacctgtaatcccagctacttgggaggctgaggcaggagaatcgcttgaacccaggagacagaggtttcagtgaaccgagatcatgccatggcactccagcctgggcgacagagctagactccgtctcaaaaaacaaacaaacacaaaacaaaagaacaaaaacaaacaaaacaacaaaaacaaacaaacccccaaaacagtatttccggactcacatggagggctgaagaaagccatgaggtctgagcttccaggaagccaccgaagccaccgtgcaggactgggctgcaaagaaacagatgcaccgaggccacaaccacgctggccctaggctggtccacaccgccacgtgcagtcacttttctccccacttaatccgtaccaaatgcagctgatgggtggaaccttgaatatatcagacgcctggctgaatagagcctgaggaataagttgtttttcttttttttgagacagagtctcattctgttacccaggctggagtgcagtggcgtgatctcggctcactgcaacctccgcctcccgggttcaagcgattcccgtgcctcagcctcctgagtagctgggattataggcgtgtgccatcatgctcagctgattttggtaattgcagtaaagacaggttttcaccttataggccaggctgatctagaactcctggccttaagtgatcctcccatcttggcctcctaaagtaatgtggttacaggtgtgagccactgggcccagccggtttttagtttagttcagaaaaccaccccagaagaatgatcagatgttgaacaagccagttctcatacatgtgaccagggatcaaacccgtggctttgccacctggtctagggctctaatctgcccagggcactcttttcagattgtggtgttaatggaaaactgtggccttcctggtcccacagatagcctaagcctgggccagttgggtactacaagctttattaagacagctgagtactgaccttggttcactttgatgaacccgagagggaaacttcatttacatacacagcacctcctgtgctccaggcaatttctgcacattgcatcctaatgacctgcattttgcagcaaaggacatcaggtccagagggattgaggctacacagcttgtgcgtagccgaagctggacttgaacccagtctaatgacacaaataatgcctgctcttttttttttttttttttttgagacagagtttcgctcttgttgtccaggctggagtgcagtggcgcaactttggctcaccacaacctctgccttccgggttgaagcgattctcctgcctcagcctcccaagtagctgggattataggcatgagccaccatgcctggctaatttttgcatttttagtagagacggggtttcaccatgttagccaggctggtctccaactcctgaccttgtgatccacccgcctcggcctcccaaagtgctgggattacaggcgtgagccaccgcgccccgcccaaaaaatgcctgctcttaaccatgactatatctttgtcatcattggagaaacttttgtataaaagccacaagttaattattaactagggacttactcttcactgggctgtgtttcaggtgctggggacacaactgtggacaaaagagacaagacgtagacatagggtagtgagttcagctggggtttgctcccaggacccaggcaggggatataagctagggaaacaggctggggtaacactgacatagatatgctttctttgtatagtaaacatgttagaggccaggcgcggtgactcacgcctgtaatcctagcactttaggaggccgaggtggatggatcacctgaggtcagaagttcgagaccagcctggccaacatggtgaaacccccgtcttgttgcacgggagcgagttagagaaaacaccacacttttgagacgaattaagtctgtttatttagccggcggctaagagatggcttacgcttaaagttctttcggccttgaagaaggggctagattttcttttatactttggtttagaaagggggggggtctagttaaaacaattttacagaaataaagtaggcaaaaaagttaaaaggataaatggttacaggaaagtaaacagttctaggtgcagaggctttaagattattacaaggtgatagacgcggggctttttttgggcgttatcaatcaggcgaattcctgggaactgcggatattgctcgccacattatcttatcagtgaattgcattcttggatgtgctgggagtcagtttgcacaagttaagtccttgaggaaggcgctgccagtgaaagagccaagatggagtctgtctggctctcttagctaagggagagtcaattaaggtggaactaaggctaggtgattaaaggaaagagggagagtctaaaaacaaggttagtaaaaacaagcttaggcattacagtctctactaaaaatacaaaaattagccgggcgtggtggcgagtgcctgtaattccagctacttgagaggctgaggcaggaaaattgtttgaacctgggaggcggaggttgcagtgagccgagatcgcgccacttcactacagcctgggagaaagaacgaagcttcgtctcaaaaaaccaaaaaccaaacaacaacaataacaacaaaaacacgtgtttgaataatctgtgcatttttttaatctttttttttttttttgagacagggtctccctctgttgcccaggctggagtgcagtgacacaatcatagctcactgcaaagtggcacaatcatagctcactacaacctcgacctcctgggctcaagccatcctcctgcctcagcctcccgagtggctgggaccacaagtgcacaccactacgcccagttacttatttatttttgtagagatgggggtctcactatattgcccggcctggtctcaaactcctgggctcaaatgattctcccacctcagtctcccgaagcactgtgattgcaggtgtgagccaccgtgttccaccattgcttttcttgaaatatgtaagccctttggtttagtttttatttttccacttttgacagaaaaaatatttctccactatgagaataacagctggctggtgtgtggatcaatggcaaccgatgcttgacttcgg

SEQ ID NO: 161 - DNA, 3423 bp, Homo sapiens
gatggctcttgctcacccgagcctcacaaagataatcgctcaggaagtgtttcagccaatccggggcggctttacactccgatttgccggggcagccaatcggggatgagcttttattaggcggccagatcatcagccgaagtgccaaaccctttttctgtgagaactaggagcctgtcctccatgttttataagtattgacattacacagtgttaacaatgcatccacagagcttggctgaagaggaaataaaaacagaacaggaggtggtagagggcatggatatctctactcgctccaaagatcctggctctgcagagagaacagcccagaaaagaaagttccccagccctccacattcttccaatggccactcgccgcaggacacatcaacaagccccattaaaaagaaaaagaaacctggcttactgaacagtaacaataaggagcagtcagaactaagacatggtccgttttactatatgaagcagccactcaccacagaccctgttgatgttgtaccgcaggatggacggaatgatttctactgctgggtttgtcaccgggaaggccaagtcctttgctgtgagctctgtccccgggtttatcacgctaagtgtctgagactgacatcggaaccagagggggactggttttgtcctgaatgtgagaaaattacagtagcagaatgcatcgagacccagagtaaagccatgacaatgctcaccattgaacagttatcctacctgctcaagtttgccattcagaaaatgaaacagccagggacagatgcattccagaagcccgttccattggaacagcaccctgactatgcggaatacatcttccatccaatggacctttgtacattggaaaagaatgcgaaaaagaaaatgtatggctgcacagaagccttcctggctgatgcaaagtggattttgcacaactgcatcatttataatgggggaaatcacaaattgacgcaaatagcgaaagtagtcatcaaaatctgtgaacatgagatgaatgaaatcgaagtatgtccagaatgttatctagctgcttgccaaaaacgagataactggttttgtgagccttgtagcaatccacatcctttggtctgggccaaactgaaggggtttccattctggcctgcaaaagctctaagggataaagacgggcaggtcgatgcccgattctttggacaacatgacagggcctgggttccaataaataattgctacctcatgtctaaagaaattcctttttctgtgaaaaagactaagagcatcttcaacagtgccatgcaagagatggaggtttacgtggagaacatccgcaggaagtttggggtttttaattactctccatttaggacaccctacacacccaacagccagtatcaaatgctgctcgatcccaccaaccccagcgccggcactgccaagatagacaagcaggagaaggtcaagctcaactttgacatgacggcatcccccaagatcctgatgagcaagcctgtgctgagtgggggcacaggccgccggatttccttgtcggatatgccgcgctcccccatgagcacaaactcttctgtgcacacgggctccgacgtggagcaggatgctgagaagaaggccacgtcgagccacttcagtgcgagcgaggagtccatggacttcctggataagagcacagcttcaccagcctccaccaagacgggacaagcagggagtttatccggcagcccaaagcccttctctcctcaactgtcagctcctatcacgacgaaaacggacaaaacctccaccaccggcagcatcctgaatcttaacctggatcgaagcaaagctgagatggatttgaaggagctgagcgagtcggtccagcaacagtccacccctgttcctctcatctctcccaagcgccagattcgtagcaggttccagctgaatcttgacaagaccatagagagttgcaaagcacaattaggcataaatgaaatctcggaagatgtctatacggccgtagagcacagcgattcggaggattctgagaagtcagatagtagcgatagtgagtatatcagtgatgatgagcagaagtctaagaacgagccagaagacacagaggacaaagaaggttgtcagatggacaaagagccatctgctgttaaaaaaaagcccaagcctacaaacccagtggagattaaagaggagctgaaaagcacgtcaccagccagcgagaaggcagaccctggagcagtcaaggacaaggccagccctgagcctgagaaggacttttccgaaaaggcaaaaccttcacctcaccccataaaggataaactgaagggaaaagatgagacggattccccaacagtccatttgggcctggactctgattcagagagcgaacttgtcatagatttaggagaagaccattctgggcgggagggtcgaaaaaataagaaggaacccaaagaaccatctcccaaacaggatgttgtaggtaaaactccaccatccacgacggtgggcagccattctcccccggaaacaccggtgctcacccgctcttccgcccaaacttccgcggctggcgccacagccaccaccagcacgtcctccacggtcaccgtcacggccccggcccccgccgccacaggaagcccagtgaaaaagcagaggccgcttttaccgaaggagactgccccggccgtgcagcgggtcgtgtggaactcatcaagtaagtttcaaacgtcctcccaaaagtggcacatgcagaagatgcagcgtcagcagcagcagcagcagcagcaaaaccagcagcagcagcctcagtcttcccaggggacgagatatcagaccagacaggctgtgaaaggtaccgagcctccccttctgttctccgtggcgcccgctcccattttgccacatcgacaggagaaagtcattgctcttttattttttttttttagttctcgtttgtttccgggccattgtatcttgaaggccttgcacattccatttggcattatttttaaaaattgttttgctacttgcttttttactttcaaaaagttttttttgttcattttataaatgatacatgcatatattctccttaaaaagggggcagaaagttttacataaaagtctgttatcccgtttaccttccatttcattctcttcccttccacagtggccagtatcaaccgttgtaaaagcttttctatgcatgtatgcatgtatatgtatatatacatatctgtatgtatatatgtgcgcatcatgtatatgatgccataaaattagtcctttttcccccctttttttcttttttaaaacataaaaatggtaccatacttgcttttttcccccacccatcagcatgttttggaggtccatccacatcagcacata

SEQ ID NO: 162 - protein, 954 aa, Homo sapiens
MHPQSLAEEEIKTEQEVVEGMDISTRSKDPGSAERTAQKRKFPSPPHSSNGHSPQDTSTSPIKKKKKPGLLNSNNKEQSELRHGPFYYMKQPLTTDPVDVVPQDGRNDFYCWVCHREGQVLCCELCPRVYHAKCLRLTSEPEGDWFCPECEKITVAECIETQSKAMTMLTIEQLSYLLKFAIQKMKQPGTDAFQKPVPLEQHPDYAEYIFHPMDLCTLEKNAKKKMYGCTEAFLADAKWILHNCIIYNGGNHKLTQIAKVVIKICEHEMNEIEVCPECYLAACQKRDNWFCEPCSNPHPLVWAKLKGFPFWPAKALRDKDGQVDARFFGQHDRAWVPINNCYLMSKEIPFSVKKTKSIFNSAMQEMEVYVENIRRKFGVFNYSPFRTPYTPNSQYQMLLDPTNPSAGTAKIDKQEKVKLNFDMTDKILMSKPVLSGGTGRRISLSDMPRSPMSTNSSVHTGSDVEQDAEKKATSSHFSASEESMDFLDKSTDASTKTGQAGSLSGSPKPFSPQLSAPITTKTDKTSTTGSILNLNLDRSKAEMDLKELSESVQQQSTPVPLISPKRQIRSRFQLNLDKTIESCKAQLGINEISEDVYTAVEHSDSEDSEKSDSSDSEYISDDEQKSKNEPEDTEDKEGCQMDKEPSAVKKKPKPTNPVEIKEELKSTSPASEKADPGAVKDKDEPEKDFSEKAKPSPHPIKDKLKGKDETDSPTVHLGLDSDSESELVIDLGEDHSGREGRKNKKEPKEPSPKQDVVGKTPPSTTVGSHSPPETPVLTRSSAQTSAAGATATTSTSSTVTVTAPAPAATGSPVKKQRPLLPKETAPAVQRVVWNSSSKFQTSSQKWHMQKMQRQQQQQQQQNQQQQPQSSQGTRYQTRQAVKGTEPPLLFSVAPAPILPHRQEKVIALLFFFFSSRLFPGHCILKALHIPFGIIFKNCFATCFFTFKKFFLFIL

SEQ ID NO: 163 - DNA, 1704 bp, Homo sapiens
gaggccgctgaggatccggaagcaggaatgtctgctgtgggtgagcctctgttctcttttgaacaagagaggctaggccctctgagcagccgcactttctcaatggcagatcctggctctgcagagagaacagcccagaaaagaaagttccccagccctccacattcttccaatggccactcgccgcaggacacatcaacaagccccattaaaaagaaaaagaaacctggcttactgaacagtaacaataaggagcagtcagaactaagacatggtccgttttactatatgaagcagccactcaccacagaccctgttgatgttgtaccgcaggatggacggaatgatttctactgctgggtttgtcaccgggaaggccaagtcctttgctgtgagctctgtccccgggtttatcacgctaagtgtctgagactgacatcggaaccagagggggactggttttgtcctgaatgtgagaaaattacagtagcagaatgcatcgagacccagagtaaagccatgacaatgctcaccattgaacagttatcctacctgctcaagtttgccattcagaaaatgaaacagccagggacagatgcattccagaagcccgttccattggaacagcaccctgactatgcggaatacatcttccatccaatggacctttgtacattggaaaagaatgcgaaaaagaaaatgtatggctgcacagaagccttcctggctgatgcaaagtggattttgcacaactgcatcatttataatgggggaaatcacaaattgacgcaaatagcgaaagtagtcatcaaaatctgtgaacatgagatgaatgaaatcgaagtatgtccagaatgttatctagctgcttgccaaaaacgagataactggttttgtgagccttgtagcaatccacatcctttggtctgggccaaactgaaggggtttccattctggcctgcaaaagctctaagggataaagacgggcaggtcgatgcccgattctttggacaacatgacagggcctgggttccaataaataattgctacctcatgtctaaagaaattcctttttctgtgaaaaagactaagagcatcttcaacagtgccatgcaagagatggaggtttacgtggagaacatccgcaggaagtttggggtttttaattactctccatttaggacaccctacacacccaacagccagtatcaaatgctgctcgatcccaccaaccccagcgccggcactgccaagatagacaagcaggagaaggtcaagctcaactttgacatgacggcatcccccaagatcctgatgagcaagcctgtgctgagtgggggcacaggccgccggatttccttgtcggatatgccgcgctcccccatgagcacaaactcttctgtgcacacgggctccgacgtggagcaggatgctgagaagaaggccacgtcgagccacttcagtgcgagcgaggagtccatggacttcctggataagagcacagcttcaccagcctccaccaagacgggacaagcagggagtttatccggcagcccaaagcccttctctcctcaactgtcagctcctatcacgacgaaaacggacaaaacctccaccaccggcagcatcctgaatcttaacctgggtcagtcagaatttttgccagtatctttctgtggcaactgtggatatttttgcaaatga

SEQ ID NO: 164 - protein, 554 aa, Homo sapiens
MSAVGEPLFSFEQERLGPLSSRTFSMADPGSAERTAQKRKFPSPPHSSNGHSPQDTSTSPIKKKKKPGLLNSNNKEQSELRHGPFYYMKQPLTTDPVDVVPQDGRNDFYCWVCHREGQVLCCELCPRVYHAKCLRLTSEPEGDWFCPECEKITVAECIETQSKAMTMLTIEQLSYLLKFAIQKMKQPGTDAFQKPVPLEQHPDYAEYIFHPMDLCTLEKNAKKKMYGCTEAFLADAKWILHNCIIYNGGNHKLTQIAKVVIKICEHEMNEIEVCPECYLAACQKRDNWFCEPCSNPHPLVWAKLKGFPFWPAKALRDKDGQVDARFFGQHDRAWVPINNCYLMSKEIPFSVKKTKSIFNSAMQEMEVYVENIRRKFGVFNYSPFRTPYTPNSQYQMLLDPTNPSAGTAKIDKQEKVKLNFDMTDKILMSKPVLSGGTGRRISLSDMPRSPMSTNSSVHTGSDVEQDAEKKATSSHFSASEESMDFLDKSTDASTKTGQAGSLSGSPKPFSPQLSAPITTKTDKTSTTGSILNLNLGQSEFLPVSFCGNCGYFCK

SEQ ID NO: 165 - DNA, 3348 bp, Homo sapiens
gatggctcttgctcacccgagcctcacaaagataatcgctcaggaagtgtttcagccaatccggggcggctttacactccgatttgccggggcagccaatcggggatgagcttttattaggcggccagatcatcagccgaagtgccaaaccctttttctgtgagaactaggagcctgtcctccatgttttataagtattgacattacacagtgttaacaatgcatccacagagcttggctgaagaggaaataaaaacagaacaggaggtggtagagggcatggatatctctactcgctccaaagatcctggctctgcagagagaacagcccagaaaagaaagttccccagccctccacattcttccaatggccactcgccgcaggacacatcaacaagccccattaaaaagaaaaagaaacctggcttactgaacagtaacaataaggagcaggatggacggaatgatttctactgctgggtttgtcaccgggaaggccaagtcctttgctgtgagctctgtccccgggtttatcacgctaagtgtctgagactgacatcggaaccagagggggactggttttgtcctgaatgtgagaaaattacagtagcagaatgcatcgagacccagagtaaagccatgacaatgctcaccattgaacagttatcctacctgctcaagtttgccattcagaaaatgaaacagccagggacagatgcattccagaagcccgttccattggaacagcaccctgactatgcggaatacatcttccatccaatggacctttgtacattggaaaagaatgcgaaaaagaaaatgtatggctgcacagaagccttcctggctgatgcaaagtggattttgcacaactgcatcatttataatgggggaaatcacaaattgacgcaaatagcgaaagtagtcatcaaaatctgtgaacatgagatgaatgaaatcgaagtatgtccagaatgttatctagctgcttgccaaaaacgagataactggttttgtgagccttgtagcaatccacatcctttggtctgggccaaactgaaggggtttccattctggcctgcaaaagctctaagggataaagacgggcaggtcgatgcccgattctttggacaacatgacagggcctgggttccaataaataattgctacctcatgtctaaagaaattcctttttctgtgaaaaagactaagagcatcttcaacagtgccatgcaagagatggaggtttacgtggagaacatccgcaggaagtttggggtttttaattactctccatttaggacaccctacacacccaacagccagtatcaaatgctgctcgatcccaccaaccccagcgccggcactgccaagatagacaagcaggagaaggtcaagctcaactttgacatgacggcatcccccaagatcctgatgagcaagcctgtgctgagtgggggcacaggccgccggatttccttgtcggatatgccgcgctcccccatgagcacaaactcttctgtgcacacgggctccgacgtggagcaggatgctgagaagaaggccacgtcgagccacttcagtgcgagcgaggagtccatggacttcctggataagagcacagcttcaccagcctccaccaagacgggacaagcagggagtttatccggcagcccaaagcccttctctcctcaactgtcagctcctatcacgacgaaaacggacaaaacctccaccaccggcagcatcctgaatcttaacctggatcgaagcaaagctgagatggatttgaaggagctgagcgagtcggtccagcaacagtccacccctgttcctctcatctctcccaagcgccagattcgtagcaggttccagctgaatcttgacaagaccatagagagttgcaaagcacaattaggcataaatgaaatctcggaagatgtctatacggccgtagagcacagcgattcggaggattctgagaagtcagatagtagcgatagtgagtatatcagtgatgatgagcagaagtctaagaacgagccagaagacacagaggacaaagaaggttgtcagatggacaaagagccatctgctgttaaaaaaaagcccaagcctacaaacccagtggagattaaagaggagctgaaaagcacgtcaccagccagcgagaaggcagaccctggagcagtcaaggacaaggccagccctgagcctgagaaggacttttccgaaaaggcaaaaccttcacctcaccccataaaggataaactgaagggaaaagatgagacggattccccaacagtccatttgggcctggactctgattcagagagcgaacttgtcatagatttaggagaagaccattctgggcgggagggtcgaaaaaataagaaggaacccaaagaaccatctcccaaacaggatgttgtaggtaaaactccaccatccacgacggtgggcagccattctcccccggaaacaccggtgctcacccgctcttccgcccaaacttccgcggctggcgccacagccaccaccagcacgtcctccacggtcaccgtcacggccccggcccccgccgccacaggaagcccagtgaaaaagcagaggccgcttttaccgaaggagactgccccggccgtgcagcgggtcgtgtggaactcatcaagtaagtttcaaacgtcctcccaaaagtggcacatgcagaagatgcagcgtcagcagcagcagcagcagcagcaaaaccagcagcagcagcctcagtcttcccaggggacgagatatcagaccagacaggctgtgaaaggtaccgagcctccccttctgttctccgtggcgcccgctcccattttgccacatcgacaggagaaagtcattgctcttttattttttttttttagttctcgtttgtttccgggccattgtatcttgaaggccttgcacattccatttggcattatttttaaaaattgttttgctacttgcttttttactttcaaaaagttttttttgttcattttataaatgatacatgcatatattctccttaaaaagggggcagaaagttttacataaaagtctgttatcccgtttaccttccatttcattctcttcccttccacagtggccagtatcaaccgttgtaaaagcttttctatgcatgtatgcatgtatatgtatatatacatatctgtatgtatatatgtgcgcatcatgtatatgatgccataaaattagtcctttttcccccctttttttcttttttaaaacataaaaatggtaccatacttgcttttttcccccacccatcagcatgttttggaggtccatccacatcagcacata

SEQ ID NO: 166 - protein, 929 aa, Homo sapiens
MHPQSLAEEEIKTEQEVVEGMDISTRSKDPGSAERTAQKRKFPSPPHSSNGHSPQDTSTSPIKKKKKPGLLNSNNKEQDGRNDFYCWVCHREGQVLCCELCPRVYHAKCLRLTSEPEGDWFCPECEKITVAECIETQSKAMTMLTIEQLSYLLKFAIQKMKQPGTDAFQKPVPLEQHPDYAEYIFHPMDLCTLEKNAKKKMYGCTEAFLADAKWILHNCIIYNGGNHKLTQIAKVVIKICEHEMNEIEVCPECYLAACQKRDNWFCEPCSNPHPLVWAKLKGFPFWPAKALRDKDGQVDARFFGQHDRAWVPINNCYLMSKEIPFSVKKTKSIFNSAMQEMEVYVENIRRKFGVFNYSPFRTPYTPNSQYQMLLDPTNPSAGTAKIDKQEKVKLNFDMTDKILMSKPVLSGGTGRRISLSDMPRSPMSTNSSVHTGSDVEQDAEKKATSSHFSASEESMDFLDKSTDASTKTGQAGSLSGSPKPFSPQLSAPITTKTDKTSTTGSILNLNLDRSKAEMDLKELSESVQQQSTPVPLISPKRQIRSRFQLNLDKTIESCKAQLGINEISEDVYTAVEHSDSEDSEKSDSSDSEYISDDEQKSKNEPEDTEDKEGCQMDKEPSAVKKKPKPTNPVEIKEELKSTSPASEKADPGAVKDKDEPEKDFSEKAKPSPHPIKDKLKGKDETDSPTVHLGLDSDSESELVIDLGEDHSGREGRKNKKEPKEPSPKQDVVGKTPPSTTVGSHSPPETPVLTRSSAQTSAAGATATTSTSSTVTVTAPAPAATGSPVKKQRPLLPKETAPAVQRVVWNSSSKFQTSSQKWHMQKMQRQQQQQQQQNQQQQPQSSQGTRYQTRQAVKGTEPPLLFSVAPAPILPHRQEKVIALLFFFFSSRLFPGHCILKALHIPFGIIFKNCFATCFFTFKKFFLFIL

SEQ ID NO: 167 - DNA, 5248 bp, Homo sapiens
gatggctcttgctcacccgagcctcacaaagataatcgctcaggaagtgtttcagccaatccggggcggctttacactccgatttgccggggcagccaatcggggatgagcttttattaggcggccagatcatcagccgaagtgccaaaccctttttctgtgagaactaggagcctgtcctccatgttttataagtattgacattacacagtgttaacaatgcatccacagagcttggctgaagaggaaataaaaacagaacaggaggtggtagagggcatggatatctctactcgctccaaagatcctggctctgcagagagaacagcccagaaaagaaagttccccagccctccacattcttccaatggccactcgccgcaggacacatcaacaagccccattaaaaagaaaaagaaacctggcttactgaacagtaacaataaggagcaggatggacggaatgatttctactgctgggtttgtcaccgggaaggccaagtcctttgctgtgagctctgtccccgggtttatcacgctaagtgtctgagactgacatcggaaccagagggggactggttttgtcctgaatgtgagaaaattacagtagcagaatgcatcgagacccagagtaaagccatgacaatgctcaccattgaacagttatcctacctgctcaagtttgccattcagaaaatgaaacagccagggacagatgcattccagaagcccgttccattggaacagcaccctgactatgcggaatacatcttccatccaatggacctttgtacattggaaaagaatgcgaaaaagaaaatgtatggctgcacagaagccttcctggctgatgcaaagtggattttgcacaactgcatcatttataatgggggaaatcacaaattgacgcaaatagcgaaagtagtcatcaaaatctgtgaacatgagatgaatgaaatcgaagtatgtccagaatgttatctagctgcttgccaaaaacgagataactggttttgtgagccttgtagcaatccacatcctttggtctgggccaaactgaaggggtttccattctggcctgcaaaagctctaagggataaagacgggcaggtcgatgcccgattctttggacaacatgacagggcctgggttccaataaataattgctacctcatgtctaaagaaattcctttttctgtgaaaaagactaagagcatcttcaacagtgccatgcaagagatggaggtttacgtggagaacatccgcaggaagtttggggtttttaattactctccatttaggacaccctacacacccaacagccagtatcaaatgctgctcgatcccaccaaccccagcgccggcactgccaagatagacaagcaggagaaggtcaagctcaactttgacatgacggcatcccccaagatcctgatgagcaagcctgtgctgagtgggggcacaggccgccggatttccttgtcggatatgccgcgctcccccatgagcacaaactcttctgtgcacacgggctccgacgtggagcaggatgctgagaagaaggccacgtcgagccacttcagtgcgagcgaggagtccatggacttcctggataagagcacagcttcaccagcctccaccaagacgggacaagcagggagtttatccggcagcccaaagcccttctctcctcaactgtcagctcctatcacgacgaaaacggacaaaacctccaccaccggcagcatcctgaatcttaacctggatcgaagcaaagctgagatggatttgaaggagctgagcgagtcggtccagcaacagtccacccctgttcctctcatctctcccaagcgccagattcgtagcaggttccagctgaatcttgacaagaccatagagagttgcaaagcacaattaggcataaatgaaatctcggaagatgtctatacggccgtagagcacagcgattcggaggattctgagaagtcagatagtagcgatagtgagtatatcagtgatgatgagcagaagtctaagaacgagccagaagacacagaggacaaagaaggttgtcagatggacaaagagccatctgctgttaaaaaaaagcccaagcctacaaacccagtggagattaaagaggagctgaaaagcacgtcaccagccagcgagaaggcagaccctggagcagtcaaggacaaggccagccctgagcctgagaaggacttttccgaaaaggcaaaaccttcacctcaccccataaaggataaactgaagggaaaagatgagacggattccccaacagtccatttgggcctggactctgattcagagagcgaacttgtcatagatttaggagaagaccattctgggcgggagggtcgaaaaaataagaaggaacccaaagaaccatctcccaaacaggatgttgtaggtaaaactccaccatccacgacggtgggcagccattctcccccggaaacaccggtgctcacccgctcttccgcccaaacttccgcggctggcgccacagccaccaccagcacgtcctccacggtcaccgtcacggccccggcccccgccgccacaggaagcccagtgaaaaagcagaggccgcttttaccgaaggagactgccccggccgtgcagcgggtcgtgtggaactcatcaactgtccagcagaaggagatcacacagagcccatccacgtccaccatcaccctggtgaccagcacacagtcatcgcccctggtcaccagctcggggtccatgagcacccttgtgtcctcagtcaacgctgacctgcccatcgccactgcctcagctgatgtcgccgctgatattgccaagtacactagcaaaatgatggatgcaataaaaggaacaatgacagaaatatacaacgatctttctaaaaacactactggaagcacaatagctgagattcgcaggctgaggatcgagatagagaagctccagtggctgcaccagcaagagctctccgaaatgaaacacaacttagagctgaccatggcggagatgcggcagagcctggagcaggagcgggaccggctcatcgccgaggtgaagaagcagctggagttggagaagcagcaggcggtggatgagaccaagaagaagcagtggtgcgccaactgcaagaaggaggccatcttttactgctgttggaacaccagctactgtgactacccctgccagcaagcccactggcctgagcacatgaagtcctgcacccagtcagctactgctcctcagcaggaagcggatgctgaggtgaacacagaaacactaaataagtcctcccaggggagctcctcgagcacacaatcagcaccttcagaaacggccagcgcctccaaagagaaggagacgtcagctgagaaaagcaaggagagtggctcgacccttgacctttctggctccagagagacgccctcctccattctcttaggctccaaccaaggctctgttagcaaaaggtgtgacaagcaacctgcctatgccccaaccaccacagaccaccagccgcaccccaactaccccgcccagaagtaccattcccggagtaataaatccagttggagcagcagtgatgagaagaggggatcgacacgttccgatcacaacaccagtaccagcacgaagagcctcctcccgaaagagtctcggctggacaccttctgggactagcagtgaatcgggacacaaaccacccaccccattgggagaaaaacccagacgccaggaaaagaagaaacaacaaaggcaggagaacagccactttcagacttgaaaatgacaaaaccctcagttgagcctgagcccccggcgcgggggctgctacactacaggacacccagcatcggctttgactgcagactgttcacccacacgagccctgtgcttttggtgtaaataatgtacaatttgtggatgtcattgaatctagaggactttcccctttttatatttgtattaactttaacttattaaaaaaaaaaaaagaaaaagaaaaacgatttaaaaaaaaaaaaaaaagcaaccaaccccaacaacaaaaaagaatgttttggtattggagaagggatggtcagttagcctgtctgtcacacgacggaatggatactgggcccggggaccactttcatactcacgtcctcatccttggatacccaggggagggcgaaccgttttcgctcgtgtgtctgtacgcagcatgttgggatcgggagtttcggcacagactatcccatcaagccgttggctcctttcagctactacgttaccacgttcctaaaacgcaagctctccggaccagacggacacagggagaagctagtttctttcatgtgattgaaatgatgactctactcctaaaagggaaaaaacaatatccttgtttacagaagagaaacaaacaagccccactcagctcagtcacaggagagaacacagaaagtcttaggatcatgaactctgaaaaaaagagaaaccttatctttgctttgtggttcctttaaacacactcacacacacttggtcagagatgctgtgcttcttggaagcaaggactcaaaggcaaggtgcacgcagaggacgtttgagtctgggatgaagcatgtacgtattatttatatgatggaatttcacgtttttatgtaagcatgaaacacaggcagtatgagagaaagcaaggcccgtcatgctgtccgtacactacgtatgctgtagagccattttgtatgttgtgtaaaacaaaaagcattgatgaaaaagcaaaaggtgatgtatgtatatgagaaaattaattgtacgatatcattccagtacgttttgttgtacattttagtcttgtttactttctcttcattgttaagaggatgcgaactgtacagtttccagctagttacccatattagagaagaaataagagagtattagaagaaaacaggagagaaagaacatttgtgaattgcagttgtcaaaaaaaaaaaatagcctagctggccttatttgtgaagcataattgcttttagcatatggaagtattttttcacattttctttgtataaaatttgtattaaacttaaatatctttttgatggtggtgtttctttgtgactgagccagtagactcacactatatgcttttttgggtttgcccgttccttcccccacccccccagttttttcagatttttttacctttttttaattaaactgtttt

SEQ ID NO: 168 - protein, 1157 aa, Homo sapiens
MHPQSLAEEEIKTEQEVVEGMDISTRSKDPGSAERTAQKRKFPSPPHSSNGHSPQDTSTSPIKKKKKPGLLNSNNKEQDGRNDFYCWVCHREGQVLCCELCPRVYHAKCLRLTSEPEGDWFCPECEKITVAECIETQSKAMTMLTIEQLSYLLKFAIQKMKQPGTDAFQKPVPLEQHPDYAEYIFHPMDLCTLEKNAKKKMYGCTEAFLADAKWILHNCIIYNGGNHKLTQIAKVVIKICEHEMNEIEVCPECYLAACQKRDNWFCEPCSNPHPLVWAKLKGFPFWPAKALRDKDGQVDARFFGQHDRAWVPINNCYLMSKEIPFSVKKTKSIFNSAMQEMEVYVENIRRKFGVFNYSPFRTPYTPNSQYQMLLDPTNPSAGTAKIDKQEKVKLNFDMTDKILMSKPVLSGGTGRRISLSDMPRSPMSTNSSVHTGSDVEQDAEKKATSSHFSASEESMDFLDKSTDASTKTGQAGSLSGSPKPFSPQLSAPITTKTDKTSTTGSILNLNLDRSKAEMDLKELSESVQQQSTPVPLISPKRQIRSRFQLNLDKTIESCKAQLGINEISEDVYTAVEHSDSEDSEKSDSSDSEYISDDEQKSKNEPEDTEDKEGCQMDKEPSAVKKKPKPTNPVEIKEELKSTSPASEKADPGAVKDKDEPEKDFSEKAKPSPHPIKDKLKGKDETDSPTVHLGLDSDSESELVIDLGEDHSGREGRKNKKEPKEPSPKQDVVGKTPPSTTVGSHSPPETPVLTRSSAQTSAAGATATTSTSSTVTVTAPAPAATGSPVKKQRPLLPKETAPAVQRVVWNSSTVQQKEITQSPSTSTITLVTSTQSSPLVTSSGSMSTLVSSVNADLPIATASADVAADIAKYTSKMMDAIKGTMTEIYNDLSKNTTGSTIAEIRRLRIEIEKLQWLHQQELSEMKHNLELTMAEMRQSLEQERDRLIAEVKKQLELEKQQAVDETKKKQWCANCKKEAIFYCCWNTSYCDYPCQQAHWPEHMKSCTQSATAPQQEADAEVNTETLNKSSQGSSSSTQSAPSETASASKEKETSAEKSKESGSTLDLSGSRETPSSILLGSNQGSVSKRCDKQPAYAPTTTDHQPHPNYPAQKYHSRSNKSSWSSSDEKRGSTRSDHNTSTSTKSLLPKESRLDTFWD

SEQ ID NO: 169 - DNA, 5374 bp, Homo sapiens
gatggctcttgctcacccgagcctcacaaagataatcgctcaggaagtgtttcagccaatccggggcggctttacactccgatttgccggggcagccaatcggggatgagcttttattaggcggccagatcatcagccgaagtgccaaaccctttttctgtgagaactaggagcctgtcctccatgttttataagtattgacattacacagtgttaacaatgcatccacagagcttggctgaagaggaaataaaaacagaacaggaggtggtagagggcatggatatctctactcgctccaaagatcctggctctgcagagagaacagcccagaaaagaaagttccccagccctccacattcttccaatggccactcgccgcaggacacatcaacaagccccattaaaaagaaaaagaaacctggcttactgaacagtaacaataaggagcagtcagaactaagacatggtccgttttactatatgaagcagccactcaccacagaccctgttgatgttgtaccgcaggatggacggaatgatttctactgctgggtttgtcaccgggaaggccaagtcctttgctgtgagctctgtccccgggtttatcacgctaagtgtctgagactgacatcggaaccagagggggactggttttgtcctgaatgtgagaaaattacagtagcagaatgcatcgagacccagagtaaagccatgacaatgctcaccattgaacagttatcctacctgctcaagtttgccattcagaaaatgaaacagccagggacagatgcattccagaagcccgttccattggaacagcaccctgactatgcggaatacatcttccatccaatggacctttgtacattggaaaagaatgcgaaaaagaaaatgtatggctgcacagaagccttcctggctgatgcaaagtggattttgcacaactgcatcatttataatgggggaaatcacaaattgacgcaaatagcgaaagtagtcatcaaaatctgtgaacatgagaatgaaatcgaagtatgtccagaatgttatctagctgcttgccaaaaacgagataactggttttgtgagccttgtagcaatccacatcctttggtctgggccaaactgaaggggtttccattctggcctgcaaaagctctaagggataaagacgggcaggtcgatgcccgattctttggacaacatgacagggcctgggttccaataaataattgctacctcatgtctaaagaaattcctttttctgtgaaaaagactaagagcatcttcaacagtgccatgcaagagatggaggtttacgtggagaacatccgcaggaagtttggggtttttaattactctccatttaggacaccctacacacccaacagccagtatcaaatgctgctcgatcccaccaaccccagcgccggcactgccaagatagacaagcaggagaaggtcaagctcaactttgacatgacggcatcccccaagatcctgatgagcaagcctgtgctgagtgggggcacaggccgccggatttccttgtcggatatgccgcgctcccccatgagcacaaactcttctgtgcacacgggctccgacgtggagcaggatgctgagaagaaggccacgtcgagccacttcagtgcgagcgaggagtccatggacttcctggataagagcacagcttcaccagcctccaccaagacgggacaagcagggagtttatccggcagcccaaagcccttctctcctcaactgtcagctcctatcacgacgaaaacggacaaaacctccaccaccggcagcatcctgaatcttaacctggatcgaagcaaagctgagatggatttgaaggagctgagcgagtcggtccagcaacagtccacccctgttcctctcatctctcccaagcgccagattcgtagcaggttccagctgaatcttgacaagaccatagagagttgcaaagcacaattaggcataaatgaaatctcggaagatgtctatacggccgtagagcacagcgattcggaggattctgagaagtcagatagtagcgatagtgagtatatcagtgatgatgagcagaagtctaagaacgagccagaagacacagaggacaaagaaggttgtcagatggacaaagagccatctgctgttaaaaaaaagcccaagcctacaaacccagtggagattaaagaggagctgaaaagcacgtcaccagccagcgagaaggcagaccctggagcagtcaaggacaaggccagccctgagcctgagaaggacttttccgaaaaggcaaaaccttcacctcaccccataaaggataaactgaagggaaaagatgagacggattccccaacagtccatttgggcctggactctgattcagagagcgaacttgtcatagatttaggagaagaccattctgggcgggagggtcgaaaaaataagaaggaacccaaagaaccatctcccaaacaggatgttgtaggtaaaactccaccatccacgacggtgggcagccattctcccccggaaacaccggtgctcacccgctcttccgcccaaacttccgcggctggcgccacagccaccaccagcacgtcctccacggtcaccgtcacggccccggcccccgccgccacaggaagcccagtgaaaaagcagaggccgcttttaccgaaggagactgccccggccgtgcagcgggtcgtgtggaactcatcaagtaagtttcaaacgtcctcccaaaagtggcacatgcagaagatgcagcgtcagcagcagcagcagcagcagcaaaaccagcagcagcagcctcagtcttcccaggggacgagatatcagaccagacaggctgtgaaagctgtccagcagaaggagatcacacagagcccatccacgtccaccatcaccctggtgaccagcacacagtcatcgcccctggtcaccagctcggggtccatgagcacccttgtgtcctcagtcaacgctgacctgcccatcgccactgcctcagctgatgtcgccgctgatattgccaagtacactagcaaaatgatggatgcaataaaaggaacaatgacagaaatatacaacgatctttctaaaaacactactggaagcacaatagctgagattcgcaggctgaggatcgagatagagaagctccagtggctgcaccagcaagagctctccgaaatgaaacacaacttagagctgaccatggcggagatgcggcagagcctggagcaggagcgggaccggctcatcgccgaggtgaagaagcagctggagttggagaagcagcaggcggtggatgagaccaagaagaagcagtggtgcgccaactgcaagaaggaggccatcttttactgctgttggaacaccagctactgtgactacccctgccagcaagcccactggcctgagcacatgaagtcctgcacccagtcagctactgctcctcagcaggaagcggatgctgaggtgaacacagaaacactaaataagtcctcccaggggagctcctcgagcacacaatcagcaccttcagaaacggccagcgcctccaaagagaaggagacgtcagctgagaaaagcaaggagagtggctcgacccttgacctttctggctccagagagacgccctcctccattctcttaggctccaaccaaggctctgaccattcccggagtaataaatccagttggagcagcagtgatgagaagaggggatcgacacgttccgatcacaacaccagtaccagcacgaagagcctcctcccgaaagagtctcggctggacaccttctgggactagcagtgaatcgggacacaaaccacccaccccattgggagaaaaacccagacgccaggaaaagaagaaacaacaaaggcaggagaacagccactttcagacttgaaaatgacaaaaccctcagttgagcctgagcccccggcgcgggggctgctacactacaggacacccagcatcggctttgactgcagactgttcacccacacgagccctgtgcttttggtgtaaataatgtacaatttgtggatgtcattgaatctagaggactttcccctttttatatttgtattaactttaacttattaaaaaaaaaaaaagaaaaagaaaaacgatttaaaaaaaaaaaaaaaagcaaccaaccccaacaacaaaaaagaatgttttggtattggagaagggatggtcagttagcctgtctgtcacacgacggaatggatactgggcccggggaccactttcatactcacgtcctcatccttggatacccaggggagggcgaaccgttttcgctcgtgtgtctgtacgcagcatgttgggatcgggagtttcggcacagactatcccatcaagccgttggctcctttcagctactacgttaccacgttcctaaaacgcaagctctccggaccagacggacacagggagaagctagtttctttcatgtgattgaaatgatgactctactcctaaaagggaaaaaacaatatccttgtttacagaagagaaacaaacaagccccactcagctcagtcacaggagagaacacagaaagtcttaggatcatgaactctgaaaaaaagagaaaccttatctttgctttgtggttcctttaaacacactcacacacacttggtcagagatgctgtgcttcttggaagcaaggactcaaaggcaaggtgcacgcagaggacgtttgagtctgggatgaagcatgtacgtattatttatatgatggaatttcacgtttttatgtaagcatgaaacacaggcagtatgagagaaagcaaggcccgtcatgctgtccgtacactacgtatgctgtagagccattttgtatgttgtgtaaaacaaaaagcattgatgaaaaagcaaaaggtgatgtatgtatatgagaaaattaattgtacgatatcattccagtacgttttgttgtacattttagtcttgtttactttctcttcattgttaagaggatgcgaactgtacagtttccagctagttacccatattagagaagaaataagagagtattagaagaaaacaggagagaaagaacatttgtgaattgcagttgtcaaaaaaaaaaaatagcctagctggccttatttgtgaagcataattgcttttagcatatggaagtattttttcacattttctttgtataaaatttgtattaaacttaaatatctttttgatggtggtgtttctttgtgactgagccagtagactcacactatatgcttttttgggtttgcccgttccttcccccacccccccagttttttcagatttttttacctttttttaattaaactgtttt

SEQ ID NO: 170 - protein, 1199 aa, Homo sapiens
MHPQSLAEEEIKTEQEVVEGMDISTRSKDPGSAERTAQKRKFPSPPHSSNGHSPQDTSTSPIKKKKKPGLLNSNNKEQSELRHGPFYYMKQPLTTDPVDVVPQDGRNDFYCWVCHREGQVLCCELCPRVYHAKCLRLTSEPEGDWFCPECEKITVAECIETQSKAMTMLTIEQLSYLLKFAIQKMKQPGTDAFQKPVPLEQHPDYAEYIFHPMDLCTLEKNAKKKMYGCTEAFLADAKWILHNCIIYNGGNHKLTQIAKVVIKICEHENEIEVCPECYLAACQKRDNWFCEPCSNPHPLVWAKLKGFPFWPAKALRDKDGQVDARFFGQHDRAWVPINNCYLMSKEIPFSVKKTKSIFNSAMQEMEVYVENIRRKFGVFNYSPFRTPYTPNSQYQMLLDPTNPSAGTAKIDKQEKVKLNFDMTDKILMSKPVLSGGTGRRISLSDMPRSPMSTNSSVHTGSDVEQDAEKKATSSHFSASEESMDFLDKSTDASTKTGQAGSLSGSPKPFSPQLSAPITTKTDKTSTTGSILNLNLDRSKAEMDLKELSESVQQQSTPVPLISPKRQIRSRFQLNLDKTIESCKAQLGINEISEDVYTAVEHSDSEDSEKSDSSDSEYISDDEQKSKNEPEDTEDKEGCQMDKEPSAVKKKPKPTNPVEIKEELKSTSPASEKADPGAVKDKDEPEKDFSEKAKPSPHPIKDKLKGKDETDSPTVHLGLDSDSESELVIDLGEDHSGREGRKNKKEPKEPSPKQDVVGKTPPSTTVGSHSPPETPVLTRSSAQTSAAGATATTSTSSTVTVTAPAPAATGSPVKKQRPLLPKETAPAVQRVVWNSSSKFQTSSQKWHMQKMQRQQQQQQQQNQQQQPQSSQGTRYQTRQAVKAVQQKEITQSPSTSTITLVTSTQSSPLVTSSGSMSTLVSSVNADLPIATASADVAADIAKYTSKMMDAIKGTMTEIYNDLSKNTTGSTIAEIRRLRIEIEKLQWLHQQELSEMKHNLELTMAEMRQSLEQERDRLIAEVKKQLELEKQQAVDETKKKQWCANCKKEAIFYCCWNTSYCDYPCQQAHWPEHMKSCTQSATAPQQEADAEVNTETLNKSSQGSSSSTQSAPSETASASKEKETSAEKSKESGSTLDLSGSRETPSSILLGSNQGSDHSRSNKSSWSSSDEKRGSTRSDHNTSTSTKSLLPKESRLDTFWD

SEQ ID NO: 171 - DNA, 5239 bp, Homo sapiens
gatggctcttgctcacccgagcctcacaaagataatcgctcaggaagtgtttcagccaatccggggcggctttacactccgatttgccggggcagccaatcggggatgagcttttattaggcggccagatcatcagccgaagtgccaaaccctttttctgtgagaactaggagcctgtcctccatgttttataagtattgacattacacagtgttaacaatgcatccacagagcttggctgaagaggaaataaaaacagaacaggaggtggtagagggcatggatatctctactcgctccaaagatcctggctctgcagagagaacagcccagaaaagaaagttccccagccctccacattcttccaatggccactcgccgcaggacacatcaacaagccccattaaaaagaaaaagaaacctggcttactgaacagtaacaataaggagcagtcagaactaagacatggtccgttttactatatgaagcagccactcaccacagaccctgttgatgttgtaccgcaggatggacggaatgatttctactgctgggtttgtcaccgggaaggccaagtcctttgctgtgagctctgtccccgggtttatcacgctaagtgtctgagactgacatcggaaccagagggggactggttttgtcctgaatgtgagaaaattacagtagcagaatgcatcgagacccagagtaaagccatgacaatgctcaccattgaacagttatcctacctgctcaagtttgccattcagaaaatgaaacagccagggacagatgcattccagaagcccgttccattggaacagcaccctgactatgcggaatacatcttccatccaatggacctttgtacattggaaaagaatgcgaaaaagaaaatgtatggctgcacagaagccttcctggctgatgcaaagtggattttgcacaactgcatcatttataatgggggaaatcacaaattgacgcaaatagcgaaagtagtcatcaaaatctgtgaacatgagatgaatgaaatcgaagtatgtccagaatgttatctagctgcttgccaaaaacgagataactggttttgtgagccttgtagcaatccacatcctttggtctgggccaaactgaaggggtttccattctggcctgcaaaagctctaagggataaagacgggcaggtcgatgcccgattctttggacaacatgacagggcctgggttccaataaataattgctacctcatgtctaaagaaattcctttttctgtgaaaaagactaagagcatcttcaacagtgccatgcaagagatggaggtttacgtggagaacatccgcaggaagtttggggtttttaattactctccatttaggacaccctacacacccaacagccagtatcaaatgctgctcgatcccaccaaccccagcgccggcactgccaagatagacaagcaggagaaggtcaagctcaactttgacatgacggcatcccccaagatcctgatgagcaagcctgtgctgagtgggggcacaggccgccggatttccttgtcggatatgccgcgctcccccatgagcacaaactcttctgtgcacacgggctccgacgtggagcaggatgctgagaagaaggccacgtcgagccacttcagtgcgagcgaggagtccatggacttcctggataagagcacagcttcaccagcctccaccaagacgggacaagcagggagtttatccggcagcccaaagcccttctctcctcaactgtcagctcctatcacgacgaaaacggacaaaacctccaccaccggcagcatcctgaatcttaacctggatcgaagcaaagctgagatggatttgaaggagctgagcgagtcggtccagcaacagtccacccctgttcctctcatctctcccaagcgccagattcgtagcaggttccagctgaatcttgacaagaccatagagagttgcaaagcacaattaggcataaatgaaatctcggaagatgtctatacggccgtagagcacagcgattcggaggattctgagaagtcagatagtagcgatagtgagtatatcagtgatgatgagcagaagtctaagaacgagccagaagacacagaggacaaagaaggttgtcagatggacaaagagccatctgctgttaaaaaaaagcccaagcctacaaacccagtggagattaaagaggagctgaaaagcacgtcaccagccagcgagaaggcagaccctggagcagtcaaggacaaggccagccctgagcctgagaaggacttttccgaaaaggcaaaaccttcacctcaccccataaaggataaactgaagggaaaagatgagacggattccccaacagtccatttgggcctggactctgattcagagagcgaacttgtcatagatttaggagaagaccattctgggcgggagggtcgaaaaaataagaaggaacccaaagaaccatctcccaaacaggatgttgtaggtaaaactccaccatccacgacggtgggcagccattctcccccggaaacaccggtgctcacccgctcttccgcccaaacttccgcggctggcgccacagccaccaccagcacgtcctccacggtcaccgtcacggccccggcccccgccgccacaggaagcccagtgaaaaagcagaggccgcttttaccgaaggagactgccccggccgtgcagcgggtcgtgtggaactcatcaactgtccagcagaaggagatcacacagagcccatccacgtccaccatcaccctggtgaccagcacacagtcatcgcccctggtcaccagctcggggtccatgagcacccttgtgtcctcagtcaacgctgacctgcccatcgccactgcctcagctgatgtcgccgctgatattgccaagtacactagcaaaatgatggatgcaataaaaggaacaatgacagaaatatacaacgatctttctaaaaacactactggaagcacaatagctgagattcgcaggctgaggatcgagatagagaagctccagtggctgcaccagcaagagctctccgaaatgaaacacaacttagagctgaccatggcggagatgcggcagagcctggagcaggagcgggaccggctcatcgccgaggtgaagaagcagctggagttggagaagcagcaggcggtggatgagaccaagaagaagcagtggtgcgccaactgcaagaaggaggccatcttttactgctgttggaacaccagctactgtgactacccctgccagcaagcccactggcctgagcacatgaagtcctgcacccagtcagctactgctcctcagcaggaagcggatgctgaggtgaacacagaaacactaaataagtcctcccaggggagctcctcgagcacacaatcagcaccttcagaaacggccagcgcctccaaagagaaggagacgtcagctgagaaaagcaaggagagtggctcgacccttgacctttctggctccagagagacgccctcctccattctcttaggctccaaccaaggctctgaccattcccggagtaataaatccagttggagcagcagtgatgagaagaggggatcgacacgttccgatcacaacaccagtaccagcacgaagagcctcctcccgaaagagtctcggctggacaccttctgggactagcagtgaatcgggacacaaaccacccaccccattgggagaaaaacccagacgccaggaaaagaagaaacaacaaaggcaggagaacagccactttcagacttgaaaatgacaaaaccctcagttgagcctgagcccccggcgcgggggctgctacactacaggacacccagcatcggctttgactgcagactgttcacccacacgagccctgtgcttttggtgtaaataatgtacaatttgtggatgtcattgaatctagaggactttcccctttttatatttgtattaactttaacttattaaaaaaaaaaaaagaaaaagaaaaacgatttaaaaaaaaaaaaaaaagcaaccaaccccaacaacaaaaaagaatgttttggtattggagaagggatggtcagttagcctgtctgtcacacgacggaatggatactgggcccggggaccactttcatactcacgtcctcatccttggatacccaggggagggcgaaccgttttcgctcgtgtgtctgtacgcagcatgttgggatcgggagtttcggcacagactatcccatcaagccgttggctcctttcagctactacgttaccacgttcctaaaacgcaagctctccggaccagacggacacagggagaagctagtttctttcatgtgattgaaatgatgactctactcctaaaagggaaaaaacaatatccttgtttacagaagagaaacaaacaagccccactcagctcagtcacaggagagaacacagaaagtcttaggatcatgaactctgaaaaaaagagaaaccttatctttgctttgtggttcctttaaacacactcacacacacttggtcagagatgctgtgcttcttggaagcaaggactcaaaggcaaggtgcacgcagaggacgtttgagtctgggatgaagcatgtacgtattatttatatgatggaatttcacgtttttatgtaagcatgaaacacaggcagtatgagagaaagcaaggcccgtcatgctgtccgtacactacgtatgctgtagagccattttgtatgttgtgtaaaacaaaaagcattgatgaaaaagcaaaaggtgatgtatgtatatgagaaaattaattgtacgatatcattccagtacgttttgttgtacattttagtcttgtttactttctcttcattgttaagaggatgcgaactgtacagtttccagctagttacccatattagagaagaaataagagagtattagaagaaaacaggagagaaagaacatttgtgaattgcagttgtcaaaaaaaaaaaatagcctagctggccttatttgtgaagcataattgcttttagcatatggaagtattttttcacattttctttgtataaaatttgtattaaacttaaatatctttttgatggtggtgtttctttgtgactgagccagtagactcacactatatgcttttttgggtttgcccgttccttcccccacccccccagttttttcagatttttttacctttttttaattaaactgtttt

SEQ ID NO: 172 - protein, 1154 aa, Homo sapiens
MHPQSLAEEEIKTEQEVVEGMDISTRSKDPGSAERTAQKRKFPSPPHSSNGHSPQDTSTSPIKKKKKPGLLNSNNKEQSELRHGPFYYMKQPLTTDPVDVVPQDGRNDFYCWVCHREGQVLCCELCPRVYHAKCLRLTSEPEGDWFCPECEKITVAECIETQSKAMTMLTIEQLSYLLKFAIQKMKQPGTDAFQKPVPLEQHPDYAEYIFHPMDLCTLEKNAKKKMYGCTEAFLADAKWILHNCIIYNGGNHKLTQIAKVVIKICEHEMNEIEVCPECYLAACQKRDNWFCEPCSNPHPLVWAKLKGFPFWPAKALRDKDGQVDARFFGQHDRAWVPINNCYLMSKEIPFSVKKTKSIFNSAMQEMEVYVENIRRKFGVFNYSPFRTPYTPNSQYQMLLDPTNPSAGTAKIDKQEKVKLNFDMTDKILMSKPVLSGGTGRRISLSDMPRSPMSTNSSVHTGSDVEQDAEKKATSSHFSASEESMDFLDKSTDASTKTGQAGSLSGSPKPFSPQLSAPITTKTDKTSTTGSILNLNLDRSKAEMDLKELSESVQQQSTPVPLISPKRQIRSRFQLNLDKTIESCKAQLGINEISEDVYTAVEHSDSEDSEKSDSSDSEYISDDEQKSKNEPEDTEDKEGCQMDKEPSAVKKKPKPTNPVEIKEELKSTSPASEKADPGAVKDKDEPEKDFSEKAKPSPHPIKDKLKGKDETDSPTVHLGLDSDSESELVIDLGEDHSGREGRKNKKEPKEPSPKQDVVGKTPPSTTVGSHSPPETPVLTRSSAQTSAAGATATTSTSSTVTVTAPAPAATGSPVKKQRPLLPKETAPAVQRVVWNSSTVQQKEITQSPSTSTITLVTSTQSSPLVTSSGSMSTLVSSVNADLPIATASADVAADIAKYTSKMMDAIKGTMTEIYNDLSKNTTGSTIAEIRRLRIEIEKLQWLHQQELSEMKHNLELTMAEMRQSLEQERDRLIAEVKKQLELEKQQAVDETKKKQWCANCKKEAIFYCCWNTSYCDYPCQQAHWPEHMKSCTQSATAPQQEADAEVNTETLNKSSQGSSSSTQSAPSETASASKEKETSAEKSKESGSTLDLSGSRETPSSILLGSNQGSDHSRSNKSSWSSSDEKRGSTRSDHNTSTSTKSLLPKESRLDTFWD

SEQ ID NO: 173 - DNA, 5533 bp, Homo sapiens
ggatggctcttgctcacccgagcctcacaaagataatcgctcaggaagtgtttcagccaatccggggcggctttacactccgatttgccggggcagccaatcggggatgagcttttattaggcggccagatcatcagccgaagtgccaaaccctttttctgtgagaactaggagcctgtcctccatgttttataagtattgacattacacagtgttaacaatgcatccacagagtcccaaatctgccagcctgttctctcttcctaactgtggaaaaatgagacggttgcttgaacatttgttggcttggctgaagaggaaataaaaacagaacaggaggtggtagagggcatggatatctctactcgctccaaagatcctggctctgcagagagaacagcccagaaaagaaagttccccagccctccacattcttccaatggccactcgccgcaggacacatcaacaagccccattaaaaagaaaaagaaacctggcttactgaacagtaacaataaggagcagtcagaactaagacatggtccgttttactatatgaagcagccactcaccacagaccctgttgatgttgtaccgcaggatggacggaatgatttctactgctgggtttgtcaccgggaaggccaagtcctttgctgtgagctctgtccccgggtttatcacgctaagtgtctgagactgacatcggaaccagagggggactggttttgtcctgaatgtgagaaaattacagtagcagaatgcatcgagacccagagtaaagccatgacaatgctcaccattgaacagttatcctacctgctcaagtttgccattcagaaaatgaaacagccagggacagatgcattccagaagcccgttccattggaacagcaccctgactatgcggaatacatcttccatccaatggacctttgtacattggaaaagaatgcgaaaaagaaaatgtatggctgcacagaagccttcctggctgatgcaaagtggattttgcacaactgcatcatttataatgggggaaatcacaaattgacgcaaatagcgaaagtagtcatcaaaatctgtgaacatgagatgaatgaaatcgaagtatgtccagaatgttatctagctgcttgccaaaaacgagataactggttttgtgagccttgtagcaatccacatcctttggtctgggccaaactgaaggggtttccattctggcctgcaaaagctctaagggataaagacgggcaggtcgatgcccgattctttggacaacatgacagggcctgggttccaataaataattgctacctcatgtctaaagaaattcctttttctgtgaaaaagactaagagcatcttcaacagtgccatgcaagagatggaggtttacgtggagaacatccgcaggaagtttggggtttttaattactctccatttaggacaccctacacacccaacagccagtatcaaatgctgctcgatcccaccaaccccagcgccggcactgccaagatagacaagcaggagaaggtcaagctcaactttgacatgacggcatcccccaagatcctgatgagcaagcctgtgctgagtgggggcacaggccgccggatttccttgtcggatatgccgcgctcccccatgagcacaaactcttctgtgcacacgggctccgacgtggagcaggatgctgagaagaaggccacgtcgagccacttcagtgcgagcgaggagtccatggacttcctggataagagcacagcttcaccagcctccaccaagacgggacaagcagggagtttatccggcagcccaaagcccttctctcctcaactgtcagctcctatcacgacgaaaacggacaaaacctccaccaccggcagcatcctgaatcttaacctggatcgaagcaaagctgagatggatttgaaggagctgagcgagtcggtccagcaacagtccacccctgttcctctcatctctcccaagcgccagattcgtagcaggttccagctgaatcttgacaagaccatagagagttgcaaagcacaattaggcataaatgaaatctcggaagatgtctatacggccgtagagcacagcgattcggaggattctgagaagtcagatagtagcgatagtgagtatatcagtgatgatgagcagaagtctaagaacgagccagaagacacagaggacaaagaaggttgtcagatggacaaagagccatctgctgttaaaaaaaagcccaagcctacaaacccagtggagattaaagaggagctgaaaagcacgtcaccagccagcgagaaggcagaccctggagcagtcaaggacaaggccagccctgagcctgagaaggacttttccgaaaaggcaaaaccttcacctcaccccataaaggataaactgaagggaaaagatgagacggattccccaacagtccatttgggcctggactctgattcagagagcgaacttgtcatagatttaggagaagaccattctgggcgggagggtcgaaaaaataagaaggaacccaaagaaccatctcccaaacaggatgttgtaggtaaaactccaccatccacgacggtgggcagccattctcccccggaaacaccggtgctcacccgctcttccgcccaaacttccgcggctggcgccacagccaccaccagcacgtcctccacggtcaccgtcacggccccggcccccgccgccacaggaagcccagtgaaaaagcagaggccgcttttaccgaaggagactgccccggccgtgcagcgggtcgtgtggaactcatcaagtaagtttcaaacgtcctcccaaaagtggcacatgcagaagatgcagcgtcagcagcagcagcagcagcagcaaaaccagcagcagcagcctcagtcttcccaggggacgagatatcagaccagacaggctgtgaaagctgtccagcagaaggagatcacacagagcccatccacgtccaccatcaccctggtgaccagcacacagtcatcgcccctggtcaccagctcggggtccatgagcacccttgtgtcctcagtcaacgctgacctgcccatcgccactgcctcagctgatgtcgccgctgatattgccaagtacactagcaaaatgatggatgcaataaaaggaacaatgacagaaatatacaacgatctttctaaaaacactactggaagcacaatagctgagattcgcaggctgaggatcgagatagagaagctccagtggctgcaccagcaagagctctccgaaatgaaacacaacttagagctgaccatggcggagatgcggcagagcctggagcaggagcgggaccggctcatcgccgaggtgaagaagcagctggagttggagaagcagcaggcggtggatgagaccaagaagaagcagtggtgcgccaactgcaagaaggaggccatcttttactgctgttggaacaccagctactgtgactacccctgccagcaagcccactggcctgagcacatgaagtcctgcacccagtcagctactgctcctcagcaggaagcggatgctgaggtgaacacagaaacactaaataagtcctcccaggggagctcctcgagcacacaatcagcaccttcagaaacggccagcgcctccaaagagaaggagacgtcagctgagaaaagcaaggagagtggctcgacccttgacctttctggctccagagagacgccctcctccattctcttaggctccaaccaaggctctgttagcaaaaggtgtgacaagcaacctgcctatgccccaaccaccacagaccaccagccgcaccccaactaccccgcccagaagtaccattcccggagtaataaatccagttggagcagcagtgatgagaagaggggatcgacacgttccgatcacaacaccagtaccagcacgaagagcctcctcccgaaagagtctcggctggacaccttctgggactagcagtgaatcgggacacaaaccacccaccccattgggagaaaaacccagacgccaggaaaagaagaaacaacaaaggcaggagaacagccactttcagacttgaaaatgacaaaaccctcagttgagcctgagcccccggcgcgggggctgctacactacaggacacccagcatcggctttgactgcagactgttcacccacacgagccctgtgcttttggtgtaaataatgtacaatttgtggatgtcattgaatctagaggactttcccctttttatatttgtattaactttaacttattaaaaaaaaaaaaagaaaaagaaaaacgatttaaaaaaaaaaaaaaaagcaaccaaccccaacaacaaaaaagaatgttttggtattggagaagggatggtcagttagcctgtctgtcacacgacggaatggatactgggcccggggaccactttcatactcacgtcctcatccttggatacccaggggagggcgaaccgttttcgctcgtgtgtctgtacgcagcatgttgggatcgggagtttcggcacagactatcccatcaagccgttggctcctttcagctactacgttaccacgttcctaaaacgcaagctctccggaccagacggacacagggagaagctagtttctttcatgtgattgaaatgatgactctactcctaaaagggaaaaaacaatatccttgtttacagaagagaaacaaacaagccccactcagctcagtcacaggagagaacacagaaagtcttaggatcatgaactctgaaaaaaagagaaaccttatctttgctttgtggttcctttaaacacactcacacacacttggtcagagatgctgtgcttcttggaagcaaggactcaaaggcaaggtgcacgcagaggacgtttgagtctgggatgaagcatgtacgtattatttatatgatggaatttcacgtttttatgtaagcatgaaacacaggcagtatgagagaaagcaaggcccgtcatgctgtccgtacactacgtatgctgtagagccattttgtatgttgtgtaaaacaaaaagcattgatgaaaaagcaaaaggtgatgtatgtatatgagaaaattaattgtacgatatcattccagtacgttttgttgtacattttagtcttgtttactttctcttcattgttaagaggatgcgaactgtacagtttccagctagttacccatattagagaagaaataagagagtattagaagaaaacaggagagaaagaacatttgtgaattgcagttgtcaaaaaaaaaaaatagcctagctggccttatttgtgaagcataattgcttttagcatatggaagtattttttcacattttctttgtataaaatttgtattaaacttaaatatctttttgatggtggtgtttctttgtgactgagccagtagactcacactatatgcttttttgggtttgcccgttccttcccccacccccccagttttttcagatttttttacctttttttaattaaactgtttt

SEQ ID NO: 174 - protein, 1208 aa, Homo sapiens
MDISTRSKDPGSAERTAQKRKFPSPPHSSNGHSPQDTSTSPIKKKKKPGLLNSNNKEQSELRHGPFYYMKQPLTTDPVDVVPQDGRNDFYCWVCHREGQVLCCELCPRVYHAKCLRLTSEPEGDWFCPECEKITVAECIETQSKAMTMLTIEQLSYLLKFAIQKMKQPGTDAFQKPVPLEQHPDYAEYIFHPMDLCTLEKNAKKKMYGCTEAFLADAKWILHNCIIYNGGNHKLTQIAKVVIKICEHEMNEIEVCPECYLAACQKRDNWFCEPCSNPHPLVWAKLKGFPFWPAKALRDKDGQVDARFFGQHDRAWVPINNCYLMSKEIPFSVKKTKSIFNSAMQEMEVYVENIRRKFGVFNYSPFRTPYTPNSQYQMLLDPTNPSAGTAKIDKQEKVKLNFDMTDKILMSKPVLSGGTGRRISLSDMPRSPMSTNSSVHTGSDVEQDAEKKATSSHFSASEESMDFLDKSTDASTKTGQAGSLSGSPKPFSPQLSAPITTKTDKTSTTGSILNLNLDRSKAEMDLKELSESVQQQSTPVPLISPKRQIRSRFQLNLDKTIESCKAQLGINEISEDVYTAVEHSDSEDSEKSDSSDSEYISDDEQKSKNEPEDTEDKEGCQMDKEPSAVKKKPKPTNPVEIKEELKSTSPASEKADPGAVKDKDEPEKDFSEKAKPSPHPIKDKLKGKDETDSPTVHLGLDSDSESELVIDLGEDHSGREGRKNKKEPKEPSPKQDVVGKTPPSTTVGSHSPPETPVLTRSSAQTSAAGATATTSTSSTVTVTAPAPAATGSPVKKQRPLLPKETAPAVQRVVWNSSSKFQTSSQKWHMQKMQRQQQQQQQQNQQQQPQSSQGTRYQTRQAVKAVQQKEITQSPSTSTITLVTSTQSSPLVTSSGSMSTLVSSVNADLPIATASADVAADIAKYTSKMMDAIKGTMTEIYNDLSKNTTGSTIAEIRRLRIEIEKLQWLHQQELSEMKHNLELTMAEMRQSLEQERDRLIAEVKKQLELEKQQAVDETKKKQWCANCKKEAIFYCCWNTSYCDYPCQQAHWPEHMKSCTQSATAPQQEADAEVNTETLNKSSQGSSSSTQSAPSETASASKEKETSAEKSKESGSTLDLSGSRETPSSILLGSNQGSVSKRCDKQPAYAPTTTDHQPHPNYPAQKYHSRSNKSSWSSSDEKRGSTRSDHNTSTSTKSLLPKESRLDTFWD

SEQ ID NO: 175 - DNA, 4810 bp, Homo sapiens
gaggccgctgaggatccggaagcaggaatgtctgctgtgggtgagcctctgttctcttttgaacaagagaggctaggccctctgagcagccgcactttctcaatggcagatcctggctctgcagagagaacagcccagaaaagaaagttccccagccctccacattcttccaatggccactcgccgcaggacacatcaacaagccccattaaaaagaaaaagaaacctggcttactgaacagtaacaataaggagcaggatggacggaatgatttctactgctgggtttgtcaccgggaaggccaagtcctttgctgtgagctctgtccccgggtttatcacgctaagtgtctgagactgacatcggaaccagagggggactggttttgtcctgaatgtgagaaaattacagtagcagaatgcatcgagacccagagtaaagccatgacaatgctcaccattgaacagttatcctacctgctcaagtttgccattcagaaaatgaaacagccagggacagatgcattccagaagcccgttccattggaacagcaccctgactatgcggaatacatcttccatccaatggacctttgtacattggaaaagaatgcgaaaaagaaaatgtatggctgcacagaagccttcctggctgatgcaaagtggattttgcacaactgcatcatttataatgggggaaatcacaaattgacgcaaatagcgaaagtagtcatcaaaatctgtgaacatgagatgaatgaaatcgaagtatgtccagaatgttatctagctgcttgccaaaaacgagataactggttttgtgagccttgtagcaatccacatcctttggtctgggccaaactgaaggggtttccattctggcctgcaaaagctctaagggataaagacgggcaggtcgatgcccgattctttggacaacatgacagggcctgggttccaataaataattgctacctcatgtctaaagaaattcctttttctgtgaaaaagactaagagcatcttcaacagtgccatgcaagagatggaggtttacgtggagaacatccgcaggaagtttggggtttttaattactctccatttaggacaccctacacacccaacagccagtatcaaatgctgctcgatcccaccaaccccagcgccggcactgccaagatagacaagcaggagaaggtcaagctcaactttgacatgacggcatcccccaagatcctgatgagcaagcctgtgctgagtgggggcacaggccgccggatttccttgtcggatatgccgcgctcccccatgagcacaaactcttctgtgcacacgggctccgacgtggagcaggatgctgagaagaaggccacgtcgagccacttcagtgcgagcgaggagtccatggacttcctggataagagcacagcttcaccagcctccaccaagacgggacaagcagggagtttatccggcagcccaaagcccttctctcctcaactgtcagctcctatcacgacgaaaacggacaaaacctccaccaccggcagcatcctgaatcttaacctggatcgaagcaaagctgagatggatttgaaggagctgagcgagtcggtccagcaacagtccacccctgttcctctcatctctcccaagcgccagattcgtagcaggttccagctgaatcttgacaagaccatagagagttgcaaagcacaattaggcataaatgaaatctcggaagatgtctatacggccgtagagcacagcgattcggaggattctgagaagtcagatagtagcgatagtgagtatatcagtgatgatgagcagaagtctaagaacgagccagaagacacagaggacaaagaaggttgtcagatggacaaagagccatctgctgttaaaaaaaagcccaagcctacaaacccagtggagattaaagaggagctgaaaagcacgtcaccagccagcgagaaggcagaccctggagcagtcaaggacaaggccagccctgagcctgagaaggacttttccgaaaaggcaaaaccttcacctcaccccataaaggataaactgaagggaaaagatgagacggattccccaacagtccatttgggcctggactctgattcagagagcgaacttgtcatagatttaggagaagaccattctgggcgggagggtcgaaaaaataagaaggaacccaaagaaccatctcccaaacaggatgctgtccagcagaaggagatcacacagagcccatccacgtccaccatcaccctggtgaccagcacacagtcatcgcccctggtcaccagctcggggtccatgagcacccttgtgtcctcagtcaacgctgacctgcccatcgccactgcctcagctgatgtcgccgctgatattgccaagtacactagcaaaatgatggatgcaataaaaggaacaatgacagaaatatacaacgatctttctaaaaacactactggaagcacaatagctgagattcgcaggctgaggatcgagatagagaagctccagtggctgcaccagcaagagctctccgaaatgaaacacaacttagagctgaccatggcggagatgcggcagagcctggagcaggagcgggaccggctcatcgccgaggtgaagaagcagctggagttggagaagcagcaggcggtggatgagaccaagaagaagcagtggtgcgccaactgcaagaaggaggccatcttttactgctgttggaacaccagctactgtgactacccctgccagcaagcccactggcctgagcacatgaagtcctgcacccagtcagctactgctcctcagcaggaagcggatgctgaggtgaacacagaaacactaaataagtcctcccaggggagctcctcgagcacacaatcagcaccttcagaaacggccagcgcctccaaagagaaggagacgtcagctgagaaaagcaaggagagtggctcgacccttgacctttctggctccagagagacgccctcctccattctcttaggctccaaccaaggctctgttagcaaaaggtgtgacaagcaacctgcctatgccccaaccaccacagaccaccagccgcaccccaactaccccgcccagaagtaccattcccggagtaataaatccagttggagcagcagtgatgagaagaggggatcgacacgttccgatcacaacaccagtaccagcacgaagagcctcctcccgaaagagtctcggctggacaccttctgggactagcagtgaatcgggacacaaaccacccaccccattgggagaaaaacccagacgccaggaaaagaagaaacaacaaaggcaggagaacagccactttcagacttgaaaatgacaaaaccctcagttgagcctgagcccccggcgcgggggctgctacactacaggacacccagcatcggctttgactgcagactgttcacccacacgagccctgtgcttttggtgtaaataatgtacaatttgtggatgtcattgaatctagaggactttcccctttttatatttgtattaactttaacttattaaaaaaaaaaaaagaaaaagaaaaacgatttaaaaaaaaaaaaaaaagcaaccaaccccaacaacaaaaaagaatgttttggtattggagaagggatggtcagttagcctgtctgtcacacgacggaatggatactgggcccggggaccactttcatactcacgtcctcatccttggatacccaggggagggcgaaccgttttcgctcgtgtgtctgtacgcagcatgttgggatcgggagtttcggcacagactatcccatcaagccgttggctcctttcagctactacgttaccacgttcctaaaacgcaagctctccggaccagacggacacagggagaagctagtttctttcatgtgattgaaatgatgactctactcctaaaagggaaaaaacaatatccttgtttacagaagagaaacaaacaagccccactcagctcagtcacaggagagaacacagaaagtcttaggatcatgaactctgaaaaaaagagaaaccttatctttgctttgtggttcctttaaacacactcacacacacttggtcagagatgctgtgcttcttggaagcaaggactcaaaggcaaggtgcacgcagaggacgtttgagtctgggatgaagcatgtacgtattatttatatgatggaatttcacgtttttatgtaagcatgaaacacaggcagtatgagagaaagcaaggcccgtcatgctgtccgtacactacgtatgctgtagagccattttgtatgttgtgtaaaacaaaaagcattgatgaaaaagcaaaaggtgatgtatgtatatgagaaaattaattgtacgatatcattccagtacgttttgttgtacattttagtcttgtttactttctcttcattgttaagaggatgcgaactgtacagtttccagctagttacccatattagagaagaaataagagagtattagaagaaaacaggagagaaagaacatttgtgaattgcagttgtcaaaaaaaaaaaatagcctagctggccttatttgtgaagcataattgcttttagcatatggaagtattttttcacattttctttgtataaaatttgtattaaacttaaatatctttttgatggtggtgtttctttgtgactgagccagtagactcacactatatgcttttttgggtttgcccgttccttcccccacccccccagttttttcagatttttttacctttttttaattaaactgtttt

SEQ ID NO: 176 - protein, 1075 aa, Homo sapiens
MSAVGEPLFSFEQERLGPLSSRTFSMADPGSAERTAQKRKFPSPPHSSNGHSPQDTSTSPIKKKKKPGLLNSNNKEQDGRNDFYCWVCHREGQVLCCELCPRVYHAKCLRLTSEPEGDWFCPECEKITVAECIETQSKAMTMLTIEQLSYLLKFAIQKMKQPGTDAFQKPVPLEQHPDYAEYIFHPMDLCTLEKNAKKKMYGCTEAFLADAKWILHNCIIYNGGNHKLTQIAKVVIKICEHEMNEIEVCPECYLAACQKRDNWFCEPCSNPHPLVWAKLKGFPFWPAKALRDKDGQVDARFFGQHDRAWVPINNCYLMSKEIPFSVKKTKSIFNSAMQEMEVYVENIRRKFGVFNYSPFRTPYTPNSQYQMLLDPTNPSAGTAKIDKQEKVKLNFDMTDKILMSKPVLSGGTGRRISLSDMPRSPMSTNSSVHTGSDVEQDAEKKATSSHFSASEESMDFLDKSTDASTKTGQAGSLSGSPKPFSPQLSAPITTKTDKTSTTGSILNLNLDRSKAEMDLKELSESVQQQSTPVPLISPKRQIRSRFQLNLDKTIESCKAQLGINEISEDVYTAVEHSDSEDSEKSDSSDSEYISDDEQKSKNEPEDTEDKEGCQMDKEPSAVKKKPKPTNPVEIKEELKSTSPASEKADPGAVKDKDEPEKDFSEKAKPSPHPIKDKLKGKDETDSPTVHLGLDSDSESELVIDLGEDHSGREGRKNKKEPKEPSPKQDAVQQKEITQSPSTSTITLVTSTQSSPLVTSSGSMSTLVSSVNADLPIATASADVAADIAKYTSKMMDAIKGTMTEIYNDLSKNTTGSTIAEIRRLRIEIEKLQWLHQQELSEMKHNLELTMAEMRQSLEQERDRLIAEVKKQLELEKQQAVDETKKKQWCANCKKEAIFYCCWNTSYCDYPCQQAHWPEHMKSCTQSATAPQQEADAEVNTETLNKSSQGSSSSTQSAPSETASASKEKETSAEKSKESGSTLDLSGSRETPSSILLGSNQGSVSKRCDKQPAYAPTTTDHQPHPNYPAQKYHSRSNKSSWSSSDEKRGSTRSDHNTSTSTKSLLPKESRLDTFWD

SEQ ID NO: 177 - DNA, 115075 bp, Mus musculus
  misc_feature (1)...(115075): n = A, C, G or T/U
ctgggtctcctagggcaaggtcagatcttttcacttctgcttttcttccttcattctccaatccaagtcccactgtctatcaccatgttcaaccagtgtctgacttgtccccctgcccggcaggctacttgtcttcctctgtgatcaatcagtgggtcccagggatggcagcccctatttggggtcaatcttatttcatttctatttcctcctttcactagattattaaagaaaggttcattttatttacaagtacttcaatatgtgtctctaaaaggaaagcattttaaaaaatcaaaaaattatttcattctgcaaaaattaataatgattgcttgatatcgaatacccaagcatattcatatttccaaacttagtcttgttgttgtttttccagttgataccttcacaatagaattcaaacaaggcaggctgaagagatggctcagcagtcaagagccctggatattctttcagaggacgcaggttcgattctcagcacccacgtcacagctcacaactgtctgtaactcccattctagagtacctggcaccctcgtgtagacatacatgcagacaaaccagcaatacacatgagtcacacagggtccataggttgcacctgctcagtatgttctgtttctttaatttgtgggtcctccttttctctttctcctttcttagaattcatttgttaaagaaatgggtggctaggcttgcagttctctgtgttctgcttgctgctgggtgcatcgccgtggcagtgtctcactcctttctctgccttgttttctgaaaactgccgctgaggtctggaggcccaagctgatccaggctcattgacaaagattccacagatggcatcctgtgctttgactggggggccgggggggtgggggcatgacagggtttgtccttaattgtcaataatgatcctcgtttagcatttaaaaaacagattgctctttctggttttgtgtaccggtgttttgactgcatatatgtatgtacaccatgtatacacctggtgcctgtagaagccagaagagggtgtcagatctcctggaactggggttatagacgatgatgagtcaccatgtggtttctgggaattggacttgggtcctctgcaagaacagtgttttaaactactaagccaactctagccccttgcttggcttaacacttacatgattttattaaatctttgggaatatcattcatactcacagtgtattttgatctggatcctattcctcccctaccttttcccagatctacctcccatgcccctcccaaattcatgtccccccaccccagttcaatttgtgctgcccgtgtactcagggtgcagagccgtctgctgaacatgatcaacctactggggccacacactgaaaaaacccgactctcctccctactgtcaataacacctcgactgtgggttgggacttctctctctatgctgggatgtcgactgcttcaattgactctgttgtcctttgtccgtcacatgcgtgagatggctcacacctgcctgcgctcatgcttacaaaccacacgtacacaatactaataaagttgaagagaaagctggggtaagattgtgcagctcttgtacagatggtctcagctgctttgaagtcagccgctgtctgatgtgggttctaggaactgaacctgggctttccacaagaacagtttgcacacttacccactgagcatcttgagagattcataattttctttgtctaactacttcagctataccaactagtatgctgttagtagaagtgctgaaagcagacatccttgtcttattgattttaggatgaaaaagatgcagtcttttaccataaagtatattgttagctataggtcttttcatagaagtcaatactagattaatttttcttctatccttagcttgctgagaattattttgttaactgtgaaaagacattggaatttgtaaatgccttttgtttttctattctaatggttatatatttttggttgtttattcaatttgctagtgttgagttctgccccctgactcccagcatagctgcagccattttgttccatgcccaccagctatttcatattgttgctgtaatctgcctgtcagtcattggcacaggaaaatagcttgactcagagcagggtcatgctgaacacatgccctgttatgttctgtatgttctatataagatttgttaatcttaagaaattccacaaagcttcatgtaggacccatcaagttaaaggtcaatatgaactgtcatgtctaaaatatcttgagtcagagctgaccactgggcagcacttcctgcgcctgcatatgagctcattgtggtttttacaggttttctttccttataatcctcccctgagaaatgtttgttgtcactgttcagaataattctgagctatgtctaatgatctagtcagtattagggtgtgcgttcaataaaccatccctgtctgactgagattgatgtttgtgtggtttgttgagcgactctagggccccaacagctagttgtgtccatgtctttcttttttcttctttttttttcttcctctcttcttcttcttcttcttcttcttcttcttcttcttcttcttcttcttcttcttcttcttcttcttcttcttcttcttcttcttcttctcctcctcctcctcctcctcctcctcctccttctcnnnnnnnnnnnnnnnnnnnnnnnnnnnnnnnnnnnnnnnnnnnnnnnnnnnnnnnnnnnnnnnnnnnnnnnnnnnnnnnnnnnnnnnnnnnnnnnnnnnnnnnnnnnnnnnnnnnnnnnnnnnnnnnnnnnnnnnnnnnnnnnnnnnnnnnnnnnnnnnnnnnnnnnnnnnnnnnnnnnnnnnnnnnnnnnnnnnnnnnnnnnnnnnnnnnnnnnnnnnnnnnnnnnnnnnnnnnnnnnnnnnnnnnnnnnnnnnnnnnnnnnnnnnnnnnnnnnnnnnnnnnnnnnnnnnnnnnnnnnnnnnnnnnnnnnnnnnnnnnnnnnnnnnnnnnnnnnnnnnnnnnnnnnnnnnnnnnnnnnnnnnnnnnnnnnnnnnnnnnnnnnnnnnnnnnnnnnnnnnnnnnnnnnnnnnnnnnnnnnnnnnnnnnnnnnnnnnnnnnnnnnnnnnnnnnnnnnnnnnnnnnnnnnnnnnnnnnnnnnnnnnnnnnnnnnnnnnnnnnnnnnnnnnnnnnnnnnnnnnnnnnnnnnnnnnnnnnnnnnncttcctcctcctcctcctccttcttcttctcctcctcctcctcctccttcttcttcttctcctcctcctcctcctgctcctcctcctcctgctcctcctgctcctcctcctcctccttcttctcctcctcctcctccttcttttcttctccctcctcccttctcctcctcctccttcttttctaaagacaggatcttaatctgtagcttgagctggtgtggcagcctgaaatttataatcctcccacctcttcttttggtgcagttggattacagacttgagtcatcatgctctataaccctactggctgtaactttcttgtggtgtccctggtttgataccaaagactcatagtaagttgtgaagttatctatctgtttatctatttatctatctatctatctatctatctatctatctatctatctactggtatttgtttttttttgttttttgagagagttggtaaagagacagcatttaattcttttaaaaaagtattatgtatgtatttatttatttatttattggtttttttcgagacagagtttctctgtgtatctttggctgtcctggaactcactcagtagcccaggaggatggcctcagactcacagagatctgcttgcttctgcctccagagtgctggaattaaaagtgtgtaccaccacggcccagcaattcttaattcattaattaaattttaatgtatgaatactctgtctgcttgtacatatgccacaagagggcatcagattcctttaaagatggtaatgagccaccaggtggttgctgagaatcgaactcaggacctccggaagaacagccagtgctcttaactgctgagccatctctccagtccaggcatttgattctttgtgtagaatgtttcaatccaacaatatggggctgggcttttcttttggggtagggctttgttttctaaatcaacctattgtaagtcttcagaatatttatttatttatttatttatttatttatttatttatttatttttgggagttttgcctgcatatatgtatgtgtaccacgtgcatgcctggaactgttggaggtactgggattggagttccagatggttgtgaactgccaatagagggctgaaaattgaacccaggtcatccaaaagagcagctagtggtcttaactgctgaggcacatctccagcctcctgagtcttccttagtctgtttctatcatttctaaatatttttctgtttcatttgaattgccatttcttagttctatatgccatttcttacgattctttttatttctgtaaggttggcagtaatgcctctgttcttcccacgtctgcctttctccctgttaagttctagccaggcattgatggcatacaccacgaatcccagcactccagaggcagaagcaggttagtgtgatctacagagagagttccaggtcagccatggctacacagaaaagtactgtcttgaaaaaacaaaacaaatagaaagttctccatggggctggtgagatggctcagcaggtaagagcacccgactgctcttccgaaggtccggagttcaaatcccagcaaccacatggtggctcacaaccatccctaacgagatctgactccctcttctgaagtgtctgaagacagctacagtgtacttacatataataagtaataaataaatcttaaaaaaaaaaagagtgtatttgtttaaaaaaaaaaaaaaagaaagttctccatgtgggaacatggcctagaactcatattcctgtagcaaaggctgattttgaacctgtgatcctggttagattcctggtagctgggcttacagatagtgtgccacctgatctggtgggcttttttaaaaatataggtacaggaatatgagcttatcagtactattttaataataatttatactatacatatatctttttttaataatataaaggttatatttcacaagttttttgaaggctacagagaatttgttgagattttttatttatttatttttattaggtattttcctcatttacattttcaatgctatcccaaaggtcccccatatccaccccccctaatcccctacccacccactcccccctttttggccctggcgtttccctgtactggggcatctaaagttggcaagtccaatgggcctctctttgcagtgatggccgactaggccatcttttgatgcatatgcagctagagacaagagctccggggtactggttagttcatattgttgttccacctatagggttgcagttccctttagctccttgggtaatatctctagctcctgcattgagggccatgtgacccatccaatagctgactgtgatcatccacttctgtatttgctaggccctggcatagcaaatatgagcttatcagtactattttagtaataatttatactatacatatatcttattttttattcagcgtaagtattttgctatatttctgataatttcttttatttatcagttatttaagggtacatgatatctgatttctacatacttgtgacttttccatatttttatcttctcgtttctatatacatgcatttggggatgtttctgagcccaagcttggtggtgggacagggacagtggtctacttctctgttaagagctgagtggtaagtagatatgaatagggacactagtcacaggtcttgagactgcctacttatgttgtcatggaaccccacttcatagctatgacaaggtcacccatgacaaggtcacagtaatcttagttggtaacatacccagagtagagccccctttcatgatatggcccgagtagaagatgggagtccacacttacataaagtgtattaatctgcaatttagtcttggaaacaggcagcaggagttaatagctgatccctcctgggaaatagccccctgccttgcagttgtgcatttctggcttcagtagaccagagtataattttgtctcttgggaccaggcacacagaaagtggatattcttggtcacataccataaaacatgagaattctaagtttttgtaaattttcttaaagaaagaaaggaagaaaggaagaaagaaagaaagagggagagagagaaagaagaaaagaaagaaaggaaggaagaaagagaaagaagaaaagaaagaaagaaagaaagaaagaaagaaagaaagaaagaaagaaagaaagaaagaaagagagagagagaaaggaaggaaggaaggaaggagggctggagagatggctcagagattaagaacactgactggacctgagttcacatgggcctcacaaccacctagaatgggacctgatgccatcttctgacatgtaggcatacatgcagaccaaccactcatacatgcaaataagtaaataaataaataggtaaataacaaataaatgaacaaccaaatgagctggagagatggctcagtggttaaaagtattgctgttttttccaaaggacttgggttccagtcccagcacctacatggtagcctacaactgtctgtaactccagttccagggggaaccaacatcctcatacacatacatgcaggcaaaacaccaatgcacataaaataaaaatgaacaatttttaaaaaaggaaatacttttaaaaatacaccagtgtgtgtgtgtgtgtgtgtgtgtgtgcacgtgtgtgcacgcacatgtggcacttgagtataggtcaaaggtttgtgagatttggttctctccttcaccatgaggggctctgggttcaaacttgagttgtcagacttggcagcaagtgcctatacccactgaactatcttgcctgtccacttttgtatattttcatgaaaaaaaatttctccatcctctttttctaaaatgtttatttagtttattccaagtatatatactgttttgcctacacgggtatctatgtaccatgtgcatgcctggtgcccactgaggtcagaagagaggatcagatcctgtggaaatggagctgtcatgtgggtgccaaaacctgttttgttttaaagatttatttcatttatcgtatatgcatgcatattctatctgcatgtacacctgtgacttgcatgccagaagagggcattagataccattatagatgatcataagctaccatgtggtgcctgggaattgaactcaggacctctggaagagtatccagcgctctcaatgactgagccatctctccagccatcccccaccccctttataagagcaatagtgcacgtaactgttgatccatttagcctgtggtgtaagtgtctctttgctgtatgcctctatgatattctcaaagactcactggagaacggtggagccccttagatcctgtgtcacagaggaactctgggccaagtcttagatctttgaagagaaacttaccctcatcaattatttccttaacctaagtacagtttgattagaagaatgcatcaaacatggtctcaaaacagaccgagggagaaagccaaatttaccacctcccattctttccttcaacactgcatgatgtcaccatgttactagcttgtgctatatttagctgaactttcacagcagaagaaatcaaagagctcttatgtgggctgttttcctgaaaatagctagttcttgagtgaatgctgtagaatgttttctttgtgggctgaattttattactgtttccactttttagcctacctcaagacttgtcgccaggcacaacccaatttcccagggtggggagtcggggtggggtagagtggtgcccatttttacttaattttacttaatttcatactcagaatagaaggcctaatatttgtggggtcttgtttggtttttgttttgttcttcaagacccaaatacttggtgaaacaactctcagaaactacagtagtctttatagtctaaaaaattgtgtgtgcacactttgtgtgtgtgtgtgtgtgcggacactgtggaaatctggaggtcagaggacaatctgtgcgagttgattcttgccttaaaccttgtcgagttgaggtttctcttctttctgccactccggagaacttctgccgagctcgcccttgagattcagactctcctctctccccctccctcacagtgagaatgcccatacgacagatgcatacacctcgtgtgccttttatatgagttctggggaatggactcagatcattaagcttgtgtgacaagcactttttatctgctgagccacctcctggcccctcagtcctcccgatgagtgcaaagtttccttttgcatcacgacatcttgagtaggaagatgcttgtcatcagcactgttttcaaaggtgtaaaacctgtttccagtctggagcccattccattcctttcatatccagtcctcaaatgaggagaaccacagagagaatctgggattacgtgaggaggattacgtgaggtatgcaagccatgtagcatgcttgccttaatgatgggtgaacaacccacatactatttcgggtggttccttggccaatcctatggatagatgtgtgttgtcttcattttacagagaaggctcagaatacagggctgacgtgaagtagatgaagggagttactcaagatcgaaggccgagaagaacagaagaaccaggttcagcgccgaacgatgcttgcttgtcctctgtatctgggtccttctctgactccctctttacattttttttttggtaaaagagttattttaatattatgtatggatgtttgcctgcatgtacatatgtatattatagacatccctggtacccatggaagccagagagggcatcagatttcctggaactgtgaatcaccacgtgggtgctgtgaactgagcagcaagtgttcttaaccattgagacacctctccagctctggactcccctcaccttgttttttttttttttttttttttttccaaaaactgacatcatatttgtatataacacactgtgacaaactggtctccttcccacttcctctctgatcctgggtagtggaacttcggactgtgcctgagatatctttgaagaaatacttttcctcttcaattattttgttatcctacatatactttaattggaagggcagattaaacatggtctcaaaacagaccaaaggagaaagccaaatctgccgtctcccattcttttcttcaacactgcatgacatcacttgtgccccatgcaggcatcacagctgccctgtgctcatgatcgaaacggccacatcttgtcaggagggcagtggcccctcttctctatcctttggtcttcacagtccatctactcccttttggatgacgtccctgggacttggagcaagtgtcatagatgtcccatctgggaccaagcactcagcgtctgttcccagtacggtgactagttatgagcccacactttgaccatcacccatagcggagaaaggcttctttgaccaaggttgagaacttcactcgtctaagagtatacaagcgcatatgcagaaggcaacgaactctactccattctgcaaaaaaatgtcagcagttgattgccccacagtgcctgtgagtgctctctggctctttaaagtaaactgagatggggcaccctaaagcagaaaggaaggagaaagcaatataaacaagaaatgacaaagggggtagcatcctgttagagcccctgcctcagcctcgcagtgttctgaccaaggagggtccaggtaactgctgctaactgacacttcctgtcacccggggctttgggaagctgaagtaagactctgagcttggagattagctttgataatttgacaggggaacttgaagtcgagtctcctgaaacatggtcgtgagaggctaatatttccaagaaagtagtcaccagtcctctacctctgccatgtgccactctctggcccctgcttgaaggaggccacttggtttagttctctttggttttggatggtgcttcctggtgacacatagcctggtgacacatagcccaggcttatctgtgtgtgcggtcattgtatacacctgtagcctaggtccacactgtctcttggagccagagtccagcttgggtgttgtcctagccacaggggccacagagtctgtttttcatttttgaattatagaagatgcactgagtttggtggggaggggtcagggtttcaccagtgacccttaaaaaaatcagtttaattcaaatatgcctaaaagaatttcttgctagattagggacagaaatatccccggcctttagatggaaatgattagaggccctttggagccaaagggaatctgaaagaatttttttctttttgttgccatgaagtaccagattatgaaactactgtgttcttctgttatgcattaacaaatgtttatttaataccagagtactgttatgcgttacagcatcggtggttctcaacctgtggtcacgacccctttggaggttgaatgaccctggaacaagggtcgtatattagatatcctatcgaccagatatttacattatgatttctaataataacaaagtgataattatgacgtagcagtgaaataatgttatggttggggtcaccacaacatgaggagctgtattaaagagtctcggcattaggaaggttgagaacccatgttagagaggaaactaactcttcatttaccttttgttgttggtttgaagcaggggctctctctgcagccctgcattgcttcaaaatcatggcgtccctcctgcctcagtctcttaagggctgggattacagacacttgcaggtaactgtccatcactgactagacaggaatctggaggcaggaattgaggcagaggctgtggggaagggctgttttctggcttgttcctcctggcttgctcagccagctttcttatacaactcctctgaacctgtgagccggccccaatcaaatgctgtcctttataagagttgccaaagtcatggtgtatcttaacaacactgaaaccctaactaagacacaaggaccacctgtccaaggctgtcaagacccacagagggctgggctgaaccctccaacatcaatcagtaattaagagaatgccctatgggctagcctaccagcaatctggtggaagtgttttctcaattgagactcctctttccaaataactctagtttatgtcaagttgatgaaaattaaccaacacaactgacccagttttcttattaccttgaaaaagaagaagggttcaagtggtagaaagttacttcctggaaatagagctctgcagaggaaatctcctgagcactctgtcttgacagttgcaaccactaggtggtggtattacgtcatgaaaacaacaccttttgcggccagtgtctgtacaacaaagacattttcagttactaaatggagaagatacgttttctaatttgtatacagagtccaatttaaatgcttgaggggactggtagctccttgatgctgagcctgttgtcatggttacaacaccaggttacaaatgacaaataggaggctgacgaatgaatggactatctcaatagtttagattattactgaaagcaccctttcaagaatatgtggaattctgtagtccagaggctttgaattggggaagttgaaagctattgatgacctgacatcattaggacagactcagggaggtgaaaataccaaaggcagcctaaggcactaatactgtttttcattctctctctctctctctctctctctctctctctctctctctgtctctctctctcccaccctccctccctccgaatctctcctctctctgtttgaatctgtctgtctctccctcccttcctccctctgactctctctgtctctctgtgtctctctgtctgtctctgtctgtctctctccgtgtgagtaatgttgcttggccggggtttaagtcctagcaccaaaaggaagaaaggaaaacaaagaaccaagtctatgtgtacttgcaaaacatttgaaacagtcttacatatagcctagcccagcctctagtttgagattgtctttgcctctgcttctcaagggcttgaatcgtaggtgtgtgatactatcagggagcctgtgtgtatcttgactaagtcacacatgcttttaaaaaacaggaaatgggctggtgggacggctcagtgggtaaaggcatttattaccaagcttgataacttaggttcagtctccaggacccacatgatggaagcagagaattgatctttgtggattaccgtagtctgacctacacacacacacacacacacacacacacacacacacacacacacacacacagtggcaaatgtgtacctacacagagacagaaaacgaactacatagaaagggggctggagagatggcacagcagtgaagagctttttgctcttccagaggactggcacctacatgctcctcatgactgtctgtcagtccatttgtaggggatctgacggcctcttctggatgccatgcgctgcatgcacagacacgtgcaggcaaagcacttacagatataaaatatatctaaaatagcagtagagtgtagtttggtggagtacacctataattccagcactcagaagttggagacagaatttctagtttgaagccaggctgggctacatagcaagatcctgtctcaaaccattcttgacttctttcttgagtctgtacagtgtataaaggtatttctgccttggaagggattacgaaaagttatctgttaattttctctgcctctcattcactggttcgttgtaaagtcatttatggtataaatatcgttgtaaagattgtgtgtgtgtgtgtgtgtgtgtgtgtgtgtgtgtgtgcatgtgtctggttggatgagtatgtgcgcatgtgagtgcactggagcacttgcggatgccagaagagggcattaaatccttcggagctggagttacaggcatctgcgagaagtctggcttgtcctgtgggtggtgagatcctcacaagtgcacagcacacacgttcagccacggagccttcttacccaccagcctccactgcacagtgatcagctgagcgactgctgtgggaaaagcactggtccaggttatgtgagcatctctggtctcatcatctcgccttgtcttagcacctccgagatcagtaccaaatcacattagccatatcgtccacaccctccctcccactctactctgatgcctcggctatttccctgatctgagtctagccttgttctccacacagactgcctcctccccttcactcaccttccaacatgaaagtattacatctttccctaaagccgtcccttgcccggagatcagcacagcctctttcattgggtttatgagcgtcgcagggcacagccacctggactggctttatcccatttgcctgctccctctttactccgtatgctcccaccatggctgcttttattttgacttcttctaatgagccgtgtcctgtgctattttcagacttaaaattttttcgggactttccattcaacctggaacattctttttttccttcctgtttggctattttctgttcattcttaggtctcggcttacatgttccccaacttggaaataagcctttccccagctggacctgtaagagtgagtcccccctttcattctcttctcgtggcctctatggggcaggtgggccacagcttgctcttgctaccctctactgccagactgtgagctctgagtgtgtcacagcgtgtctccacacttggggggagtgcctggcattgtgagggcccaggaatgcagggtgaagagtgaattagtgaaatgcacatctaacatgtcttctttcttttgttcacttgttcttccttcctttatttctatattcctattattattttaaagatttatttgtatttatttcatgtatgtgtgtatattgtagctgtcttcagacactccagaagagggcatcaatcagatcccattacagatggttgtgagccaccatgtggcttctgggaattgaactcaggacttttggaagagcagtcattgcttttaaccactgagccatctctctagccctgtgattttttttttttttttaattttgatccagtggccatgtgaagctgtggagggaccagggagcctgagcatgaggctttcctcgaagttaggaaactatgtagctctggttgttctgggactccttgtgttgaccaggctggtttcaaactcacagatatctgcccacctttgttttcctagtgctggattaaaggcatacgtcaccatgttcagcaattctcttcctttttttttttaattaaaaaattaatgtatttgagtattttcgtgcatgtatatctgtgccacatgtgcattcctggtgcccaaaaagggcagaattggcgctggaactggagtgacagacagttgtgagccaccatgtgggtgctgggactctggaagagcagccagtgctcctaactgctgagccatctcgccagcccccagttcttttcgggagctagcagggtaagatacaacacacaaaagtggagctgtgctggtgagaaaggtcagccaggatgtcatcgtttgaaactgtgtttccattttcactgtgggtggcatttgaggtggaaagggatgaccggatagatttggacaataggcaaggagtagaattcttctgggaaagagtacgaggtagggtggaagaatgcttgggtctagcttgtacaggccctagatgctagtggatagccaatggataaccagtgactgctcttgataagactgaattactgtttcagaaaatcttgatccagtggccatgtgaagctgtggagggaccagggagactgagcaggaggctttcctggaagttagggtgggaggtgcttggggcctggactagtgggtgtcacttgacttgtagggagtctgagaagacacggactgaacagtgaagatgggaaggaatggaggagagggaagagccagtgctttcagccagattccaccaggtgctgtctctggcagagtcaaagtcaagtggaggaggagccagtcggaggaaggaagaattcatccatcaagcctttatgtggtccagtgaaggctgcatttccctgtggaaactcagtgtgtggggctaaaaacaaaaaacgaaaaacaaacaaaaaaagcacaaacgtaaagagaagacacgcagagctgacaggacaattgcagctaatagaagctgtcccagttcccctgctccaagtgcctccaaagggaggccaagatggggggagggaaattcaccagtcccctttccatttgtaatgccatgtgattttatgagtgacatagggattattttagggcaattgtggctattcacaatctatgtcttgaatgctggttgtagaattgaaattcctggcaagatttagccacccacccgctcgccctgccctcaccccagtttgtggcaggtgctaatcgggcagtcggcagctatgaagacttctgctgctactgtgctggagtagttcactctctgagtggaaagatggagtgctggctacatttatgtcaacttgacacactgtagtcttctgagaagagaaaccttgattgagaaaacaccttcataagatccggctgtgggccagcatatagagcatttcttaattagtgattgatggggaggtcccagccccttgtgggcaatggtagccctggactggtggtcctgggttctataagaaagaaggctgaggaagccatatggattaagccagtaagcaacgcccctccatggcctctgcctccaggtttctccctgtttgcgttcctgtccttggcttcccttcagtgatgaactacaatgtagaagtgtaagcccaataaaccctttcctccctaacttcgtgtttggtcatggtgttttgtcacagctaagtcagaagaggaagcagacagttagggctccagagtaggtgaacagtcagaaaggtgggcacacggaggaaggcaggtgtgtcatggtcatggtggcctgggtgcttggattggagagtgaccttggagtcatcagaacagtcaaggacagcagtaggcatgtgtgacacatcaaagggcgggaaacaggggaaaggacaggactcgggcagagccaacagcacatttttccctggaaaggtaggaagagtcagtcataccagaaagcaatggttagaggagtgggaggacccaggcaaggtggaggacagccaagaacagaaatgcagcttccataaggggatccatggtgaccgccaagccaatgaacatctttgcttgagaggtggtggcaggaagcgtgagtgatgataatccacaccacttctctgtcacagctccagtaaaaccagcttccccgaagaatggactccatgcggaccatggccttttccctttgtaatctgctgccagccgtggaactgcactttgacatcttacactgatgcagaagaagactcagctctacctcagccttaaggtccagcttgccgggtccagctgagccgcagatgtaagcagtagtggttgtgtttcctacaaatcaaatcaaccctgcagcattcctgcccataccaggagagccagactcccacatggctgtaaacactcacttgtgaagggtttccctggagtttgcctcttgtggtgacctcataagaatctagataaggcagccttcagcagtttgttcctggatgcagggggccctgggtattttcagctaatggttccttatcctggttacattgttcttttaaaaaccatttaaataacatgaaaaccctattttacacagacttgcttagcacttccagtttttttttttttttctttccccctagtcttttgagcagatgcagattgcagtacatcattttctcttggcctgaaagacccttaatattctcctagtgtgtatgtagaagttgcattcattcggctttgcaaatctgagaaaatacttactattcatttctttgaaaggtatttttgttgagtggagaactcttgttgacattttgtttcttttcctagcatttgggaggcacaggtaggtaggtaggtagttaggtaggtgtctgtgagttcaaggtcagcttagtctatatagtgagttccagctgagccaggggctatatactgataccctgtatcaaaacagaaagcaaaacaaaacacacaccccctacactccccctcccaagaacaataacaacaaaacccgaggttccctcttgtcttctgcacttatttctgatgaggagtctgaggacttgtgatgaggagtctgacatcactctcattgctgctcatctacacatggactttgtttactgaggggtctgcttctgagactcccccaccagcctcaggcatcttatgcagctctggcagaggcctcttcacagttctttgtttaggacccattgagatttttggatttgagagtgtatagtttcttcaaatttggaaaaatacagcccactgcctcctgcttcctttagggtgcagtgcgcatgtacacacagggcggcacatttgtgtgccttcctgggggtcaacctccagggcagtttctccagtgctgacatgttgattttgaggcagggtctcttggttggcctgggatgacccagtaggctatactggctggcccaggagctccggcattcaccattctccatgacccacagcatgattacacgcacacggtaccatgcccagttccatatggacttctgggatggagcccagttctcatgcaaacttggcaagcacagtactgatggccacttgagtggattttttggtctccaagttcactaatctgcagtgcactactaatctcatcctgtgcaattttctctcgtctcagaccttgtgtttccccttcagatagccaatatttcactcgactgtttcttgatgaaacaaaatgacttctaaggaacaaaggtttacttgactcataagttcagagtttctgtctgtggttacctggtctgtgtttctgggcctgggtggtaaggggatgtgcatcgtggaggaagccggtgagagagaaaagatggtcacttcacagcagtcagagagagagagagagagagagagagagacagatagacagagacagacagagacagacagagatagagacagagacagacagagagacagagagggacagagacagtgacagagacagatagagacaaagatagagacagagacaaggatagagacagagactaatagagagagacagagagacagagacagagagatagagactgatagagaatgagggagagagagagagagaaagagagagagagagagagagagagagagaggaggtagctaaaatcaagacatgaccttcaaaggaacgcactggtagcctacttcctccaactaggccccacctcccaatagctcattcagaaagcatgtatcaatgggtcaaccctctaagggagttagagccttcctgactgagcctcctcactattagctgggcatcatgccttcagcatataagcccttggggccattttatatcccaacaataacactgttaaagtgcttctcgggcatataaaatatagttatgctgactattttaatgtctttgtctataaagtctaccagttatgttcttccttgagttcatttctattgattgatgttctttcttgccatgggtcatatttcctgcttctttgcatgcctggtggcttttcattggacttcagacatgactagtacctggctggatgctagatatttttgtattcctataaataatcttgagcttgttctgggatgctgttacattacaaagaaacagtttgatcttttttgggtctcgctgttaaggtttttttagatggggccagaattgcactgaatctagagcacaaatgcagcaagaccctctgggtaagcttcaaaaactgttctctctaactcatctaggcatttctttgtcatccttgggtactttcctcatatccaggagtcattggtattagcagaaagttggggtaggacccttgacaggtctctggagtgctttctctctttgtgtggccacctcctttctcttacccatgaactctagctatcttggcctcccaaatgctaattcaggagttggagttgcctttagctatctgtcccttttggaaaacctcctctagcagtaggctgatctggtctcatagctcatactttttctttatttctttgtttttctctttgcttctttccttctctctctctttctcatcattctcttcctttctctctttttttctttctttcttttcttttctttcttttttttttttttctgagacagggtttctctgtatagccctggctgtcctggaactcactttgtagaccaggctggccttgaactcagaaatctgcctgcctctgcctcccaagtgctgggattaaaggcgtgcgccaccaccgcctggcgccctccttcctttctttttcctgctcacttcagataaaagggaaaatctagtccctagtatttcactttggctagaagcagaaatctacagagctctttcggtttggaactctctggaatgcaagcctatggcaagtcaagggctctttatcagaccaggaaaaggggtgcttctccaagggctgaaagggcttccaactcaagtacaaggatagagcagtttgagggcagtatctttttttcctggatcttatcaaaactttggcctcaagttagctgtttcactgccccttggtggtgcagccttggtgctttttatggcaaagctgtacctctcagctcacatgtgatgtcatcatttttttggtgggtgggtgggtgggtggggtgggctccgatttctccttagatgctgttttgtgtattcaggtcaccaaaaacttctccactggaggcaaatggaagttcctcccgtgcatttacagcccccagcacttgcagctgtagacagcactactcctaagacactgtgttccgctttgaagatgaagtgcagacacactcttaaaaagcaggtcctccatttcaagggtgagcaaaacaccacttagccaagcattccgtctggttaaatttagaacaagagagggagaaaagaaagagttcagaatattctctgacactgagcccagggtatttttccttttagagtgacttgggcacattttcattcatgtggacccggttgctgctcagtattatactctgggatggaaggtcaacaacgactgccttgttgccgaatccagcgagcccttctcagttattaacctacttgacctctcaacagcatttgatgtggaccgttctcttcagcacgttccctggtttttcttctccctcccctcgtctttctgttcctgtccctcagccggtgccttgcatggttagaccctgaaccttcttctcacctggaacattatcttcagaatttttaaaatccacgcctatggctttcctgggaattcctaaactggtgtttctagcctaagcatttcttctgggcgccagcccagaaagctcagttgctcacctgctaccttcatgtcgaccctacagagctaacccacccttagctgtctcctcctggctagttttatgtcaccttggcataaactagactcatgtgaaaggagggaacctccaaactgagcgaatgcttccataagctcctgtaaggcagtttcttaattactgattcatgagccatgactgagcccactctgggtggagccacccctagattgatttgatggtcctgggttctgtgagaaagcaggctgagcaagccacgaggagcaggcaggtaagcagcacccctccgtggcctccatatcagctcctggctctatcctgccctgacttccgtcaacgatggactatgatgtggaagcataagccaaattaaccctttcctccccaaattgctttggtcatggcatgaatcacacagcaagattaaccctgactaggacaatctcatagaaggccgttctccttggttcaggtctccttggcaggcactacatttctgtaaaggatacccctgcacattttgtttctgaagccagaattccttgcattcaatcttcctttcggtcagcaagttctgccaatgatacccctgcccttcttttgggagcactgttgtctgtgttagcctggtgaagacctccttagagcacgctctgtttccatcccccatgccatctcctctcatggctcccttctgccacctctagccacaaaggcctgtgtaaagggggatgaaagccgcgttctgctcaagtctttctgtgaccaccctgtcacggggctaaaactcatacctgctcccctttgttctgtttcatggatctggagatcaaactagggctgtatgtatgctaggcaagtactctgccactgtgctataccccaggtctctgtgttccttacagtcaagtgtgaggttccctaagctctgtttaacctgcggtatgtcgccccttcctcccactctaaactccttccctttctcagtttgtgatacatctgctaccttatggcctttatacactttgttccttttgcctgtaactcctccccccaccccaactccaatcaccgccatcgctctactccatcaccctccatgtcacttcctttgggaattcttttctcattgtttttatcaactcggcctgccaagaataaatgaggtattattctctgttcccaaatgtcactcttgtttcctctgtggtaacactcatctgatatcctataatctctatattcccagtgtccagtctaaggttcaatcctatagatgagctgcaaacactggttgttttaaataattgtttgcttgttttgttgttgtttaggggttttgtttgttttgtttgttttgttttgttttttgagacaaggtttctctgtgtggctctgactgctctggaactcgatctgtagaccatgcaggtcttgaactcaaagatctacccgcctctccctccctcccaatgctgggattagaggcatgtgccaccatgccttgcttattttcattatgtaggccaggctgccctcaaacttgcaatcttcctgctttagcctccatagtgcttggattacaggtatgtggtaccacaccaagctgctgcattgaaaactgtttgtttgttgagacagccttctataccccaggctggccttgaactcactatgtagctgaggataacgttgaattcctaatttttctgcttctatctccttgaatcgaattttactgtgttagcagtcatggaggtcacagacctaccagtctattctggttgagcaacagaagttgatgtgaaagatgacttttttaaaaaaaagatttatttatttattttatgtgtatgagcacactgtagctttcttcagacacaccagaagagggcaatggatcccattacagatggttgtgagccaccatgtggttgctgggaattgaactcaggacctcaggaagaacagctggtgctcttaacggctgaccctctctccagcctgaaagatagctttttaaagtggaacttttgctggaagctggctccttatttttctactgttcatttagtggcttagcaacctgattcaggtgacaactctgcaccttagttgcttcaaatatcaatataggtttcctgaaagcaaatagggtttttttgaatctaatattttatgtattagttatatttctttgatgcttttgtctcatttctctttattggtttgtaagtttttttgttgttaatatttgccgtatatttcacaaatatttttttctcttttcctttttcctttttattcaggattgaacctggggctacatatgttaggcaagtgctctgccgctgagctgtatcgctagaccttaacttgtttttcagttagacatatttgtaactttttcagtggcaatagaaaaatatttacttgcttgagagagcctgttgtactatgtagccccaggctggcctcgaacttgtagttctccttcctcagtcgcttgagtgctggtgatgccaggcgtgttccatgcccagaaaagctactcatttgcctttattcttatcaaaccatttgcaaatatacaatccattcttagttcacctgttgcatgcaaactggccaacagccaggtctggcttcttaggaagtagtttgctaagccctgagtaatacactcattaaattcaaactacctttgctttcctggaagaaataccacttgaccatgaacaaatcgttggctttggcttgtgtatatttaggatttttgcatttacatatttgtaagacagggtggtttttgcagagactgcaaactagtagtgtggcacagatgtattattttacttagcctatagcctattttaacaagctgtaaatatttaaaaaaatgggaaatagtaccataaaaatggacttactttctaaggaatgtattaaaactgggagcatttggcccagttttatcgccttatatagattttctgtatggtgtgctttctatttcattaatttctgtccttattttattgtttagatttattttatgtgtataggtgcttttactgcatgtatgttaagtgtaccgtgaatttgtcttgtgcatatagaagtcagaagagaacatcagatcccttgagactggagttacagccagttaggagtcactatgtgggtccccggtgcctttggaccagctcttaaccactgagccagctctctgaggcgcctgcccttattttaactttacctttggttggttggcagttttctcctgctaagattatttggcttttgcttatctcttagcactgacaatgttctagttctctcattctctctctctctccctccccccatgtgagctcttgagctcctcctcctcctcctcctcctnnnnnnnnnnnnnnnnnnnnnntcccccctcctcctcttccttcccctccttcttcttccctcctcttcctcctcctcctcctcctccctcctcctttttttggttctgaaacagtttaaaatacattggaatcttctgtttcttgaaggtttctttagaatgggcctttaaaactatttatgctttctagaattttgcaagtagaagtttgcttttgtttcttctagtctttctggctgatgacctagtaaatattactgacctgtatgtgagcaggaacttctgtcagatctgtaggtagacacctggacgtttcccagttttctgtcctaaatgtcgcctacttcccccagatgtttgaacttataaattgatacaaaaaggctgggcttatgctgggggctagagagatggctctctagtttgctgctgttacagaggacctgggttccatgaaccacaaccattagtaactctaggtctagggcaacagttctcaacctgtggattgagatccctttgggagggaggtcaatggaccctttaacaggggtcacctaagacacccactattggaaaacacagatatttacattatgattcatagcagtagcaaaagtacacttatgaagtagcaatgtaatgattttgtggtcggggtcaccataacatggggaactgtataaaagggttgcagcattaggaaggttgggaaccactgctctgtgggctccaatgccttcttctagcttccgtgggcatgaggcatacaaatggtacacacacacacacacacacacacacacacacacacacacagaggcagaaactcatccacataaagtaaatgaatcttttaaaaacggtttcactggtttttttgtttttaaagagggtagtgtctcatgcccaggctggctttgaaatggctgtgcagctagggataacctcaaacttcttgtcttgctttcatcttctagatgatcaatacagtacccagtttctatggtgctgaggactgagtccagcggtctgtgcatgccaagacaacagtccactaactgagccacagcacccctaggccatgtttatactaggcaaacaggccactaactaacctacatccctagaccatatatatatgttaataattaagaagttaccctcatatcgtagctgtctttttctttctttccttgtttatttgtagttttgcaggggtttctgtgtattggtcttctcaaaaaccagacaatgattttattgtttgagtctgttttttttcctttgaactttatctgttatctcctttgcatgtgattcagacttaccagggtacttctacatttttttttttgaatgaatctactttgttgttttataaataaagtatttttcttaggatgttggttataatccgttgtcctgttcctggcatggcattattgaaatattatttaacatttggtagtctgtcctagcttcctttttatcactgtgattaaagtatcctgacaaagtcatgttaggggagaaagggtttctctctcacacagttctggtcacagtccatcactgcggggagcaggggagggggacatcacagtggctggagatcgtggatcacatggctttcacagtctagaagcagagaacaagggtcattggtgcttggtctttctccttttcactcactccaggcctggccaacaaaacagtgtggcccactttcagggtgggtgtcctcacctttgttatcccaaccaagaaaacccctctacagagtttttcaccgagactcctgacccaggaggttccaaaactggccaagtttacaactaaaacgagccattatggtagtccaagcattatattattatttattttaaatattttggttactgggcaagaagataagttactctgtcagtgagagaatgttcccaaattaatatttttagcttctcttttctaaactgaaacctttctgatacctacaaagccaggcaataatcaatctgttcttattaatatgccatagtggtatattgaagtgagttttgtatacacatgtatggtatatatatgtgtgcgcttgtgcatcaggagcatgtgtagtatgtgtgtatgtgtgtgtgcacacacgtgtgtcacacatatggagtgtgcatatttatatgaggtatatggtgaattttgtatagctctcactgggactgaaccctccttgcaggggacatagctaatgtttgctctgctcctgcaggtctgcagccctttggaactcagtcccttctttatatcctttgtttgacgctagagctgtccattttctctggctggatggagaggccacatcaggatgcttccttgtccaaaaaagatgcctgcacccagacttacccacctaggaggaggatcaggcatgcccaagtgcaggatgcaggtaaatccatctgccagtgggttagggctaggagggtggactgctcctgctaagggtagtgttcgtgactcggggggacatggtggaagtgaagggcaagacagggtttcacaaaataccaggattcaaataatccaatggactttatggtatgtggctcatttgcacttgaccatgtatagctaacctcaggaatagagttcttcagtttctgctccactctccccaccccacgcccctctcctggctagttgaatttctggtactcaatttcttgtcctcataaaggcaggcctgctgcccatccctgcttttggccatggggcatgtgtggaggccgtggaagagcaaagggtaatgggatttggggtcagataggcttgagtttaaatttcagctctgcctgtttcaagctctgcagatcttgggcaagctgcctcccctttctgcctgccggtctgatttcttcctggcaaataggagctaatagtttttaggcttactgtgaagtctaaatgacatgtgtgaattgctcagccaggctcctggcactttatatgtatttttgcacccccctcaaccccatcttgtgtggctcacagaaccacaaatattcattggcaacgaagtcaggggaccagcaataaactctaacacttcccatttttaggtttacatgagaccaacagatttctttcccacggtggcagtaagatttgcagagcagatgtcttggtgtgaagctgctccctcggaggtgtctcatgaatgtttgccgacaaatccatgcaaggattgaccttccttctctctgccttcccgtgccaggctgggaagattgaaaggccctacactgctctatgtctgcagatggcgaggcttgctcttctgtctgatggtgccaggctgcagatggggagccccgaggctgcacggagcaagctgctcctctctggatctgtgccaggctgctctcatgcaaaagagggctcgagagagcaatccaggctgcagcctggtgctgagtggtctgtctatgcgcagtttcatgttcccggatctcataccctcatgggcccactccggagggcggacactcttttgctctaggttggtttggcgattacaggtctgagcttcaaagccggttacaaaccttactaattgcagcctgggggagctggtcgagcaggccaagcttcctcaagtgggcaagtcaggctgcagggccatagtggggttgacatttgcagttttgaggtgaggctgctgaagctagggttcctgcgggatcaccagaggaaggagccacctctggtggctggtggcagtccttcctcccagctcctggagcccacgcctccccggatctggcccgcgtcagccaagtcaggtggaaatctccccattcaaaccagcgcgggccaatcagggactggcgcgcccggctgttccaacgcgcggagcggccgggccccggatcccgcccgcccgggagacgcaggcgaggtgcagaaaggctgagcctgctgcctgggttacctgcacccacataaccaccgcctggggacaggccctcctgtcctggccgcaacagggacgccatggagcgctctctgcaccgcgtctccctcgggagccggcgcgcccacccgaacttgtccttctatctcaccacctttggtaagtgcctctgggccaggctgcagatggactgtttccttggaatcggagccagaaaggcaagcccccactgtagcagggaggctgcgagcaggtgctctttccgttcggacaccctctctggccccttcctccaggctcagcaagtcaatggacaccacctgctgcccggccgctgctgccagctgcagttggttctgcctcacttggccggaataatcatgccccagttcatctttcaaagaggcctgccttgtaaccacagagctccccattagccagcgctcaggttaaatcagggtctagtttactctgtcgagacagctcagtcacctgcttcctttggctcaggaagggttagctcaggtccccgttggaggctgtatctaacttctctgttggatatctaactcacactcagtgtggatggggatagtcttctccaagatagatcttaggagagtataaaggctgaggggaacagaatgggtcagtaggccctataagctccgaagttgctctgttcctccaaatcccagtctgccagcagcgttcccaaaggactgtgcaaacttggccttctaaggaattatagtaagaatcgtaccccttccccagaacacagctctgcacagctcttcattttctccctgttaggaggggcttgttcctcttctgccaagtgagactaggtgagaggagtctctctctggcccgtggtgagggcttgatacctgactgtgagtcttcccaccaatgctgttctaacccgtatacaattcctttatgaagttggagtggttacccagctttcaaaggcagagcacacacgaaatgagaccctcaagaagggttcttgtcttccctgctctccaggttatctcagcacgggacatttggctcttcacagcttgagccccaggagcagagggagtaatggaaacgcagtgggttgattcctagagacaggctgcatcttggcagcctggacctcacctatcctggtgctggaagatctaaaagagaaattcactagccacctgttggttgagggctcactggtgcatgacctgtgcccagtgtgtcacctgcatagtttcatttaatgttcccaaatcctgcaagccaatccttttaattccagagggatacaaggctctccaagacaagggagatttccagatgagagggggtcagggggcatcaccttttccaggtccctgttcaagagtttaaaagccatttactttatgttctcagtgtccttgaccactccttcctagtcttaacaaagtccacatggttcggcgagtacagctttgtaagacagccctctcactgctggtgcgacgtgaatatttctttgcagttactccgtgatcttttgttcaactaaagtctttttccagactggagcaggggagcattcagtcccagcagggcgtggctccttcaacctggtgatggcttccagttgggcatgatggctatcaagtgaatcagctatttgaacctgtgactgtcacctgagtgtgcaggagtcacgcaggaactggggagaggggggagccacctgctccttctgtgcagcttgctcttggatatttttttgacactaatttgaatgcttgaaaaatgtttcctgcaatagttttgtctcctggggcgccatttgccagggcgaccttactgctggctgctaattgtcactgggcactgaatgctctatgctcgtgggtttatgatgattcctgttagtggttagcaagccagacaccaagcatttttggacttttagttgtgatggtggtaatggagattgaacccagggccccaatagtaggcaaatgttctactccactgggcccttgaaaacacacaggttccagagagtgtgatttaataactatgagtggatcctgagactctgaccttaaagatgtcctagagatcttttgaatatgatccagacttggaagctatggattccaggtcggtttttgtagccaatgtaggtaccatttgatgcagatctctttgctaactttctcagttccttggcctttccccaacactccttggccccttcaacagcgggccttacctggtagtcatgctgcagacatttaaaggaggtggaaacacaaagagaaaaaatatttccatcagaatattccctacagaaagagtctctgcctctctctctctctctctctctctctctctctctctctctctctctttcacacacacacacacagagtgggggtcgtgagcacacctactatttcccaaggaaggcaggtccaagtaacatttgctggctgcctcattgcctctgaggcccttagcttcaagggaaggcacaagctgcagccaggaaccagctagtccttctttagagtgatttgatgccatttgaagaagtgttaccatgtgttcgtggctgtatcttccagggtcacacctcttattttgattagggaatttgttaattctctggtaaatgctctacggagctataatgcataatgtatacagttcactcactggaaatgtacaactttgtggttttgagtaaatttacagagttatgcaattattactatgaccagtttagagtattttcatcattctagaaagaaacactgtaccttttagcttcttgttttccatccctgaccctccgtccttcccaacccccaccaatcattactgtgttttctgattcaatgcatataccttgttgaggggattttatgtaaatggaagtgtgtatgtgtatttctatgaatgtctctttttaccgtgttttcaaggaatgctcatgttacagcacatagcagtacttcatttaaaaataggttttacgtttatttgtgtgtgtgtgtgtgtgtgtgtgtgtgtgtgtgtatacacatgtgtcatagcacaagtgtggtggtctgaggacaacgtgtaaagctggttacctagtcccatcatgtgcttcttgggcatggcacataagcctataacactgggatgggggtatgatacagaggtaagaagatcattgctggctttgctggccaccaacttagccaaaaaagaacctcaataagacttaacaacacttggaggcaggggcaggggcaggggcagtgtatatatgagacacatagtcacgttaacaaacaataagagttgttgttgtgtgtatgtgtgtgtgttttaaggacgcaaccatagaaatgttttatttccggaccttctggtttgctttatagtctcctactttgtcatcatcacagactcgattactgactgtagctttgtaatagcattttggaatcccgaagtacaaatcctttgattttattcttcactgttattttggttgttctatgttcatggtacttctagatgcattttaggtacaattattttatattgaaaactcccaattcacaaaaatgtcggctctgtacagaaaatcttgaaaggaaaccaaggttttagcttgccccataagccatatcagcgacctgcctgggttgtctctgaacacgtcactgttctccttgtggtctctagcatcctggaaacggcaaacggttaggggagagcacaggttgccttttctacgggttatctgggctgggagatgatggacagccagtgcgtgtgctctgaaggctgaaggtagctgtgggcatggctgagaccacccatctctctttagagatgtcactgccactgaacctgaacccggcagttgtggggagcaaagtttggatcactggcacacatgtgaaagccaggtgaaaaagagttcttccctgtatgtcctttcccagcctttcttactatggtgtgtggcacacatgcataaaaacattcctagatgtatatacaatacctatatggatacacacacacacacacacacacacacacacacacactctggagctcaggcaagcacctggctttcacatgtgtgccagtgatccaaactttgctcctcacatatggccagcacatatttttaattaagataagctattgctacattatatatcttaggcaggcctcaaatggacaatcttcctgcctctgcctcctgaatactgggattacagacaggggccaccgagcccagttttggcaatgttttcattgtttatttcatggtttggtcggagaccgtattctgtgtccttcaattctttgcgattcattggatttgcttgctcacccaaaggagcattgcgtatcaagagaaccctgtgtgtccttgatgagactcttgcagttggcgggtgcagtactctccccatgtgtcagctctggtcagccttgctcaccatgttgccctggtgctctgagtctgttattttctctatctgtttattctaccagttaccaagagaaggatgtcaagtcctactgtagattaaacttgccatcctcttgccatcaacactgtcagcctttcctttatgtattttgaagttaagaatatatggttgtataattcttctttttctgcagagtaaaaacttctattataaggtcttcagctgttacaagccttctctttatttctagtagaggtacagtctgcatttcttggcactgacatagttccccaggtccagcctgtgtctggcctgcctttttctatcctttgtctttccagactgggtctttgttcttcaagtgctcagagtccaccacaaaaagtcaggcatggagttattatcttttcttctcgttcagagcttacaaaaatgtcttttctttggctggtcaggtgctagcagcccaggctagcctttcatcttatcgacagtgtctcactatgttgccccagttgagctacacatcccaggctgtgcttgaacttatgacaggtgcgtgctgcgtgcctggctcttgggatcaccttgagtcaccgtgagggactgaggctatttgaaactgagccgccgttctgtgaggatctgtgtctggctatggctcaccttgttccaaaggagtagtagccctttaggttctctttgatcccctgaattttggtctcctcatcaccagagttcagagacatcccaggagaaaatcagtctgggaaaaacatcaggctcccacagccttgcatttgccaccgcacaccccacattctgtgtatctcatttcagctccatgaggatgcttttagatatttttacctggcttttctagattcccttattgtgtcccttggtgagtctgtcatcccccaaactaaagtctctggtggattttttctcatttttctgacataataaaaatcttcacatttatttgtttgaatgtgtgtgtatgtgcgtctctctgtgtgtgtacatactatagcatatatctggagatcagggggtaacttgtgagagtcagttctctcctaccatgtgtgtttcccatgtcagactcaggcttcagtcttggcagcaaatgctttatccactgaaccatcactctagccccagagattttattttattttattttttaatttgttgtttattttatgtacatgtgtgtgtgcttgcatgagttgatgtgtaccatgtgtatgtatgtggttgtggaggtcagaagagggcgtgggatcccttggaactggagttacaggaagatgtaagccccctgatgtgggtgctgggactgaacctgggtcctctgaaagagcagtaagcagtctgagttactgagtcacgtctcccagcctctccctcaggatgcgttctcagtgtctcttgtcttctccctccctccattgtcatgtcagtgggagtgcgggtgtgcactggatacttcacatgaggataggaagtgtgctactctgacagttcccactgtcaactggaggagcccagacactccagagtccacgctttgttcatggctccatgcttctgtcttgtgttttctgcactacatttgttcttctggaaagtgttatctgatcacttttaaaaaatacctcagatgtaaaacttaatgaaaataaattatgaatttcattgtgtggtgtggtgtaaagctgtaagaatgtatgtaagagataaccatcactatagaataactacagacaaagagtggtaatgtaggggctggagagatggctcagtggttaagaacacaggctgagcggggcgtggtggcacacgcctttaatcccagcacttgggaggcagagacaggtggatttctgagttcaaggccagcctggtctacaaagtgagttccaggacaaccagggctatacagagaaaccctgtcttgaaaaccaaaccaaaccaaaccaaaccaaaccaaaacaaaacaaaacacccacaggctgttcttccagaggacccaagttcaattctcagcagccacatagcaactcacaactgtctgtaactccagatccagaggatctggcaccctgaccagacacgcaggcagaaaaccaatgcacttaaaaataaaatttcaaaaaaaaaaaaaaaagattgtgtgaaacagttaaggatactgagtagtttataaagcgttgtagacatttttaaactaaaactatatgacttttatatatgacttaaatataattataatctgaatgtagtagtgcacacttttaatcccagcacctgggaggagaggcaggtggatctttgagttagagaccagtttaatctacaaaagtgagttccaggagagccagaactacacagagaaaccctgtcttaaaagaaagaaggaaggaaggaaggaaggaaggaaggaaggaaggaaggaagaaaggaagaaaggaagaaagaaagaaagaaagaaagaaagaaagaaagaaagaaagaaagaaagagagaaagagagagagaaagaaagaaaacaaaagatattatagtatgatgaaagggaaaaaaagccacaaaaggcagaataacatgaattttctacatataatagcagtgtgtacacatgggcatggtagaaaaccatttgctgtgaggagaaaaagttgtcctggggttaatgtggacagttctatactttgtagtttagttacaaacaatcaactttctttttttttgcatgttcatgtgtatgtgtgtgtgtatatgtgcttgtgtgtttgtgtgcatgtgcatgtgtgtaggctcaaatttgacattggttgccttcctcggttgctctctacttagttgaggcaaggtctttagctgaactgaatgctcacagaatttggctcctctagctagccagccaggggaaagtctgtctctgcctcccaagtgctgagatttcaggcagcagccatgcctgcctggcttcttatgtggactctcatacttgctactctatctgcagagccatctcctcagctcctctatgggctcttgaaaaagggaagggagagaagggaggggctgagggagggagggggactgggctgtgatcaggatgtaaagtgaataaaaaaaaaaaaaagaaaaagaaagaaaaacaaaaagaaactcaaagacctcaaaatacaaaaagtctcccattcttagatataatagtatttcttaacactgtgagttttttttcttctttctttcagtcttaaaactgaaaaatggcctcagaattgagatcagatttaattgccctaattgtggggacaatttatcccagtgtttattagctaaactgaacaacttctatctggccacgtctgggagccgggagtttggaatgtctgagaggaatggtttttctcagggtttctcacagggccggaagccaagatgttagccagggactctgttatccgaaggtgctgggagggcatgtcacgtgactcttggcaggaggcctctcattgtcgggaggcttctgtctttcctcactttcctcttcatggggtcgcttgagtttgcccaggccacaggcaggcagccggccacttcctgagcgagcctcgcagttgtgactgtgagcaagaaccccagaaaaggaccgagagacaatctaagacggacacagggttttctgagagtttgaaaaaaaaaatgaacttttaatgttattattgtgtgcatgtatggagagagacagacagacagagacaaagagagaaagagacataaagacagaaagagagacagagacagacagagatggagagagaggcagagagggagagagaatctgtgtatgccgcagcacatgtatagaggtcagaggacgattttcaggagctgctctctcctttcactgtgggttctggggatcaaactcaggttgtcatttgtacttgtcgagcagttttacccacggagccacgttgatggccgtctggtaggcatattgataatttatttacttatgcgtatgttttttttttctaagatgtttttatttttaaaatcatgtgtaaagtgttaggttccattatgacgttttaaacataaattctattttgtcaattctccagccttcccttgccttcttccgactgtgtccctccatccctagccacgtggattctatgacctgcctcacccctcctcttttgtcctttcttatggtgcttgttctagtttcatggcctatagccacacacatgctcacatatatattcacacatgcacacatgtgcacacacacacacacacacacacacagacacgcacatgtacttgcacacgagtgctgaaagccagctgtgaaggagcgcgtctttctggttcttatttgcagcaccccatggaacggtttcctgatccacccattcccttgcaattttcataattttattttttttctggctgaacacagttgtacagtgcacacgtgccatgtgttcactatctgtgcctctcctggtggacagctaggctgatttcatctccttgctattgtgactacgataacacaagcagttctgcaagtgtgtctgccataggaagtaggcagaagcctccgtgctggtttctataactgatgtcctaccccacaccccactgcagtgaataaaagcccctctttcctcacatctctgcctgcgtttggcttcttttttctttttccttttttttttttttggtttttttgagacagggtttctctgtatagccccagctgtcctggaacttactctgtagaccaggctggcctcgaactcagaaatccacctgcctctgcctcccaagtgctgggattaaaggcatgcaccaccactgcccagtggcttctttttctttcttttttttttttaattttttattagatattttcttcatttacatttcaaatgctatcccaaaagtcccctataccctcccctggccctgctcctctacctactcactcccacttcttggccctggcgttcccctgtattggggcatataaagtttgctagaccaagggacctctcttcccaatgatggccaagtagtccatcttctgctacatatgcaggtagagacacgagctctgggggtactggttagttcatattgttattccacctataggattgcagaccccttcagctcttgagtattttctctagctcctccattgggggccctgtgttccatcctatagatgattgtgagcatccacttctgtatttgccaggcactggcaaagcctcacacgagacagctatatcagggtcctttcagcaaaatcttgctggcatatacaatagtgtctgcgtttgatggctgattatgggatggaccccgggtgctgtagtctttctcttttagattgattcattttctcacgggctagcttcacgcatacctgtgtataatgcattctgattacgttctcttcctcccaccctgtcagtctgtctcttccatccctgcctttctcccaggctcagaactttcggtttgggggctcatctcacttaaccaggatcatctgtgtgacctttgaattggaactgtccactgcagcctggggtgggggtgggggtcaccaatgggcacagtctaaggcgacgacttcctatattcccaaatctatcaataacaagcggttcttcaatgaaggagtcccctgaacccctcttccattcgcgcttgcctgctgtgggcccaggctgtgtagctctggtgccggcatccgctgtgggcccaggctgtgtagctctggtgcccgcatccgctgtgggcccaggctgtgtagctctggtgccggcatccgctgtgggcccaggctgtgtagctctggtgcccgcatccgctgtgggcccaggctgtgtagctctggtgcccgcatccgctgtgggcccaggctgtgtagctctggtgccggcatccgcagctactgtgaggtcagaatcatagtgatcgcgtattgcccagaaggtggcacctcacggacttcctccctggcttcctgctcctgtttcctttccaccctctcttctgcaatattctgtgagccttagaaatgactgctcaaggctggttctttgtcttcttgacggcgattgtgtctgaggtgaagtgcaatctcaaagtagttttaattttcatttctccaatagctagggtcattggacactttgaaaaaaatatttatggactatttgtgtttcttcttttgagaactcttagtttattccattaatccactaattgattagcaggggttttttttttctatttaatttttgcagttcttcatatattctagatgaataaacaatttgagcaagcactttcgcaaagacaatatacaaacagtgaatagcactggaaaaagagcccaaccagaactcagtgagagctgtgcctggtgctacagtccggctacctaggaggacagcgagctcaagatccatctgagctacccgatgaatccagacctagcaagggtgattcattgagactttgttcccaaaagagggcttggatgtagcttagcaataagcacagcacatgtgagccccagcctttgatctcttgtaccagttaatacatacattattcattatttgggaataaattcctcacaccctaaggccaagcaaggcagaacgagcaaacaaaaagcactagaacaaaataaaacaggggacaaacaattgaacaaatccctacaacgaggtgtattgattgggacgtgactaaagagataaataataaatactgagataatgaggagaaatttgaacacttgtacgtggttagcagggatgtaaaaggcactgctgcttgggaagagagttcagcactttttgtttttggtttttataagactgagttatcatttgacctaatgattcctctcctagttatatattcgagaggaatgaaaacgtgcttacaaataagtgtggggcttatatgttgggcacaaaaaacctaatacataaatgttcacagtagcaatacttacagtaacttcaaaatggcaacagcccaaatacttaccacaaagtgaaaagataaagaaaacctagtctagccacatagtggaatattactgggccataaaaggactggtgtattgatacgtatataaatcttacaacatacataaatcttggaaacatatggcaagtacaaagaaaccaatcataaaagcacatatggtgtcagagtttatgtgtatgaactacatcacaacaggcaaatccactgaactagagagagtaattgacgatggacagggcctggggaagaaggcaattgagagtgattcctgatgagtttgggatttcttccaggagagggaagaatgatttaaataggtagtagtgcttggctgcccaattccatgaaacgtgttgtagaatgatgtgttacatgtagagcttggccatacaattccatgaagaagcaacttagctatttaaaaaaaaaggggggggggaaagaaaaagaaaacaatggcctattataccctagtcacttctactccattcaattagaagtaactaagtccgctctacagtggcaagatgaactggtctctacttttataaacgtaggtgtgtatgtgcgtggccgtgtgcatctaagagcaggtggctgtagatgccagaagaaggtggccagtgcccttggagttgcttgcaattgtgagctgatttacgtggatcctctgtaagagccggacgggcttttcaccacccagacatctctccgattctagcttccacttctcgatgggagggaacatcaaagaccctgtagacaaatgttgagccatccaccgtggatgccctgggtctgatggcccccatgtcaaccacttactgatcctgtagactggatgttcaacttttagccttcatttaacttgcctattagtgaggattcaacatagtaactattctatggcgttaccatgaggaataaaagcaattagaagcatttagtgaagttctgagtatcctgtgaatatccagccagcattggctgccttccttccctccccgtggctctgacactgaggtgtcttgttgtggtctctgggatgttggatctgagccctgcaggatggatggctttgccagcaatgtggcctagccaaggttggatgttgagggtgttagtcagagattgtaattcatcggcttttcaggaagagcccagaatccctcccgaatgacccacagtccctgaactcatcgaggagacctgacagtgagtttatgagtttgtgctgagcaggctgacaggacttctctggctggagctgtgtttctggaaggaaaagcagcttggggcatcatcacatcagcactagatttcacaggaagcagagagtcacgaaaagggagtggaccaaccgagcttttatctccactcaggaaccctgcagtttgtgtctcagctctcctgctgggcactatcgacccccacttctctcccttccccccagacagagggagttggatgaacctgaagggaattcaagatttttcctcttttcaatcccacactggagtttcccaaggttaaggaccaagaactgtgtagcttccaggctttgatacctgcctgtcatttatcagaggacagaaagcagagctggccaacatccctcatcctctgagtctggaccggtgctcctgaatggatcaggtggctgacacaggcagggagctaggagctggcgaggctccttcctatcatccttttttgtacagacaatcctcacacctggagggtgaatctgtaaatgccaatagttggctgatgtgtacagacattgtttttcctgtggcttttaacatgcagtagttcccccctccctccatgtatatgtgtgtgtgtgtgtgtgtgtgtgtgtgtgtgtgtgtgtgtgtgtctgtaatatatatgtgtatctatctacctgtgcctgtacacttatacagcatacacatgtagagaccagaaatccatacccggcacctttctccactgcttttcacgttattgctattattattgctgttgttattttgactcaggtcttccaccaaacctgaagctcagtgtctgtctagactggccagcaagcaccagggattcacctgtctgccttcccagtactacagcatgcagccatgcccgcctgttaagtaccctcaaaatcctcccctcccaaccctagaagctgagggccctcttgggtagactctaccattgagttaaatccccagccgccttttttcctcttctcttctcttctcttctcttctcttctcttctcttctcttatcttctcttctcttctcttctcttctcttctcttctcttctcctttctttcttccttccttccttccttccttcnnnnnnnnnnnnnnnnnnnnnnnnnnnnnnnnnnnnnnnnnnnnnnnnnnnnnnnnnnnnnnnnnnnnnnnnnnnnnnnnnnnnnnnnnnnnnnnnnnnnnnnnnnnnnnnnnnnnntccccctcctcctccatttcttcctccccctcctcctccctttcttcctcctccctgctccccctcgtcccccctccttcttttcttcttcttcttcagcatgagtgctgggcatctgaactctggtcctcatgcttgtgtgagaagcactttactccctgacccacctcaccagctctgcaggacagttctgaggtgagcagtggtttcagaggaattgttgaggatgcatgaccgctgcttcccaggaacctcagggatgtgttcccgatgtaccagagtgctcagcatgggctctcttgaggacctgtgtctgctgactggaatctagcagtggggtgcagcccgcatcttgctattttctgagtcagtctctgaactaaatcctgagagaatttggcttcctgtggtcctctgcccagtaatgcctgccggacagaatttccttggctgcttagtttgtgctgtgtacagtaagctaagcctgtagtccccagtcccgggcttagcagaattggagtttgctgccctctctaaactttttaatcttatgccttcagcactatccctggcctatcgtgtcctgtctgttcttgctttggctctgggccctgggtccccggtacatccttacagactctttgagcacccattgccaggaccctttgcagatagaagagatgtccatggtaactgtcccttccaggtgccccctcccccctcccttcataactctgaggggatgacttcaggcccttagcctcgacactccaaggtgcttggcactctctcaggccatgctctgagtgtgagggagaaagagggctattgccaaggtcaagagtgaggtgggtgatatcttgcttgttttctttcatatcagctgaagactcagggttcgttgctttagactacatgcctttggaaccctgccatctcaattcttagttttaaatccattttgtgtattattgttctttttgtatggtgtgaatctgggtacttgggtgccatgacatgggcgtggccaactgaggacaactggtgggagctggttctctcctgccacaggatttgtgtttcatactccgagttgtcaggtttatgcagcaagtgcctttgcctgctaatccatctagccagacttctcttgtctgttttgttttgttttgttttgttttgttttgttttgttttgtttttgagacagggtttctctttgtagccctggctgtcctggaactcactctgtagaccaggctggccttgaactcagatctatctgcctctgcctgccaaagcactgggattaaaggcatgtgctatgaggctcgcttcccttctcttggcttctggagtaaaggcgtggcacatcgttttgtaatggtggatgggtgcctgctgggggactatgggttctagcagactgttgcattggaaactgtgctgagttgggcagggttttggtctccagtcctggctctgggtgtgtgtatgtgtgtgtgtgtgtgtgtgtgtgtgtgtaccctgagtccaagtcactgtttatgccaggtgtgaccagccaccaatgaggagcttgggcaacatggcttcagggtccctgagtattggacatttgatggagaagactgatagggaagatatcggggacgggtatggcccattcttgatctgatcatcatctatgagctgaggggtcttgactaggagcctggagcctggctacttggctttatcttgggtaccacataggaaagggccctttcaggctctctttgagtaaacctccttggcagatcttgtagatgtatcataactctgggtcagtctttgacgtagacagtggttcttaacctgtgggtcataactcttttgaaaagactctatctccaaaaatatttacattatgactcagtagtaaaattagttatgaagtagcaatgaaagttctatgggattctatggtcaggggtcaccactccacgaggaactgtattaaagggccatagcattaagaaggttgagaaccactgacctaggacattctctcttcttaactccagctttgacctggcccatacccctgtccaatctcccaggccgggagcctgttacagacagaaaactgtgtgttcagatctgccctgtcttgcacatgtttgcccaatgtatggggatatgtctccatttctaggaagggctattgttagttgctgcacagtgtagcagttctaagggctttgaaaattggaacaagtttgggccagacctgactttgcacctgtactcgtttcagaaacaaataagtaacttttcatgataaacctaaatgtcactgggttagtaagatctgacccctgactgcaggccacgcctgtttcaaagcttcctttgccagctcaccatggaacaggcatgggatctgcatcagatttctaggcacgatggagcctggagataattaatcatcctgtgggttcccatgcagccttttatcccaggacctcatcaccgtccagtatcatcagatcacagcctggagtgcagcaaccccatcattagccctgcctcccagtcacagacatggaggtcctgggagaaaagtgggcagtcgggtctggaactagaataagcctgagtctcctggattttgaggccttcaacctggtcaggagagcagtaagatttctgatgggcaggaggctggagtctgagtggcttatggagtccatcagtgagaggttccaggcattccagatttctatggttggaggcctcatgaagaatttcaagatacaggcctcccttctttttattctctgaaggctgcctgcttgtcttctagccagtcccgaagcccaagccttaagaaccagcccagttttagagggcacacacagagacaaacagttgggacagtgacaggatgtctcactgtgcctgaggaatggctgaaggactctgggcatcaggtctagaggagacagcccacagctggcagaaccaaatcaggtcagtgaaagtgaccaacaacccatttagatggagcatcaaatagttactcaaaagaggaagtactctcattatgagaggtgaatttccctaactggaagtgacagaccaggggtggagggttcgtaggcagggatcagatgtggctggccatgttcttctggcctctcagtttatgttcctgggtggagggagtcctgtggtttcaaggagattgctgaactcaaagactttttgataagactggaaagtgataggtgtggctgtctgtaaggatgacttgagggtttttgtttgtttgttttgtttttaatctgtctatctctctgtctctgtctctctgtatgtgtgtatgtgtcacaagtgttagagcaaatgtgccagtatacatgtatagaggttagaagacaaccttggcttgaagcatgattacttattgtgctggctagttttatgtcaacttgacacaagctgtagtcatctgctttgggtcatggcgtttcacctcagcaatggtagccctaactgagacacttgtcttccaatgtgtacactgagttagttgtccttcaggcttctggggattctgtctctacctcttgtctcccacaggagcacgggaattactgatgcactactgtgtcaggcttggtgtgggttctcagggtttgaactcaagttctcacacttatacataagtgctctacccagagagccatttctccatcttaacatgaagcctctttttatttttcttttatttaaatcaaaataaaagaactcaaaaacaaagagccactccactcaggtccccattcttcacctgttccttagcccaggtcaatcattgtctttcccttctttggtttcctccttccttccattcattttatctatcctgtcagtctgtctatctatctatctatctatctatctatctatctacctacctacctatcatctatctgtttatcatgtatctaggatctatctgtctgtctatctatctatctatctatctatctatctatcatctatctgcttatcatgtatctaggatctatctgtttatctatctatcaatctatcatctctatctatctatccatctatctatctatcatctatctatctttgtggtgctgggagttgaacccaggactgtgtatgtatgctagcccagcactgaagcactgagctacatcctggctcttttcttgttgacagaatcttgctctgaagccatggctagccttgaactggagagcctcctggctctacctcctgagtgttgtagttttagttgtgaaagtgttgttgctcatggatgcattcatattgttaaaacaacaagagttggaaaacaatataaattgtaattctcaactatttccatccgtttaccattctcttcccctcaggcaattctggttttaatttggggtgtgtatgtgtgtgtgtgtatttaacatgtatgcatgttaaaaccttttaaaaccttgttggtgctggagacatgatgattcattggttaagagcacttgttgttctttcagaggacctgggctcagttcccagcacccacatggtgtctcacaaccatccaaactccagttctgggggatcagatgcctttttctgacctttagtgccaccaggcatgcacaagaagcatagccatatattcagacaaaatgggtacacacataaaataatctaaaaatcaaacaaacaactcatcaataatagccccacaccaggccatataaaaccaacccccctccccccatcacagctgtagttggttttataggcagtgcctcaggaatttccacatttcctgtttatcagccgctcctgtgcatgtgtggctagtttgtctctgatagggatctggtagaaggctactcacatatgaattccagtggctatcaccaggaatggccattagccttccttgtggcatagtatgacaacgtcttgtatcttactcctttgccagtgtggacactgtccactctttgtctgggctgccccgcacaggagtgagctccccatcaccagaatggcatcagtccggctggagccactgcagatggtgctcctgatggggagaagaggcagaaccaggtggctttggaagtcccctccaatcagagattatgcccatctttggatggcctcatgtgaacagaagagctgcctatcactgatcattgttcaaagggatttcttccattgttcccataggtcaactgaagctgtccattgatgcccaggatcgggttctgctgctgcacagtgagtctggcaatatgcgggtccaccaagagaggaaaggaaggtcccctatgggcccggagctggacaggcgtggtgtcgctatggcatcttgtcttttcctatagcattctgccatttgtctactaacaaactggctgcttacttgagctgctttctgtagacccagtctctgtcatcctcacgctgaaacatctggagttttgcctaccagacctgtagtctcagcaggctgaagctattgcaagacatctcaaagttacacttgggccaggcacagcaggggccgaggaaaaaccttcctggcttccctgctgggttttttcctcattattttgtttattcacacagtgatgggcagcgtagcgatagggttaaggtcatagcttttggagccgggccactagaatccgagtcctggttctgatgctttgcttactaagtaaacttgagcaagctcagttttctcctcacacggtgctggtaatagcaaccatcgcatgggttgttccaaggattaactgagctgtattgctagagcacccagcacatggtcgaggtgtagaggtgtctagtaagctgtgatgagaagctgtaaactgcagttagtggttgagcattgccgttgtgttaggggctgtggacaccaaggagaagtccttcccgtgtctaagtggggttgccagggaggacttgactttccacctaatctctttgtccttccttccaccgagcatgagtattgtcaagcttttgttgtggccctccatatctggactctacagcttggcttggaaggccccacatttccctataggcttcccattggctcttgctatgcaagataataatgtccatctccattccgtctacaatacactgtattcctcgggaatgtgactaactaggacatcactgagcctcaggaaggaaggctggttttgctccttgacccccacccccaaccccagagtcatcccttgtctttaaccctcctccagggtttttgggtcctcatcacagcctgaccatactgtgtcaccccgaggtttggtctctctaccatgataggagaggtgttagggtgtggtcagggctaccttactgccattgataatcaggaagacacaagaggtcaccaggccagacttctgcccaggaaagccacaccctagaggggagggatacattctcagagaacagtagctaggatacagtacagagaacaacaggagcccgggtcctttgctcctggccttaaggggcccaatgtgaagttcccaagaacccaaagaggggtgttccgttccagccagggtctctctccagctgtgcaaacagtttttgcaaaatgcatcttggcccctgccacaccatttgtcctctgtggtttgctttggcttccccccagcctcagctcttcatcccttccagcctggcttcccaggcttcatgcctcagacggacggggctctgtgtgagccaagccccagggtccaaccaaacaaaacacaaaagaaaacaagagatcgggggttctgtaagacctgccggctgtggacatcaggcaagagagccattcttacctttatagcaagcacttaccccattcctgtctgtctgtctgtctgttgatctttattattgttgttgttgttttctgttttgttggtagggctgggtatcaaatcttgggcctcatgtatgctagccactttactaactaagccacaccccagccctcattctcttatatagcaaatattttgcagaacagttacttattggcccagcagtctactgggcactttagagaggttcttttattttaaaagtacaagtgtcatgtgagtgaataccaatacgagctcttagggaaatgaggcactcagtctgagcaaactggagttccttgctctagcatacatggtaagtgaatggtgcagctggcttcacatgcaatctgcctgcctctggactctgagctcgtgaccattctgtggcactacccactgcacagcacagtgcccacacagcctgggttcccatccctggaggctgtcttggaaggtagagagctcaccggactggtcaagagacacaggttctaaaggaactgccatttcccttgttctgtgactctacacatgtttcttagagttttgagccctcctggcagccatgtttgcttcagctagtaatgcttagatcgaatatgttgaatatattgcaagttccccctccagctatataagacttggggaatggattgcgctctactctataccttggtgagggtgctgctagaacacgttggtgaaggagacgaggcagagatggggtcaaaaccatcaggtcaactcaaagacctggggaagggtcagaatcctactgcccacagctatgtcttctatttgagtacaaaatagaaaatgtctttccattagcgagtgcgtgcttgtgctgaagtgtgtgtacttccattcccccaccctaacccttctgttctttttcagtcatagaaggcaaaggcctgatgagcagggagcctggcatctgcgatccctatgtgaaggtatctgatggggtgagaggcaggtgtggggtactgagttggactctcaaggtccaaggacacctatgggttagtgaccattcaccacctcattcactgggtctctgggcattcatgaggccccacgctggtctagactcttgttcttttgattgacttgttccctaaggctttggtcaagagctagagtccttagggtgatcttggtgatccacgtggtgactgtgctggtgactgaaacacaggctttctagtggacacggcatcctcacccccttccctacccaaccagaggcagagagagcagtcagacttgggcaggagagcaggaggggtttccctgagggctgggagatctttctgagttagaccctggcaatgagtccagaggaccacaggggtaaagatacaggaagccaaaggccaggggcataccagactgtagcagccaagatgccaggtgcaggcctgacgctctcttccctttaagtccagaaacccttcctgccaagagctggagaatggctttgtaggaacaggctggctgcctgaggcctgggaggaagaggactgtagtgaaaacatggtcttggggccgcttggggtgggacaagggcagaatgcccaagagcacctggggacctaagagggaggaggcctttggcttaggggaaacctccctggtctagggaagaatagagatgataagcttataccttctctctatcttactaccaccaccatgactccctgtcctggtgtgcgttctactggccgcaggcaggttccttgtttgcgatggggactctactctgtggtcttctcaggctggcttgaggaacacggggaaagcttttactttggagcctcgcagaactagctgttccgagctagctgtggggcttgggtgactgtgtctctatgatcacctaatgctattactttctctactcaacgaaggtttctttgatcccagaagacagccagctcccctgccagaccacacagatcattccagactgccgagacccagctttccacgagcacttcttcttgtaagagtcaggaccggcttggcccttgagaggagaggcagggaggggtttgcctggaaagatctcagttcgccagatctagacacagatctgagcagaacaacagtgacttctgaaggatgcctttgttgtctcctccccggtgtccttgcatccctggccgagggcccagcagcggggcctacaggaataatgtgtcacttggctgtctctcctaactacagtaactagcttagggctggcagcactccccctactcccccccccccccaaaaaaaagagaagccggttggtttcccactgcctctggccaagttctcaccttcaatagaaggaattttccaagctgaagggcgggtattacctgtgcatcccttttcatttaaactcattaacctccctgagccccagcttcctcatttgtagaatggagttaataatagtttcttcctggggagcttgggactctttaagtgggacgtggggcagcgcccattggcgggagagctgctgctgttgttgttatattatttctgtccctcctctctggatgctccagggccagtgggaagggcatgggcattgacccttttcctgttagtgagagcgaatcataatattttggtttgcttctcatttcacaaggtaattctggacaatacgggcgaacagaaggaagagaatagaaaaccctcagcatcctcctcctactcacataagataggagttgctctgtttcttgtcagatctctctttctgtggacgtgcacctctctgtgtgtttacaacacaggactgttttatgaccgtgtgttctggcctctcttttgtccctaacaatgtagtatgaatgctattatgcacgtgaggacgcagctcccacacggtggcactatatttagcaagttgtatagatgccggctcagctgttgtagtcatggccagctccgggagcctggcctagagctgggccctcctaatgctctggtggtctgctttgcttcctagtcctgtcccagaggagggtgatcagaagcgtcttctggtgacagtgtggaaccgggccagtgagaccaggtgaggagaactgctgtgcagggctgagaaccttctctgggttagggggtggcagcatacttgaggtacttaccttgtgccttcaggctaaataagttgcagaggctggtaccctgagtcccagtcatatggaggtagtgatgaagaggaggccaagacgttgccagtgaacatttgcaagctcttggtatcaacaaggagggcttaacccacagatggcaactagcatacaccaagactcagctcttaaggtgcccactctccaggaagggatacgaggcactgtctggagataaaggacagtaacagcacacacgtaacccagttccataggatactgtgcactgtccccctctgggcctactttgcactgagtcaccactgtccccagcatatgcatgcctcatgaatactaacgaacctctcaaacagaacgggatgactggagaagagtaaggatgggaaagtgactcggagagcttcatgggaagtgtggacttctgaacctgggtagagagtagaggtggaagggttgttttagaccaggtgtggcataagcaagcaggaagtaatgaggaagtcagggatagttgtggtggcctcaggctgccatgatgagacctggttcaggtgtgcagagattgtgtgtgtgtgtgtgtgtgtgtgcgcgcagagattgtgtgtgtgtgtgtgtgtgtgtgtgtgtgtgtgtgtgtgtgtgtgtgtttaaaacacactgatcttgcaggcagtgggggacaaaggaggcagttgtgcttgtaaagaatgagaggcagatgttatagcatgggggaggggtgtagtgggcaagcagcaggaatgattggctgctaaggaaagcaggtgagagcatctgccagccaagcccaggggcaggagcatctcgggactcatttcacagaggtaatctgagaatctgggagacccggtggccagtagcccttgtccagcacctggaatagaactgaatgcatttcaacgggttccatgtgaacgaacatcagctccgatctccagcccagatctggaaatgcttgggggattgaatgttttttgtgtatgcaccatgttggagattgaatccagagcctcgaatatgtcaggcaaatgttccaccactgacctacatcccaactcctgagttctttctggaaacccaagtcccactagctatcatgcgtttttaggggtcccatttaaccttgataatgaagagtttttgttttgatggaatcttcttttcatcagggaacaatgttcatggtattccttgccacatccatccatccacccagctgctactgcctggcaaccaacattctaggtgctgagcactcacacaggtttctggaacagcagtgaaagagacttgagccatggatggagcagagagcatcacgctgataccaggcacctcacttgctgggtgctgagctgagtccagccaagaatacatttgagtagtttacgctaagtttccagaagaggtgaccaaggctcaggaagatgggaccttgctcggggtcactcagtaaagctaataggaaaagccaggcagttggatctaagttctgtccttatcattgtgttgcctcctggcccaaaaggacagagcagagagggtgggtttgtgaaatgaggcagtgtctgaggactcaccagtctttagggggagttcaggtgcaatgtggtccttcaacagagttgagatggagtcggcataggcccagccaggtagatccataagtcctctggagaaaggttttcctccagtgccagtggccccgagttctggctggacattagaatctcccaggacacctgatggatcacaggtgcccaggcaacccaggcaccagatggctaaacccacatttgcatgagcaggctctcaaggtctacaattaaacagggccccgtggtgagctgatgaagccagtttggtgtctgggatgctgtttggccactgggacttacggagacaatactgtcaagagagtgactgacacattcaagaaagtctttggtagggcaaggtgaaagagaatgaacaggaagggcatttgaaagtagtactcagctgtgagaacagggggaggcatcagatatacctgttgctggtgacatcaccagctgtctgcgaagggaaggtgagatgctggtatccggagtatctgggtgagagtggtgtgtgctgctgatatccggattgaatggatgagacagaccacctggggtgcactgagaggcaggccctgtattggaagggtcagtaaaccacttcataagccctaaaggatgtccagaggggtgtcagagaagcagaggggcagggcaagctctcggtggaggtgagggctggagatgaaccttccatgtgatgcaggtaggtagagctactggaggagctagtgatgcagatcacatatttggaagagaaagggaggccggggaaagtgagtcagcctccagcgaggccgcctggtcagggcgctgtctccatcagttgcctattttgggaaagtgagattcttgattaaataaaacacagccagactcatgttcagagtccccgctctgagctcaagaggcttgggtcggggcgggctcaggcaggcctgcctgtggagcagatggctcccccaaggctgtcagcaccatgctggctgttttcagccgcctggtattctcagcagactcccctctatcaatgtcctgaaagaggaggcctccggccccagggctgctgagcattcccaaatcaaattgtgtttctctgaaggacagctgtttgacttctcgacgggaaaggccgttacgggagacaaacattaactgacctgtttttttcccccgagtcaagcattttctatacattatctcatttaatgcgggtcatgaggggtgagaattatgattccttcccttcaaacgtcataatgcttgaggttatataacagctggcacttaacaagcatctattctatgtggacattaagcccatggcatgccttatctaatttaatccccactcagctcttttatggccgaggaaacaggcacagaatggttatgtaactcatccaaagtaacacagctggaatgtagggaaaggaaaaaaaaagttagctgcaaatccaggcagttggatgtgcttgtggtcacatcccagtgcactggcctacttcttgtacatgacaaatgactccaaaaccttcctcttcccagtcagtgacttgctcctccaaccttgagatgtttcctcaatacacgtagtggagctttataggccacctagtcgaatgtgcagtgggcacgttctgagacctgcaggcaccaagaaggagaggagaggtcctccccgtggtggctgcagatccgagtttgaatccccagcacacagggaaaaagccagccattgcagcacacaagcctataacccctagcactgtggggtttagagactgatgatggggcttcccagctgcctgcctaattccagcttcagtgagaggccttgtcctgacagaacatggtggagagtgggggtgagggggcctgaagttatcatctgtgcccacaccacccaacatgggcacatagaatcctggaaggggagctgcagagctcagctgcgggtgtcagcatctcggcaggagctaaggagagccactttcactggctgtatgactgtggacctgcccttccccagctccatgcctcagtttccttatctgtaaaatccagccatctccagggctttctatttcaatttcagacttctgtgaatattaagcagttacaaacaaacaaacaaacaaacaaacaaaagtatagaccttttcaaagataagtaaagatagaaggcagggggctggtgagatggctcagtgggtaagagcacccgactgctcttccgaaggtccgaagttcaaatcccagcaaccacatggtggctcacaaccatctgtaacgagatctgactccctcttctggagtgtctgaagacagctacagtgtacttacatataataaataaataaatcttaaaaaaaaaaaaaagatagaaggcaggtatgaacccccagagatgcatagcgccaatccatcctttatcactatgtagttttcttcctctgggccccacccatttctccctcctccagtgtatcactttcctatgttatcagtatctctcggtctgtctgtctatctgtctgtctgtctatatgacaactcctaaagacacagaaccatgaagacacaatcacactcagaatgatagtaatctgtctaattcctcagtgctttgaacatggagctaagccatttggaagtcctcttggatgataagcggaagctgaactggagcttctaatattgtttatagcactttctgaacttgtacccagagaacaactttggagagagatgtaactgttcccctgaaagacagacatttgactcatcaatgtgaaagaccattatggaaggaaatgaataaatttaagaaaagcacacacacacacacacacacacacacacacacacacacatatatacatacaatatatacatatgtaattaaagaatacaatcttatttgataacctgtggctgcatatatgcaaggtcttttttgtcctgtgtcagatagcaccctcaatactctggggcagcctctcctttaacccttctatggacaggatctttgtcaaggatagagtgacctgatatcagaaagcttatgaccagtgatggatgggtcatgcacgtaacacaaagaaaaaaagtgaatagaaaacatatgtcctcagtttaaggcatcaaactagaaataaaaatcataaaaccctatgaaacaaaatcgtttaaggctcttgaatgagtagattaatgtgctttcccccaggatgtaataagtctcgtcttgcggcaagctgagcagttctgctgcgcactccataaagttgcctctgagcctcgtattggctctctgagatgcacctcctcctctttctggctctgctcaggaggcgtcctgtgagctcccatgccccaactacctcttgtgcctccatagcttgttgccctcgctgttcatctgtcaatctctctctgtctagtgccaggccctgtattgctgtcttgaactgctatttaaattcctgcctatttgtcatgtttccttaacactggggctccatgcccagcgcctgccaaccatgggcgtgatggattcccccatttgtcaagcctttgccgagtgcagaagcctggagctggagccttggcagtaggcagggaccgaggcatggttccagagcctcttcacggagggaaattgccatcctctcctgtgagggcccaagttggtaagccggctggtcggtgccttgccgtatgctcaggctacttatataagcagttcttcctccaaagggttttcaaagcagcctttagaagtagctaattgaagaacactccgagagaggtccctgcttgtggacgttaattgtgacagtttactctgcctgaacgatcatgaaatcactggaggccccttagcagggctgcaaagctcaagggaggctattaaccatttagcattctctaagcaccagggaataaaaattccacttacagcagagcagggggaggcaatgtttattacgacgaaagcccaagcctggagacagggaagtctacagcggcagccagcattgagtgcagagcgtactttacctcactggcagccaggactctcccaaatgtgctgacgagaaaaacaaacttgctaggagcacattggtagagtctctaaaggctatccctgaatggcagctatctggatgtctgctcccgtggcagtctagcctgcttccaagagggaagagtgttcagaacggcagggtaggaaggtgaaggggtacttagttagggtgactgcattaccctccttgagcaaatcattaatggggccttgtatgacggggacaaggagaaggaggtagccacgagtcactgctagagaagcagccaatgatgccatggagtgagatagccgtggctatggttcagaacatggattgacaggcaggtggcagtgctccatgcccctgcccctcacttggcttgggtgcctgggagaagctagttttgttgtgcttacaactatcaggtggcaagctgccaccctttccggagaatccaaacaatatgtatttatggaagcttctcgacctcgccttgaccatgggtgggtacgtgtagaatccctggagagctttccctgtgctcccatgcccagacgctaccttgaactaactgcgtttggatctaggcacgaactctgcagctcaaagtctcaaggcaggttttgtaggcagccctttgaggctgctgagaactgcctcctgggcctgacccctgaagactggcttcctgggaggtacatctgcagggagttttaccaactccccctgccaatcggggcaggccagatgctctccgtgggtctctcagatagtgagaactaggctgccagggctatgctccagtctaaatacgtatgctgtttctagatagtaattaaaccagtctacaaagaaatctgagttgagagctagagaaagaaaggaagggaagaaaaacaaagcagaatcaaaactcacaaaaggctcaagtatcaagctcaagtagagtgtggtacaacagaggtccttaaaaataccattgcaaaagcagtggctgttcccctatgatgatttgaaagcaaaaatcgctaacaatcccacctaccagacacagccattgtttctcttttgtggctctgttttccatgaaatttcaggttggcatacgccaacaagtgttggcatttcattggcattcatcgatggcatcgctattaaaagctgccaatcagttcgtgatggttggacattctctaggcactttgaattcctgctacccaagaggccccagttcgaactctacccctcaccagagtctggcaatgtatgaggcctgaccttggtttgtgcctgcctgccctgttgacagtccggtcagatggtcattgtgacttttgtatgtcaggtatgtttggaactcggactccagccatctgagaactgctaaggtcctgcttggctgtgaggcaaggctgtgtgagtggaggccccataactttctgcttactgcatgtccccagctgaggtggtggctaagaatctctgatggggacaaccctctccacctagccagcactaggacagctaacctcctcaaggtagcctgagctcccatggcatcagagagtgcagcatctgctcaggttttctcggacctgactaataaatactaagtattctgtgaccttgggaaggggaccgaagtcaatactaagtattctgtgaccttgggaaggggaccgagcaagcttggtgctttcctctagagactgagtagaacttctctgcccacctcacaaagtgggaagaaggaaggaactgaagcaggcggaggtgctcttaggaagccacgcgtagactgtggaacctttgacttccttgaacagaccgtgggagactcactctctgctctccttccaggcagcatacgcttattggctgcatgagctttggggtgaggtctctcttgactccggacaaggtgagttgctgggaagctcctgaagcaatagcccaccaaggccctggctggtatagtcacgttgaccctggaaatgcttggcttgagctgctctctgtgatgttgtgtcccactgaggtagatgttggtagtctaaattacaggctgctgttgtcactggcctggctgagggtttgggttcccttacagaggggagtttggcagcccctaggctccctaggaagtgctgagtctggcagatgccaggatgccataaagggtcctcttgatctgtcttctgggctcaggagacgcttggatggggctagaaagcactgacactgattgcagtcctcttaggctggctgaggacacaggctcaggattctcttctttgcatcactgtcacttagctggccttacttggctctgcagccccaaactaaaagcttaggagtcgggaggggtacatggcttttgcacatcttgaaaatgtccttgtggcccattttgagaccctaccacgcagctttgtgtcctggaatgatgtcaagagatggctcctgtgcgggttctcttgatctcccggccatagctgtggctttggtctcctcagaaaggtgctgctcatggagactgcacaggggtcttgagtatctgcttttgtggcctctccactgttcttcactctttcccttttgttctgtaaacagatatttaatgagcacctactgtttaccaggctcaatattaggtaggtcaaagagtctggctgcaggcaggaggcaggaggcaggaggtaggaggcaggaggcaggaggcaggaggcaggaggcaggaggcaggagggaggcaggaggcaaagcccgtaactgtccaggcataagaggctaagggaggatcacttccgtccagaaaatcagggaaggcttcctgaaggtgtaaatggcaaccttggggcacggaggctgaaccatctgctttgggggaataatggccagctgcaggtgtttgtttgtttgtctgtttttgaagggttagtggtagcttgacctgtgccttctgcttctctggactgatcatatctttccttctctcacgacaggagatcagtggctggtactatctgctaggggaggacctgggtcggaccaagcacctcaaggtggctaggcggcggctccagcccctgagaggtgtgtacaagcccttcgaagctccctgaccctgactgagtgaggcattaacctctgcctctctggcatttcttgccagtgcctataagattgcaggctactcctgaccatatgatagactttgagtttgtgccacctcgcttcacacagatcagtcccctgctccactcacagaagcttcaggacttcccaaaattctccttcccagactctatgtctcagaagccccccatccccgtggcaccttgctgaccattagaaccccaccaccataggcacgcatgtttctagggcctgccatggccctgagactccgggcttggattacatgttccttcggtactgttctttccctcacagccctggctctcaagcctctgtttgctctgagccttggcatcctcctatcctggaaggcaggaattgtcccgacagtctcacccatggtcggtttgtgcttgggccctcatgccagtaggagctttctgactcagctctattatcttctagacatgctgttgagaatgccaggagagggggaccctgagaacggggagaaactccaggtaggtgggcacactcctggctggggctggtagaacctgagcatggctccagggtctctggtggttctcctctttgtcagcctcttggttctggaagtgaccgtgaaagagggcagcttgggatttggaacacagcaagtcatgccttgtgaaagagagttcttaactttcctaaggtgtggcattggaaattgccctgtacataggtcttggtcattcgtgacctttgcagggatgggagagannnnnnnnnnnnnnnnnnnnnnnnnnnnnnnnnnnnnnnnnnnnnnnnnnnnnnnnnnnnnnnnnnnnnnnnnnnnnnnnnnnnnnnnnnnnnnnnnnnnnnnnnnnnnnnnnnnnnnnnnnnnnnnnnnnnnnnnnnnnnnnnnnnnnnnnnnnnnnnnnnnnnnnnnnnnnnnnnnnnnnnnnnnnnnnnnnnnnnnnnnnnnnnnnnnnnnnnnnnnnnnnnnnnnnnnnnnnnnnnnnnnnnnnnnnnnnnnnnnnnnnnnnnnnnnnnnnnnnnnnnnnnnnnnnnnnnnnnnnnnnnnnnnnnnnnnnnnnnnnnnnnnnnnnnnnnnnnnnnnnnnnnnnnnnnnnnnnnnnnnnnnnnnnnnnnnnnnnnnnnnnnnnnnnnnnnnnnnnnnnnnnnnnnnnnnnnnnnnnnnnnnnnnnnnnnnnnnnnnnnnnnnnnnnnnnnnnnnnnnnnnnnnnnnnnnnnnnnnnnnnnnnnnnnnnnnnnnnnnnnnnnnnnnnnnnnnnnnnnnnnnnnnnnnnnnnnnnnnnnnnnnnnnnnnnnnnnnnnnnnnnnnnnnnnnnnnnnnnnnnnnnnnnnnnnnnnnnnnnnnnnnnnnnnnnnnnnnnnnnnnnnnnnnnntttctctctccctcccccctttcttcttttttgcctctagaaatagaatcctcccttccctcaggtccccagaacttctctgtctctgagaaccatggcaccttcacaggttaagcctgctggggctaagaagcagccgtaactctgaatcagaaagtgacgggtttctggcttcctaccagctgtgaatctggagaggaacgtcatacagggatttgggtgaattgtccaaagttaactccatctctttggagaacctgtcatggtgactcacggttttctttagtaggagaaggaaaatcaaactctctacgatcaatcagcccctggggtgagattgtgatctaactctcatcacctcctgtgaggtggctgtcaccaccccaccttacagataagaggacatatagatcttaggtgttatgtcactgtggccactcagccagcaagagattggcagagcctctttatctcttctgggcaccatgccacacggtctctggagtgtgtcctcaccaaggagacctgagatgtcagtgctccttgacctcttgtattgcagttaaccccttgggtgctattgtgcacccgttcatccaatcccttggacactatggggtggtttacacctgtgccgaccccagcctgctgctgggttctggacagagccttggctcactcccttgtggaacatacagttcaacatatcactggccatcacagtagctgcctgccgcctgcagcttctgagcacctggctggagcaagcagagctgaggaacagagccacagcttctagttcgtgttaggtaacgtcagcgtgtcctgtgcaaacatccagcctctcttatagtgcttggataatctgccagatgtgttttttatggcttcactaggagtctagaggcttcctctagctccagggatagctccaaagatctccccactctctgtgtggagagagtaactatgggcccaccctaggaatatgtgggaatgacttggatacctgcgttgcaggtctctaggtggcccatgaaagacctgctttgtgttagattcctgtctactgtcccatgtccccgaggacactgttctgagttggatttgggggtttgtgcacctgatgatgtccacagtgctcagcagagacagtgactggcagaggtgtggggaagtgagaggtcacttattcaaatcctccatttgaaagaccttgaggtgtaggtcacctgcccagggtcactcagcaatcaaaccaaggcacagcctctgttctaactacatgagtgagcaggtgggcttttctgggggtctcctaggagggcagaggggcttgggttcatgctgtgctacccacgagaactgatcctgggatgtcaaggtactgactgcaggcctgggtcctaacctggcatttgactgtaacctctctaggcctccccttctttgttgttacgatgtggagtcaggtgccccgtggctgggagcccatttgcacatttgaccatttggtctgcgtgccatcatttccttcgcatagcctgtctattgtgaattcagaagctgactcttaagtagctcctgagtgtccatcagcctccagatgtttcgaatgccctgacttaagatgggttgtttatgggtatagtgttcacagcatcctggattgtccccattgggctggtctactggattttggaccctgggactcacaaggaggtgtgctgttacagaacagggtgtgttttctgcttgagtttccctccagcaggcagtcagggctgtttgtgagaacactgctctcacagagcgtcccagggcagagaatgcagccagaacaaaggcgccctctccccgccagccaggcccgaggaatactaactagttgacaggaattttaatataaaactctccctcttccttgtcattctgaggtttcaggaagccttcgggcttatctgcagaggcacacagcacagacagggcccggggaggtgagaggtgatttcctgccattcttctgagaggcgggcttcccagggcggtcatgccaggctgacagggtgcagtgtgggctcccgctactggggggggagagctgggttttcatggggaggcagccgaggcaggatccgcagccatgaaccgcttcaatgggctctgcaaagtgtgttcagaacgccgctaccggcaggtgggtgcttgatcccctgggtactgtgatagtgggaatcagggatggggctcatccatatagaatctctctctccacaagcccatctatgcctccccctgttccctgcaggcacattagagacaggggttggtcccatggcccagcctgctacctactgccccgggttataggcagctgaggccagttctgagtgttttcctatccactgcctgggatccttgatgagatgagttagctgttgctgcttggtttttgcttttgcttttattatctaggaggaggtgattggaataaaaaaagcgccatgtcaggtctgagattagtggtgctgggtttgggctggggggctaagggactcccgaaagctgcagttttgctgactttcctgtttctggtgggcagcggtacccatgatgtcccttgtgtgtactggtgtgtgcatctaggtgaggtgtgttgtaagcgtatgtgtatcttttcctcccggctgccaccattgccttgaagtgactccgggattgctgtggctctggaggccaacttcactgcatctgtctcttagctcctgggctgggaggcagggaagagtcaggagtgatggtcacgttcaccccaaagactcttctagaactagcttttctttctttctttctttctttctttctttctttctttctttctttctttctttttaagatttatttatttatgtatgtatgtgagtacactgtagctgtacagatggttgtgagccttcatgtggttattggaaattgaattttttaggatctctgcttgctccagccaaccccacttgctacggtcagccccgtttgctccagcccaaagcttcattttttattattatacataagtgcactgtagctgacttcagactcatcagaagggggtgtcagatctcattacgggtgattgtgagccaccatgtggttgctgggatttgaactcaggaccttctgaagagcactcagtgctcttacctgctgagtcatctcaccagcccacttttatttcttatacataggaatggggatcaggagtagggatgaaggtaaaatatatccagatttgtgtagtgtccaagatggagggaccacacgaattgccctgactgtaaaaaatacagagaagaccctctttagaatctggagcttaactctatagtgtataggtcacaggcagaggcccatttcccccccacccccaccccccccccggcacctgcctccatcactggggacccagatgttctttctaacattttcctgcaccgttgacctcaatctatgctccctactttcctgaagttagtccctgtggcaagaacatttagatgtttataaacataagacagggtgagcgccggataggaggtaatgaaatcccaggtgttcttgggaccaggggccagggcacaggaatgtgctggtgaccagagtgggacctggtacacgcatgggctggactcagggtaagatggctcccacatcgacgccggggcagcattgaacatactagaccttctgtgggaccagagctctagcccactgtggtcccctttaactgatctattgagcagcttacagtcgcttgtccctaaaacaggagtggtgacatatggtcaagcccgtgggaggaaaaggtgacccctataaagtcttgtgtctgctgctcacctccagggagtaggtaataaatgctggcagttagggacaggagcccacgtgtgacagaacgtcagatactcttcaggtgctggcatagctgagactcgggaggggcggcagtgcttgcccctgacaggcaagagaaagagccaccctgggaagggcacctgacaggacctgctgaggttccagagtcaggagagggctgtcccctttcttgagcccaaggtcagagaggatcgctggggggagtatgccctcactttgggccttgcttaccttctctgtaaaatgggcttgctgaagccgtattctttggggtctaggacagactcttgtcttggaggactgactctttggacactactctgtgtgctcagaggcctccattgcagcctgctcctcccacagacctgggcaatgctctcattcctttctagcccctttcccgtcactcctttgctagccaatggggtaggattgttctccgaggtggcactcaggaggcggtgaagagcctcctggccctggccggaccagagtgccagagcgccacatttatcttcagaccaaggatctggggcttaccctccagacaggaggggccatcctcagcgccctgtgacataagattggggcagggctagaagtagtcctgtgtggtgtggaaggtaggtcccaagttccctgtgagccccacagagtggctcctgctgtcttctctgggcctctgctggattggcaactcgagatccctccagctctccacgttcactcccggctttgttttgctttctttccatatttttttccttctcttcctgtcttagctatgtgttttcccagaattcttatgggaatagggtattttcctgcctccctccccctcccccgcttgtctgtcagatttcctgttttacaaacttgctttgaatccaggcccaggactggtgggaagcagagcctggggacctttggtcaccctgggctcccgcctgctccccttcctcatgcctggccttgggttaccagcaggtgaatacagtgcccagccctgagagacagctcaaggctctgcatgcggctgtgccctgcctgacctgtgctaggctttcggagatgccttcctcctctccccgtctctgtccaggacaccttctctttgtgcctcattgggactcaccctggtctttccctgccctaggggtatcttgggactcccccttgaagccatttttctgacctaagtaatctgaatgagccagtgggccatgctgcacacagaatcgctctttttgttttttggaagattttgtcttaaaaaaattttttttaattttattttaaactatgcttatatgtgtgcctggccatgtgtaggtcagaggtgttggattccccccgaagctggagttataggcaaatgtgagctgacttggagactgggaatagaacccaagagctagtattagcaagagtcagtgtctatgcacctaactgctgagccagcggttcttgacctgtgggtctcgaccctaaccctttctcaggggtcagatctcagatatcctgcatatcaaatatttacattacagttcctgacagtacaaaattgcagttacgaagcagcaacaaaaataattttatggttggagtcacaacccgagacttgtattaaagggtagtagcattaatagcattaggaagattgagaaccactgcactaaatcattttcaaagatgggcgggcgtggagggggtcctttgatcggacctctgaaaacagactgtggcctcccacacccatactcctttgtaggcagaatgaagcccgtggctagtacaggtttatccaggaggctgcggctctgcccgtgcctgtgaaccccatcactcttcagctgacacttggccatgggctaagagagaacatgctacatcttcctgcctggccctcagggagggcggccacccgcttggcttgatttctaaataaaataaagtgtgtgtccttagcccaaggcaaaccatgggcttagatcccaagacctccgtgggaaaggaagctggtcttcagtggggagaggaggtagaattccagacggctcttgggtaaagggttggggctgttaggaccaagaggaaaacgggtttcccttttccttgatctcatccattctgctctctgcttgactttgcataagtcagggttaagatggtgggtcagagataggtagaggaggctggctgactccttctcagctctgactccctgtggagaggaaggtggctctgggtggagcttagaggcttcccagttttgaaactctggagtaactggacaaggttatgtcctagatcaccatccggaggggcaaagacggctttggcttcaccatctgctgtgactctccggtccgagtccaggctgtggattctggtaagtgaatggcctaggatggcagcctcaccctcctgccaggcagctggactttgctgtttggagctggacagggcctcacactggatcagactctgggttttcaaaggaaaaagaataatatttttaaatgacctacagatgaatctgaggtttatgaaaatagagccttttttgggggggggagggttgttttatcaaaatgaaaatagattctgtattttgattctgctcgtttctgaagaggagctaaaatcgaattccgatggctgcaggggagatgtatgagcttgcatcccatccgcaagcccacttaacacttagaagtggacatcccgagctggctgtggtggctcgtacttataacccttgaacctaggaggtagaggcaagaggattgctggatattcaaagctagcctggcctacactgtgagtctctctctctctctctctctctctctcacacacacacacacacacacatacataaacaaaaagcaagaacataataggcagaggctgggaatgtgacacagtaaagcactaatacagtaagagggggattcatttggtctccagaaactgtgcaaaaaggaaaaagaaaaaaagaagccaaccactgtggctcatgttttaattatatcctcctgcgggtggggtcggagaaaggggaatagttgagactcattcattaggcagagtagcctacttgatgagagtcccaggccagtgagaaaccctgagagagagagggagagagggagagagaaagagagagagagagagagagagagagagagagagagagagagagagagagagagatgagtgcctggcttctatatgcgtgtacacatctatatgcatttcccctccctcttcccaacttccacccacagcacacgcgcacacacacatacacacacacacacctccactgccaaaaaagatatcagtttcttactcttctaagggacccttggagagggtgggggtgtgagcacgtggagaggcgaaggcctttgatcaacgcccagttcagcacctctgtgtggaacaataaagaggaaaaggacaactcttgctcagtgtcaccagagaagcaaaggattccaggttctctgaggaagtcttaggcctcagtggtctctgagtggcttttctttgtctttgcagggggcccggcagagagggcgggactgcagcagctggacacagtgctacaactgaatgagagacccgtggagcactggaaatgtgtggagctggcacatgagatccggtgacagggggcagtgggcggcggaaacctcagctgatggcaaatcttccccacccagccctgggctcactgccttgctctcctcctctcagtctgctctcggcccagctgtgagcaatttacatcgctcctcagggaatccatttcttggcctggaaatggaaggttcaggcccagatgaattttgatcccacagcaaacagcaggaaagatgctctgaacctaccccgtggtccctgctgtggttccaaggggccagttccactttagccaattgtccctgctactgaatggctaaaccctttgtttaagggactgcagacagtgcagatgttttaatatcacaagttaacgtgtattcggtaaaatatctgactttgtgggctagcaccccaacggtccgttttggatccgcttcatggagatcacatttcgcttgctcctgcctggcctctttctgcttgctctctgccctgcgagcttcctaccctgactggttctgatctccccaagtctgaactcctctgtggaatttctaggagctgtcctagcgagatcatcctgctcgtgtggcgtgtggtcccccagatcaagccggggccagatggcggagtcttgcggcgggcctcctgcaagtccacacatgacctcctgtcaccccctaacaagagggagaagaactgtactcatggggccccagttcgtcctgagcagcgccacagctgccacctggtgtgtgacagctctgatggtctactgcttggtggctgggagcgctacactgaggtgggcaagcgcagtggccagcacaccctgcctgcactgtcccggaccaccacccctactgaccccaactacatcatcctggccccactgaatcctggaagccaggtatggacagctgagtgtggaagggtattgggttcctgtggtaggttaggatgtcaaaaaacaaaaaacaaaaaacaaaaaacaaaaccaaaaaaaacgggaagattggattgtgagacatctgtggtatggctgttagggtcctatcattctcaaagtccatggagcacactttggaacaagcggccatgaaggaagctgtggtctctcggggtgccaccacttcatggagcatgaagagcttctcttccaccccttccccttaagagaactgctatgcttctctcataccctgaaacattatacttcctgtcgtcagacctgtgtgcagccccctgctgggctgctctgttccattcttgggactgagctaggtttcttgtctttgcagttgctgcggcctgtgtaccaggaggatacaatccctgaaggtgagctgtccgagatgctaagccctctcagcctggagagatagttgaggtcagctgaggtctggcccaacttcccgttctgagtttagaggcccttctgatggagctggggttacccagcatctcgaaacagatcccaccccctgatcctcctggtatcgcctccccccatgagtgtttttttccttaaatttccttaaagtcagaattaagttggtggagaggggaatctgcaagaaccacctaagagacaggtgcttggcatttatcttggctgttagccagtgttgctgagcaaccgtatctgttaggggcccgtggacaccaatgcttgaagccgcagggagagcactcctggaacgttgggctttggggtcttgggtccaaatcttcactgtgggactcgagcagatcactgcctcctcctttcaaaacaggatcagttgttcctgatcagtgctcgggagctcatctggagggttctaggggaatacggttgtatgctgttgcctgcatgcagaaagatggtgcaggagagctgcctctaagctttttgtagctgtccctgctgattaaaccattcttctcctttggcctgcacattctggggccagaagtgggagctggcagaaagcaatcactcctccaggaaccctgggatatgagactctgtgcaagagttggtgggacagacccttaggccctcacacacctgccacagagctctgaccccaaagtccagctggtctagaaggttgaagccagccttgccatgtggcctgtgaggcctacctggagtgtgactgaacctttctgtgcctgtagacaacacccttggccttcttccttgagagtggcccttcccatctcatctcagatttatttctgtgctcttcccccctccattagtgatacgatgatgattcttaaagtgggcacttgggccttagggaagagagggctcctatcaggctcagaatttctgatggaaggcacctccttcctctccctgctggggcctgtgagcacttgggcccagcctgccggaaatgaagctgtgttcctcccagggaggagtctgatagtgattcaacagtaagtgtctaaaagcttttagtgggcacattagggcaaagtaaatatgtcactgctaaatggtgattttattagggggccgggccgagctcagcatatttctgtaggctcaacctcagacccagggcctgtgaggcaacagaaacttggtggaacttgggcagaacggctgaggagaaggactctggttgttggtatagttttgaagccaagccactgaggaagggaccctggaagatgtgtcacctacttgggcatatgcattcggtctgggagctcttcaatcctttcccacgaagctccagagttgcctgtatggttggtcccaagccatgtctgtgttttgactcctctctgaaaatacagtgccaagaagggcatggtcacccaagcctcggaggaaagaacaagtcaggaagagatggcggtgttaataacagtgggagtgttctgagttccctctgtccagatctaacatggtgtgtatccacacacatgcacatgtttgtatgtgtgtgagtgtgtatgcacatggaggcaaaaggtcaaacccaggagccatccaccctattttactgagtctcactggggcctgagacttgctgattcagctaccctggccagccagtgagccctagggatccacaggtctcggcctctgcagtgttggggtcacaagcacatgccaccatgcctagctttttccctgggtgttggggagtagactcagggccacatggctagtgcagcaagcactttaccaactgagccaccctgtgtcacgatctcgacttcactcatatttcagcacagtgatcctcttagtatcagaggatatctttctcatggattaattctttgcagccccaagtcgtgagttcagaggaaggagtgaagaattccgggcatgtggtttcccctcacacacctggggttacccagaggttagggcagtcaccagggtgatggcctctgattcctctggcctgcaaggatggtggcctttcaggatggagagctcagccaccctgctttgaatatcaggaacagggacagcttagccatcttgcgttgaacagggtctgaggcctttccagagcctagagtgcctgtccggctgtagttggcgtatgccccaaggccgctgttctttgaaagtttaccaccgccagagccagagccagagggctgccagggctcgcctcagaagctcagagcaaagccatataattactatgtttggtcagtgaaacaggcgctagaagaaatggagctgatacaggtttaggccagacatcctcacaagaggtgacaggtggaagtttgccttcgtggggctcagcagccggcctgcaatctggattgttctaaaaaaaaaaaaaaaaaaaaaaaaaaaagaataacttggaaaaagaaaattcagctccggagaaccacaccccttgccccatatcctcagagtggcttgtcagtgctcctttagggagtggctaccacctagattgggcaggtcctggcttgtgtcctctactagctgaatgaccttggtccattcatacaagaacgctatacctctgtttgctggaaaatggggctaagcagttctctcctctctggaagcagagagacgggtcaggtggctgctttgtgactcttgagatctagggtgaagattctttgacagtgctgggcagccgggcctagggaagaaatctcttgtaagtctgagacttagagcccccacacctggatttttccactgtggattgcatccttccctcattttggtctggatgacctcagcccctgcttgtcagccctgcatggttttaccttccctgatccaggctgtgctttgtccggctagcctgtctgtttccagactgttctgtgacctaacttacggcgtgcttccaggccttctctgccatgctaccgccaatggctggcttcgtgttggaggtaatcaatccatcctgcaatcacacaccagcctggcctccaacccccgtttctcatggggcctttttgttagttccgcactgactcagctggacagagagaactgtctcaaatagggaaggagcctgctccgtgcacagttgctcagcattccgggctgcacagtcagcttttgagtgaggaggacatggctcacattcaaggtgtcttgtccaactcaagtctagggtaggtcttgaaacataggttgtatttttaccagtggaagaacaggctactgcacagacaaccaacctgtcaacccccagggccaggccagaaagaaagctatgggacacttctcctgcatctgtgcctcctgtccccatctgggtccctgttctttgtattgtctcagccacccttgaagagtcaggaagtggtttgagtgctgtggccaggctgcgatctggtcacttgtgggggtgggggagagttgatttgtttttctcacctctcagtgagaaggagcatggagggggagggagagggagcaagtgtgaaaaccttctgggctgtttcctcttctcagtggcctttgcgttggtggggagcttccccaagacggagttggttcaggtcacctgctcactgtctgcagaaagctagaggacgcctgggctctgagacacaggctgggctccttagtcagggagagtctggctggtttcccctggcagcgggaaccctaggaaggagatcaggagtgtgtgaacctcatcgctcaggctcgctcctaccttttcattcagaacacacacagcaagtgccgtgtgttagtctatacaaattgatggtggtggccaggtagctcctgctaaccttggctagtggaagtgtggaccctggagcacacgggcaaagcatgttgtctccattatcgcagggaacagacttttgtgcctggctggtgatgagcaggcgttccgaggtggggtggtaacaggatgagcgtgtgtgccctgtcctgtctcttgcaaagctacctctgctccaattcacgttccatgtgggacggcagatgctgtgaggtcagccctgagtgtttagacgggagtttctgttgcattgtgattttgttgctgctgttgttttgagatgggatcttgttgtgcagcccgggctgctcaggcttcaagttcttcgatttcgggtttctgaattctgagattcttggcgtgtgccaacatgcctagacaatttcttgattttcaaacgcccaaggctgataagtggatagctttgttttggtgtctgggtcactgggaggggtggggtggcagggcaacactccctgtcacagttgtgggctgatggctctatcctggccctggagttgctctttttcttcccactcaggaatcctcaaggccgaggctgagcctggttggagtgggattcactaaatggacattgttccttgttcttacggggcggggctggatccctcaagagacgatgaaagtacctcattgtccccaacctctgttccacagaaccggggactactactaaagggaaatcgtacaccggcctgggcaagaagtctcggctcatgaagacagtgcagaccatgaagggccacagtaactaccaagactgctcagccctgagaccgcacatcccgcattccagttacggcacctatgtcaccctggcccctaaagtcctggtgttccctgtctttgtgcaggtgagcctgtggcacaccccaggggtcccctcaggaggaagtgagaacagtaagggaccttggttccaggaacaagggtgtaaactcatccaggattcagggccctctctggggacagaaaaatagtttcctagtctggaggttataagggaagcagacgtttccagaaggctatgtggaaaagtgtggagccatgagagggtccttgccctcccttcccagctccctcatcctctggggccgggacaggtgcactacagagtctggcagtgatgtcggctgcctcacccagaggcacttatgtgtgaaactgactgagggagagagactgtgtggctggtccctctgctcaggcaaatgcatcaggatagcagtagtggtgcaggagcacagagcagaaagtcacgggagtcacacacttcaccccctccccctcccccccccccgtaatctcccacttcttcatgtctccccttcctccttcccctcttcctgccaatgagttaataagcatccagagtcttgggttccggtagagcatttccaaccatgatttgccgtcttccccctcttctcccacacccctgcccctggtacgtctctgctgtcataacgtcttttccacccttgtgtcttctgtgttctatacccctctttcctcaacaacgctcctctcctcttgtggttctttttctggctctatggctcatacctacacacacacacacacacacacacacacacacacacacacacagacatacatacacacacataaaataaaagtatcgaaagctagattctgtatatgagaaagcatatactatatgttttagatctgcccattttatgcaaatgctataattaaatttttatggctggatataagaccattgaatgtatatacctcattttcaagatgagcttgtttttttttaaaaaataagtagatagttaccatacgacccagtcatgctactactgagcaaaggactttatatcctagacaaagatcctcgaatgtctgtgtttattgctgctgtggccaaaatactaagggactaacagcttagacagcctattcacatggtgaataggtagtaaacatgttctgtatttctttcctctcagatctttatttattctgccccttggatatcactttatggccctttaggtcgttcacacatttttttaaatgtaagaagctcttatttccccaccatgttgttctccaccccctccccacacacactttcccttttcttgcagtgctggggaccatacccaaggctttgctcgtgctgtccccagacaagcactgagctatgcccacagtccttggctttgtagacagcctttcactatgtagctcaggatggcccaactcgatcctccgtcctcagtgacccaaggactagggtcataggtgcgtgctacctgcctggttatttttggttttgtcttttaatttttattacaaattaagtctggtgagccaccccagtagggaaaggtgcatgccgctgaacctgacaacctgaatttgatccctggggcctgtatggcagaaggacagaaatgacttctgcaagttgtcctcctactttcacacccattgcatccacatgcctgttccacatatacgtctctgtgtgtgtgtgtgtgtgtgtgtgtgtgtgtgtatgtgcgcgcacacgcatgcatacatgcctactcccacgtgtatatatgtgtatgtgtacatgcctgctccacatattatgtatttttgcacatacacacctataagagtagtacagtttttaaatttgtaaattatgttttgagggtttgttgttttgttttgatttttagtattttggagaaagggtatctatataaccctggctttcctcaacctctctgtagaccagtctggcctcgaattcacaaagatcagtctgtctctgccttctgagtgttggggttaaaggtatgtgtcaccaccattcccagttttaattggtttttaaaattttaaaaactgaaaaaatttaaactgtgaaacactcaagccagaaagtggttggtgcatgccttaggaggcagaggccagctgctctacagaatgagtaccaggacagctgggaagctgagactacacagagaaaccctgccaaaaaagaaagagtggggagcagggtggggtgggggagaaagacttaagataagaatggcttaagacttacatatgccaaacagagaatcagagtgaatacctaccgaatagccggtagctgtccacatagatgctgtccacatcgatgctgtccacacagacgctgtcccacctcttccatattacggcgcgctcccttcccaccagagacctccccaccttgcttgatgactgacctccctctgctttctgtcagatttccccatctgtttatgcatagcctatgtttgaagtttcatccgagctgtagtacacagttgatgcctatcttgtcatctttctacatcccttgcttaaggtcagggacttggtggtgggggggggggatgtgtgataaatgtacactcccaaggacaggtgtccctttgaggagggtcaggcagagtttgggcacgttctttgaatcggacaggacagggtggtgggactagaagtctgagtaggaatcagttgctgagatgaaggagtcagttggctcagcctgggacctgagcagggcggggatccgcctggccttgaagagacttgagtggccatatctcttggcatagggccctcaagatgcctcgtgggcctgacagcagagacctccctctgaggcacacacagaatggaggcgagctgagtgctggagccccagggtgggggcggacatcaggggagaactgcaaggccctgagcctgtggctgaacttcctgtagagagagcagctcttttgatcaggcctggctgggccgagctagagcagagtctttctctttccattgcgggcgggcgggcgggggcgtgagggtgcgtggggtcaggggtagggaggaggagggcaggcagtcttgtcttctcctctgctctggctttggcaagctgccctttgcatcccactcagcgtgactagtttttcagcccctagatctctgtaaccctgcccggactctcctgctgtcggaggagctgctgctgtatgaggggaggaacaagacttcccaggtaagacctgcacagccctgctggaaaccagctgtgtttccttccctcactttctctcttcctttggagcactagacagcctcagggtggagacctgaaactcttccaaaagccttatggagaggtcacccagctcttgtttaccggctagttacaatctctctctctctctctctctctctctctctctctctctctctctctctctctctctctctctctctcaaggttgatcattagtatggtcaaagcatacctctagtctctaaaaagacatctcattgtttatcccaggaggagaaaagataacagtttatcccagctgagataagcaaccctgaagattaaagtctagccaaagagaatccttagaggaatgttggagtctttctataaagaacccaagcccagacccccttctgagagctcagtctatggccaccctccattaccctcccccagctctagccttgtccacaggggtcaagggataggtcattcttcctgggaaccagcttatctctagctgggaggacatccctcacccacacagtggaaaggtcagagagcttggacatcggaagtctgtatccagccccagctctgtcactggcttctggtgacttctgccatcctcatcacccttaccatctgagcagtgggtctgtgcgtgcttggggcagagggcagggtctgaggttagctccttgtagctttatcctcctggacactctgggcaactggagctaacaccggaagttggctttgcttgtgttttgttgtaagcaagcagatcaggacacctatgttccacacgagtattgtctctttaaggagggctccccagggaggctgtgtgcttgtccctcccctgactggtgacttgtcttgttgtataggactcaagggcatgagatggtggaggagtcagtcattaaggattggcctgggacagtagctctgcatttgttgtcttaggccaaagaaggttaataatggatatggccgcttgaaagtatggaaaagcaggatataagcattattcagaaagattggaaagtaagcaaaactggaaagaggagtgggggtccccagggaagaaaaatcccctggctttccttcctttaggttttatgaagcaatgacagaaactagacagacagacagaagccagtggtcgtctctgttgaggtcggttaattctctgggctgtcatggaacaagcccacatgctctatgtctgccctcctagactgaccagggagatggatcactcgctgctcatatgctgcccacacagtgatgggtggctgaagcctcgctccactcctctctgactttaactttgaccttgactctctgctagttcttagtcccttgactcggccagctactcaccagcctagtaggtttctccaggaccactcattgtgctaagccggctctctcatttacaggctcagcttgtggctttaccatggcagaggtaatagtccactctgttccagccaccgaggcatagtcctttcggttacctcgtctgtggcgtggcttagagtgcctcctgggtgaatcttcttgttagaagccaccctggcttacagtttagcctgtcgcaatcagctacattggagtcaaggatagatgaaggaatgaaggcatcttaaattatgctctaaggggcgggcctctggagtcagtggcctgctgtcattggcccagagccctgcccctccttttatctgaccagcttggatatctcatagccaactaaatgtaacttttaactttccttgcatccccagcctctgtcctcacacagcctctgtgagcacctcacacacagccctcaccatggccctttcctctccctaccctcgtagagctcagctcccacacccctgggattgctgacatcactctgggcctctctgtgggagagctttcttaagggcctcagcctatcaaccttcccacttgnnnnnnnnnnnnnnnnnnnnnnnnnnnnnnnnnnnnnnnnnnnnnnnnnnnnnnnnnnnnnnnnnnnnnnnnnnnnnnnnnnnnnnnnnnnnnnnnnnnnnnncctatcaaccttcccacttgcttcagtgggagagaaatttcactgggagataggatgtaggctgtaagagtgagaagtcccttggtgctgggtttggtgcctaagtgcgtgtttgcagggtcagagctggagaggtgtggctgcatacttaatgtgcccagaagaagccagttaaggacaagagccacctgaactatactcttatgtccgattttctctctcttgtcttgttcaccactacatctacaaaaattaggtatttactgcatatcctctctgctcatgcatgatacgtacatgatcccttgctacacacgtcatcccaattaggcctgaaacatcctcacgacaggagagaagcacaaggagactggggctcaaccaggacccaagaatctcaaggctggtagggaatggagccaggataagttcttggctctctggctgggtaatgctctccatgatccctggcgcttttggtatgtttgttaaaaccaagggaacacaagccaagctatagccgtagtaacagttcactcctccctaccccaccactctcccagcccctacccctcatcctcccccctcccccacctccaacaaacacacacaacttcttgcccactggatctttggaagttgagaaccaaaagaaactctccctttaagactgaaggtagtctgttttaatttgaagacaagaaaagtaacttcatcccttctcctcaaagtaggagagcagcagcctcctaggagagcttcgacatgtctcccgatcctcaaactgaaaatggaaagcagctatcaccaggcattgggtagcttctgagaacatgtcggggtgggagggtaaggttcctagattctagttactctgtgtcattctccaggcaataacttttcccaaaggggtttctaaatgaatatggtggcctctctaggcagcagagttgtaaactggaaggtgctaagcagttggaagctctgcatgtcttgaacgttttctctctctgtttctttatcctgactcttctctgagcatggtgatgttagggagctgctcccatccccacagcacagaagtcacatggtttgatctggacgcacacccagatcaaatcatcatttagtggcggcctgtttggttttttgtttcattttgttttggttttggtttttcaagacagggtttctctgtgtagtcctggctgtcctggaactcactttgtagactaggctggcctcaaactcagaaatccgcctgcctcagcctctggttttgtttttgagagaagctttatctgtgtagcctcagctgtcctagaacttgatttgtagagcaggctatcctcgaacctatagacctgcctgcttctgctgggattaaaggcatgcatcacaaagtcagcctcttgacagcctcttacacacacatcctgacctcagttctggtcactggggactcagccagagcttttactaggttccaggaatactatgaagtccaagatgccacaccctcagttcacacagactcattgggtttaccattaactgaagtatcaaggtgttgtctgtaggtaggctcagccccatggccgggtgcccaggagaaggctttggtcagggccacttgagagaagtcaccctccgagttgtaaggattctgtgactaatcttgggattctggaaaatacatgtgtcctaggagcaagtgtggggaagactggcccagaccccagggccagtgttggaaggcagcaggtaaccagactgtggagaagggggacagtgttccctggattgtgaggcttctgcttgtaggctgttggggagcagcagggcccacatgctttgctctggcatgcctgccatctgccttgcctccagccctgtgccagccctggcctttgcctgaccgacctttggggaaaattttctctcatgccttaatcacttcctgtctagaccatattctcagctctgggagtaggcgggagactgggggcagtggcctagtgcttttctcaccttgtggctcctcccacaagtcttccattcagccctaggctttttttttttttttaattttaattttctagtctcacagattatctcttctgacctttcttctgccagcttccctatggtctagaggtaacagccagacctcccctgagtgggggacatgttttgtgggaagatgagggtttgcctacagagcagccccttgactctgcaaaccctcctcagaccatctgtaaccacacgtcttctgagcactccattgttttccttcctacacttactgaatttattgtctcttctgctataggcacatcaccacctctctgtcattagatccctagctgtgtggtcatgggaaagtcacttaacctgtctgagctggagagggcagtgatactgtttaagtgagggcggaacagggcaggagcaggtactcagctgcagggatgtttctgtcgcactgttttgggctgggctggggcatgcttcactgttaagactcccttctggaggtcctgagttcaattcccagcaaccacaaggtggctcaccactatccataatgggctccgatgccctcttctggtctgtctgaagacagtgatggtatactcacatacataaaataaataaaccttaaaaacaaacaaacaaacaaaaaacccttctggcaaagagttctagattttttaaaaatgagtactctgtagctgtcttcagacacaccagaagagggcattagatcccattacagatggttgtgagccaccatatggttgttgggacttgaactcaggacctctgaaagaacagtcaatgttcttaaccacagagacatctctacagcacccaaactctagagcttttgtgtttgggacctgttggaagatggcatggccctgagatggcctgcctaagtacattcctgagctacttccaggttccatttttgtgtaatgcccagaatgtcaggtagggctttggatacgtcttatatacatatatatgtgtacatatacatatatatgcacatatgtatgtataacatatataaatttagacacgctctcatcacatagcccagattagcttagagtgcattgtataccctgggatagcctgtaactcataactctcttgcttggccacagaatgctgggattgtaactgtatataaccatgctctgcttttatttttttctaattgcagaagtgccaccgagaacatccttatatgttcgtatttatacattcttgtatttctctcggagagcctcagaggtgggactgcgggatcatcttgagcagctcgctagctaaatgtcagcgtgccggcttttcaaacatggttaacaaatcacaaactgtgcccttcaggctgtgccaagctcttctggtggggtctccctgcttcagaagacatggagggtcagctatggccccttgaagaagagtcccataattaataatttatattattatcatcatcatctgagataggactttaaagctttaaggaaagaaccgtgtaaaccatagtggacatagaaaaccaagtgaattcttttcaacataaaaacatgctgagcagatctgtcaggttacttataatggctaaaaatggcccttcctttgttttgggagcataaagaggagtagcggttgtgtgcaaacctagatcagaatgtaagtaaccaccatttttcctgaaccaaatttctcattggtacactacaaaaataactgcaagaaatttggtaatactacctcatgaatcttcccctcacattacagatagcttgtagaagaagcttgagggagccaggtatggggtatggtctggggacaccccagggcctaagtaaggctcctccaagaacagtgagcctggaggactatggccatagagagaccgaccgagctacccaccttgagggcaggagccattgttaagtctggtttatttgtatttgtttctactttgagcaagggaagtacagaacgcgcagggatgaactggctgctcccgctgcagggcaagccttcatcattagcgtggtccctcaaggagctccttctggctctgccaacactggaggtccaggatgtgtttcctggacctctagtggacctcgtggctctctgcatcccggagggacagcaaagcagacagttgtgtttgttctctccccgaacaggtgacactgtttgcctactcggacctgctgctgttcactaaggaggaggagccaggccgctgcgacgtcctgagaaatcccctctacctccagagcgtgaagctacaggagggtaagaaggacatgggcaccctaacgtgctgttgggtctgcctggtgttgcatacaaggctggcaagccaccttctgctatacctgatctctgcaggaggtttctatcctagggagcttccaaggagaagggcagggagagctttggactcccggaccttgtgttcaattccctcagttctggtgtggccttgggaagttacttcacttctctgagcccatttcctctctgtaaagtaggataattatagccctgtcagaaggtggggttaagttaggtcgtttacagaaagtgcctggctccaaacaggttcccagtagaggcttcttgacaattgtctatggacaacttctctttttagccagctgtgtaggttagctcagcaccttgggaaactggagcaagcctgattggggtcggtgcgcagagcagcagcagcaagctgggaatctctaacccacaaactttccatggaggtctggcccatgggggcgaccagggaacggaaaaccagctgggactatctgtccaactgcaggctttggcgcctgaggtctcagccgaaaggggctcggtttcctctcccagattatgcaaacaacaacagacctgtgtgagctcggggcggcaggggaacggggaggaaaatattagccctgaaagaattctgttttggtggggttttgcttcaggagaacttcctgactgcttgcaaagccatgctgtctgtgtgcttggttctccctcccacccccacccgctgccgctctgcctccttgggaactggccttcccgtgggaagttcttcccagtgctcactctctagctctgtcctgcctgctcaaggactagggtgtctcctgacaggagagcaagggagacaaccaaggagagaacaagacaaggcagttagaagagcaggcctctcagcttcttggttcctggctctggtattccagatggctcctctgtcctccagtgactctgcccttggcttcccactactttcccaccttgccctgtggtctcacggatgcttagtatagtcagcctggcttccttgccacgcccccagctcagctgatctgggacccggttaagatgaatgtgtacctagtagtgtggtgctcagtaccatgtactaggtgcaccaggacctgagccctgactgttatacacactgaaggtcctgggccacaagaccctcactggctcagctccctgctaaatggaaggagggaaaaggagtgggaagagggttgtcccagctggctgacttttgggtggatctggagttggagggtagagagagcagtggctgcaggattgggggcccagacttgacttcattactgtaacaatatgcttgtaagcactgtgggtccttttcttttcccctccccatcatagtttctctgtgaagtaaggattcagctagctcgttgagttccctcttctctgataccccgccagagggaaccgtcagggctcctaggagaagtgttcatagccagtcttcatattaccctgcttccaggttgggatatagaggctgagggctggctaggctgtcccagagcctggatttaacactctactctctcttctaccagttagtgatattcaggttgggtgcagaggagctcccaagagactaagctgtgtgcagatctggcttcctggggccgagaccatgtctgcctgttgataatgggacagtcacataagagctaagggtaggtgacccaggcagcgctgcacaggcaaggtcgtcatggacatgagagcctatgaggttggttggcatggaggatgtgtccctgtactggattcccttggtagaccacagccgtaagtgggtttcacagtggccactgggaatcctggagctgctgagatggaaggaaatggctaattgacaggagccctcaaggcacatggctcagggcttagacttctttccaggcaccatggagtctttgtactgtcccccatccccacccccaccccgacacccctgctttcctgagataggttccatattctaccaaactccagtgccccttctgtagcagccaaaggagtcagctgtgggacccagtgttttgaagctggggccattgtttcctggcctctcctatatgcgcactactgcagcaagtgaggctattaagagatgcattagggagttagctggagtgtctggtggcagaagggtctctaattaaccctggcatgagactcataggtttcttctcactttcaagtcaatatgaatgcagagatcgatttaggggaccataaaggtattaaacaaagaaagcatccagacttctggacaggctgtggctggcaagttatactccctggcagggcacaatccaccttctccctgggaccaaggactcccttgtgacttgtttgctagggtcaacctctgttagtcacccatattcccagaactctgtagggagcgtggcatgtatcaggtgactgttaggtgcttgtttttgcagacaatgaagaactaaaaggagaccagggtgttgccttagcctgggagctggggtgtctcctcctccagagctcaggctggtggtcactcctgtggtgccccctcctgccagcttctcccagtgttcatcgggactgagtggtgatgtgatgagaacaggcagagaactggtgctaacaattgggacatctccggtcagcggggacccattgtggtctcttcctgtcacggctgtctgccgcttctactactctttgtgtttctgcctcccaggcggccaagcatcacgcccacagtgtgtctttctggccttgcctgttcttaggcatgacctggaaatgtctatctgactcatgggctctccaggcacattgggggagccaggatcccagcttggaaactcagctgctttggccccagctgctgaaatgctcgcttgacatttctgagctgtcctccatgtctgccccagtgctggccactgcagtgagaactgtggaagaggcctgtccactctggagctcctagccaggtggaatcacagaaagcccgtgtcagggcagaagtatcataatagaggatctggaagcctgacttccagatatgggggtagcgtccttcctgagttcaaatctcagccctgcctcttcgtgctcatgcactttgttgtccgtctgcctttgtatgtggagaacagagacaagagctcttttggcctgcccccactagtaaagaaggcttgctgaatctcaaagcagcagtaagatgtgctctgggtaaatgatcggccggcaggcacaggccaggaagtcttctctgggctccacctagcccatggtcaggaagccttctgcatggtctgtgcactgcatggtgggatgcaaaggccacctctggatgcgttccaaaatggcagaggcagttagcatggttcaaggcaaacccataaatgttccgcctcagtgtccgtctcttccagcagggcagagcttctctctgcagtcttctccagagctccaggcagtcctccttggctccctcagctccaggcagtcctccctagtaccctcagctccaggcagtcctccctagtaccctcagctccaggcagtccaccctggctccctcagctgccccagtttgtcgttcttctatgaggctccgaatcatgctgagcacgacggctccccttccatgatgctgtcacactgctgccaacacaaggctgtgatggggaacagatgccagggagagtttgcagcaatccagcaaggttggagaggggaggtgtcaaagcacagagagcttgtcattcgtcaatggcttcctgacacaaggactgtctgacagtgtgtttccccaacctcagctcctatttccccaagtctcccatctcagtcctgctccatacttttagagcctccgctctccttactacctgctccccaaacccgggtttttttctattactttcttaggtagattgcagtgactctcccttagatgagggtctgctaggaaacatttcagtatgctttctttttcttttctttaaaaataatttatttttgttttatgtgccttggtattctacgtgcattggtatgtctgtgtgagggtgttggatcctctggaactggagttacagacagttgcgagctgccatgtgggtgttgggaattgaacccaggtcctctggaagagcagccagtgctatgaaaactgctgagccatctctccaacccctccatatgttttcttaagcaaaataaactcttcccctcatctccatctcagcaatacaagggatcctcagagatgttggcctccattttcttaaaccccacagacatctgaggcagggtgctctcccccatcagcccggtgccaggtggggagaagacttagtcctagtccagagtggactcccatttattatggaacatattgttctgactctgcctggtggctcctgcactttgggaagtgtccactcccttgcttgaggagacctggcttcccctggtctctactccctatgtgtttagagctcagcttgatgtatatagtctgtgtttttaccttatagctaaaaccttctctttgggacagaccctgtttgatttgatagctcctttgccttaagtgtgctttgaagggagtcctactggagtgtggcgtttaagaggcatgctgtgcagaggtggagtgtgggccgtagagctgggttacagttccctgttactgcctggctgaatggtttcatccctgggtcccgcgttctcacgtgagccaggagccatggatgctgggagccccgcctctctgcctgttgtcaagagtgaatacagaaggaagtatctcccacggggctgccctcaagcccttgagctgactggctcaaatcactgtggtactccagggtccctgacacttcaagtgcttgctgtcacatgtgttgaatagttgctttcctcaaaagtgacaccttgcatggtaaggcctacaactggaagtgcagggaatttccaaccctcccaggcctgtgtccagatgagtgcttcatggagagtgtggccaagtcctgagggggggctgaagtgagcagggcaggtgtcctggtgctccttagcgcatctccatctccatgcctttggccatgctggacctgcctcccagagttgtcttccttcccatctggagttctctgtcaataagactcttccctcgaaggccagggaacagcccactgtccctccctgtctgttccagttgtaactggttgagtatgcaaacctggatcaggggtgaaacccttgtagagtgtcaccacgttggaaggatgtctctcccaggatgcacggagatgggattgaagggcctctctccttgacccgcacttcccttagtgaggaacgaggccccctcaagaatcaaatggcttcccgttgaatttcaaaatggcaaaggcagtagattgtttaagagaaaacccagagtgtgctgcctctgtgccttctaatgcaaggattctgggggaagaggaggccttctgggatgcagacagcttcctgcatttcatcattagccatcagagggtctcctttccggggatgccgttccagcatttcctgggtcaggctgacctgtaggcaaaagcctctcaactgtatatcacctggagttagtgagccgctccgacgcctaccctctcctccctcttgttccgggaggcaccacacacaacctcctgggcaagagagctagctagctgtgcccagcgatgctttgactctgttgctgatcctaatgtgaatctccttttctgttcttatcaaaggctcttcagaagacttgaaattctgtgtgctgtacctggcagaggtgagtcactctctctggattggagcagagtaaagtgtgacctggtactcaggataccaggcttaagggttggcctccatatactcttacagtgacctaagacaaacgtcagggcagtttcttgctctgtagaacacagctgaccctgctcttacatctgtgtgagaggacagctgaacagatggttttcgggatggcccctgagataccctgcctggtacctccggtgtccctgcacctgtaagtgtcctgagggcgtggcctggcagctgcacactaccctgtttatttatttagtagccttcctcctggagattgtccagctcccacgcctgcctctttcatcctctttttccaggaagtaccacccaccaccccctcctactaaggcttgtctgtgtttcaaaggcccaaggtaattgttccttcacctgagccagacaatgcaggctaaagcaagcaccgtgcatccgtgtttggctcagagtgatgcccaggagagtgactgatacacttggtgatctctgacaaggcttaggcaggctgtacctttcaggaccaaagccaagcaaacggctttttgctagatgtggtttggtaggtagaccagggcttttaacgagaaaggtcctcggtgatgaagaatttgagagcctcagagtcatctgaactcttttcagattccagtgtagtttttttttttttatccccagccttgctctgctgacacatggcatctctccaagcaaggcccaccccgccctttgatgtcttctgtcttgccagccgacctgggagcctgtctatatggatggggaaatgacctaaagggctggctgagagggatatacctttctgagaaggagtctgtgtcctttgggatttaaaaacattccttcagttcctggctaagataagaggtctatacctttggacaccaaggacaagagggtgtgctgagaacttcactgtagcggggggtacgctgagggtttgccaagaggcagtagaagatgtcataacagaactggggactcaggtgcttgaaaggagacctatgttaggagcagtggatgccccccccacccccaccccagccccgtgtcacccataacccagcctgggcacagggaggctggtaaactcccttcagtattagagtgtgtttgactccacagagccaatgagtgaagtataaaagggagttgtggggacagggctgggcccccgagcccctctagcttcccatatgctccatcaacttctaaaatggggctccaggctctccaacagcaagagagctttctgccagactggtgttttgctttcctggagaaaagcccttctgcccattgagcctgagaccttctttctagtcttctaaagactggcaaagggctattgatccaaggccttgaattgccggaaagcaccaggtgatccgaccccgagagagcaggagagtgcagctgggagcctctcatcttaatgagctgctactaaggaagggcaagcccatggttcagggaagaccacacagctcacttgttcctagacctgagccttccagacaccttgacacaagtggtgttgggccccaaggagattccaaccaaatctttgaatctccactgagtagtttattcttcattgcctggtttgcaagtggcaagaagaaagaagaaatctggggaggatttaaggtttagagagggtccccccaccccctgcattcagaaagccacaactgacctgggttggtcctgggtaggatcaccctaagcagtcttttctgtttgtttttcaagaaaggatttctctgtgtagccctggctgtcttagaacttgctctgtagaccaggatggtttccgcttagagtactgggattaaaggtgggaaccaccacaatttctggcctgctctaaagcagtcttaatcccaaggacaggtgtccctcagtccttgcaaatctgggaccgatgcagcccacagctggcttcagagcacgtagcacattgtttgggagccattctttctctcttgtaatgtggggctgacagcattcactgaagaggctggtttgggtaatgaggaggacgtagatttgcatcttggctctgccattccttgagggatcaggggccggtgatatactcctgacataggcagtaaggtcttacttgaagggtttggagtgagcttcaataagacaatgcatctaaaacacttagctctgagcccagctctgagcatgctcagtgagtggcagctcactgagcatgctccagtcattagattagagcaggaagaagggctttttcacattcacttaccctccattagaggtttcagcatgattcacttgtcttttaaaaggacagccagagaacactctcacttcccaagtgacatagctacgtggttatacagacctgacaagatcataggttctggcctcagtcaggatctcctttagatctgacctctcagagtcttagtgatctcgtaggaaaaatggtggcagcaaggtctttccacctccctgtctcctcagttcatagggagagaacgagatggaatatgcttgtcacggcaaatgaacaggctcccgctattgctgaagctgtttgggtttttacaaagataaacttaatccaggagcaaggaggttaggttttaaagaggctaagaggagctttgagtctggttggatttgaggtcacggtcaagtatcggctccctcacctagtgctgtgggctcaggtttatgcaaccaagaagtctgagcatggttgagcactccacagtcagaagccagtgcctttgaagggacagcataaaggtccttttaggatggcttatagccttgaccctggagtctgctattgatgccatgttagatgccacgttagaactggaactgactaactgggtcatttggagcacacacggaattatgacagatggttcacatgtggggccagctgggcaggcaatgaggactcacagtttggacagatttggacaggtaaggatttagcctctcttcagggagctggcgctctctcccttggctaagccagtcttggaaactcaggctccttccaaaaatgtttgtccatctaagacagagccccacccggggttaggtcctgggtgccgagggaggcttctaggttctcaaccattgtgtggccggtggttttagtttcaagctgtcaggtgcagtcttgccctttgccactgaaactgacagtgaggtcacccagccctgatcctggaacaccactctccaaaggagattccaatgggggtggggggaggggctctgggctcagttgctggctgccatatgaattctatgtaatcattacaaatggcctggtggctcaggggaaagcttcaggccctttctgggaagtggtttttgagggtatcagaaaaatagaatgaccacgggagctcccttgtaaggctattggaaggaataccaaggtatggctggtaacaagcttggtgctatggaggtcagctcaggactaggcaggcatagggaggctggctgttccaagaggctttcttgcgcctttgtagggagagtattgccatgttgaagcagtaaacagttatacgaaaaggtgttagtgaccgtcaccactagagagccctctgacctacaaacagttccttccgatggcatggcactcctttggcctccaggctgtgagacagagcaaaggggtgtagaagcctcaccaggagatgacatctcccagagctcggagatgaaatcgcagcgggtagctccttctggctcagtgtttctttctgcgtcattggctgcagactcagagaagtacttggctactctgaaccttgcttttccccttccataaaggggaataacagtccacaccccaactaggcatggaagtgcatgtctatagtccagaggtaggaggaagatgacatgttcctgggcaacctggactgcacagtgagttccaggccagcctgagctaaaggatcaagagatcctcctcccccccccaaaaaaaaaggctgggggaggggggctggagagatggcttagcggttaagagcactgggtgttcttccagaggtcatgagttcaattcccagcaaccactcggtggctcacaaccatctgtaatgggatctgatgttctcttctgatgtagcagtgatagcatactcatacataaaatcaatcaatcaatcaatcaatcaatcaatcaatcttcttttaacaaatgaagagccgggagtagagtgcttgcttatcacgcacacgaacttgagtttgattctcagctccacagtactaagaatgaagaatccatgctctcattgcttctttgtgaagtctcctagatcaaaacgagctcacagatgacaggatagattaaaagttgatcagttcggtggaggatgttcagaagcccacacagtgaggcaagagcagggccaggaggctcgggctgggctgtgtttataaagcaatgacatttccaagctggaaaggaccttctcagtctactccacccccaggggaaaacagaatacaggaagcagagggcccactgctcgctgggattacccctggggaatctcgaggctctgtttgcccagtagcaggtaggagtggagggacctgccttttaagtggacatgtgggcttgccactgctcatcctcccagccccctctccctcgtgcttataggaagaaagcttctgttattttgcagcacgagaggagggcaagcactctggggacatagcaagggaagtgacttgctctgaagggcggcggctctgagagttagatgctgagaaataacagtactactgtgtgctgaggcttgtaacagtactactatgtgctgaggcctgtggcagtccttattgctttatagctccagggtggacacagtgccactcttttatagaaagcttctggctttctaggggttggcagctaggaagtggcaaagctggcattcaaaccaggtctgcaaaatggagagacggggccgatacacacccagcctatgctcttagctgagtattctcaccagcggggtgaagaagaacttgccgtcttctgagtccaatccctggtggggattggggagggggacaacaggtctctgaagacctgtgctcttggacctgccccatcctgccccatgaatgtcctgactgtttcagggctgactgcctggtgcagtatcaaagcttccttgagcctattgtcatcacagaggccttcccaggctgccagagctcactaagtctccccactgtgctaggcccagatgaagagggccctctacgtgtttgtcatcagcaagattcaaatgacaaccagactaatattgcacagcagctaatgagagacccagctcaggtgctgggtagtgttagggctgtagggaagtcggtgactgcccgtactacactttggcaagggactctaggtccatctctatgtccatccaactcagctaaccttggcctgtgatctgaagaggagactgtgagagagatgggggcttcatggtctggagggagagtcctgtatccacagggagtgccagcccaagggcttggtcctttggcttcttcacatgatccccagcagctgcctggtgctgcctgctccaagggtgacctcaccctctgtcctatagctctccacaggcttctactgtgtagagagccactgcctcccttccctacccaaacggtggcctcgtggctcccagatggccttacttccctgctcctctgactaccttgatgtcaccagggactggtatgcatttgttgttcttagccgatgctctcgtccctactgcagcctcgccctctggagcctaggggatgggcttgggccctggagccccttgagtcagggagcagccctgaccatccattcctttctctattctccctgacgtcagaaggcagagtgcttattcactttggaggcacactcgcaggagcagaagaagagagtgtgctggtgcctgtcggagaacatcgccaagcagcaacagctggccgcaccacctacagagaggaaggtaaggactctgccagcggttgctgccctggttttctttcacctttccccctctgctagcctagcgtttaagccttggatctgagctgggagccatcccgagcttagcccctggacctgggcagtggggcttggccagaggtctgtgtctggatgtctcttctcaggtttttctatgggtctgtggaatgagtttggcattgctcgcaggggaagccgcagccaaattgagcatggctcatcaattttcagctcccctctttggtttgccaatggcaaggtttaactgccgcctctgctgttggatagtctgtatccagaggcagcacgcccgctgttaacactagcccaaagtagacataatcaaggggatgtttgtggtagaacacagtagtttgatgcttgccagagccaggtggaactgctttggattgcagaggcctggggctggccatctggaatatcagggagattgaatatggcaagtaaagttgaactgggaccagtacacaactggaccaggggagtagatgaggtgggagcctgacaaaggccttctcctttgatattcagatgcccgtcacaaggcacacttatttgcctgtcgtgaatcattcaggtgtcctttcttactgtaaatgttggccatttggtatttagagtggaggctgcaaaagctgccaggttggtagctctgccagctctcggggaagaggaaacaagaggggccttgtagcttgccaacctgtgggccttgttgctgtttgatatgttcgagctactgagacatgtgcccctggcttgcagagggggcagtaaccacgtggaagtggtactgacggcctctttcagaagaggacagccattttccagcaaactggcaagggagtgagggtgggtgagagaactgcaacagcctagactttgcaaggtgccttgttttaaggggagagtctgagtcacacactgctgcttatggccagtgtaactgtgggtgtgcccccttattgccccgtgctttgatgactccatcagtagttcctcccttaagggttgctgtgagcattaaatgggggaacatatacagtcatggtatagcaccaagtatgtaccaggtgctcattcaacaaacactaagtggaatacactgttcccccaaccttatcccaggtggcactagagctggtccccatcgtcacaaacctccatcaccgtgactatagataggctgctgtaaccctattggtctttgctggctgcagttaaaatgtaggccacttccccttcattgggacaggtccccaggacacccacagccagcacccatgttactgttccataggctttgttcctcttctctggggggaagagttctttgtgatttgactccaggatgttctggctctgaagagtgttagccactcaacacctgccttggagactctctggctcaggctcttaaagacatgctgtatttcagagaggctctgagccctgcacagcttagttgactgaccctgagtggttccagtccctgactcaccccaatgcatggacatcctgggcaggcaacagtctagacaccttgtcacaccagcactgagtgtgctattagaggagtggctgtcgggggtgcacgggcaggtggaggaggctctggttgctaaggtagctttggaggtgtgttctgtggctgagacatgggatctgcccagacttacatatctccactctcctggggagcggttactgagcccctccaggtgtgtgtgtgtgtgtgtgtgtgtgtgtgtgtgtgtgtgtgtcttgcttctcaaccctactcagccacacctccaccatacccacttaaggaattttaacaacgaatctcatgagtcacttacagaatgcttcttgaaaggagtactggtaaatctgatgctgtccagctgtctggactgtctatcagtccagacaggctttgaaaactttaatgactgggcccaccttctcatccacctgtactcagcctcagggtgactacaaatgtcctttctgagggatggcctttggaaagcctggccacgaaaggtactgtcctccagaggaggggcaggaaagccaagcgggcctgggaagctgactcttacttcttctaggcatgaaagctatgctgggcccttgctgggatgccatgccttcctcctctctctgtgaacactgcctcctgtggagctgaggacacagtacttagttaggcaactgccccattccaagacctctccagggacagaaaggcacacagagcaacagtcagatacagtctctcgctcctctccatcatgaacgcagaccctttacagtttgtcctcagaagggctgatgatgcctcctggaggacacaggggatggagaaggtgccccgtagagaacagcagtcaggtgtgtggcactgcctgcagcacagcctatggcaaccactcccagccatcacctgcttggtctcttctgctctgtgatcctaagagcccagggactgggactaaccacctctcttagaaaaatacactctggagagttctgcccaactttctgtgacataggtgggaagggaggagcaggtctgtggctcttggcaacatagagatcctatgttggtgtgtgtgttgtttcattcaactgtgggtgtctttgtgtgcaggtcagacgtctatgttagggtgtcttcttcggttgcttttcatcttagttttagagctagggtttcccactgattacactaggccagctagccagtgggttcccaggatctgcttgtcttggcctgtctagcactgggattacaggaatgtgacactatacttggctttttacatggctgttgggttcccaaactcagatatccctatgtttgtgcagcaagcacattgcctaccaagccatcttctccagcctgcgccttcacccttctgagacagggttgcacgtagcctaggctggcttcaagctccatatgttgctgaggatgaccttgacctttgggtcacatctgccccagccttccaagtgctaggattacagatgccaaccactatactcagtttatacagttctgggaattgaacccagggctttgtgtgtgccaaggaagtactctatctaccaagtccatcctcagctctcagtaggttctcttctgtgggaacaaatgatctgcctcctgttctattgcagcttctttttcctgctcagcacccaggcttcttctttagagctctgcccttctcttgcttcattatatgcccccggggagcatcgtcctttcttctgcctttgataatgtggactaggctccctgtgctacacacccagcttaactgtgatgcttctcattagatttgctcagagctggcccctgcggtggccagtgaggctcaaagctgccagggactggctgatctatatcgttttgattatttgatcaagtacacatgatggatgtgtcctcggtgtctgacgctgctttagattctttggggttacagagatgaatgacaccccatcctggtccttatagacttctaattggatgatgggggcgctgagatggtgatccgagcaatgggagccacacttgtggcagttgtccatgggggtcctgactgtccattcagagtcagcactgacggatcactcatgcaggtgcttctgggccaggctccagaaccttctgaacaagagtagttttgtttcagccctcaggggcctgaggaccaactccattctcaagtggatcctgggctccatgggctttatggagaaagccatcacagcctctcctttgtgaaccagggatggcaacagatagttcagaatgaccgcacagacttgatattgggagaacttggggctgtgcaggatgcagcagcacacaggaggtccccagtgaactacctgctataactttcatcgttgtcttttagcatgactgtgtaggacaatttactggtatccctgtttactgaggtcaacactggtacccaagcgcatctaacaactatttccagatatcctagtagccacatgccagatttcagggccctggaagggaaactgaggcctcttccagacgtgacactgccttgcgacagctagagataaatctcagagatgccaggaactatttgagtgtcttagaaaggagcccagtcaggttgtggactcaggcagtcctgatcagagtggacagcgagctaattccagttctgtctggttccacagaaacttcacccttacggctctctccagcaggagatggggccagtcacctccatcagtgccacccaggatagaagctttacctcatcaggacagaccctgattggctgagcaagtccaagggcaggactatgcttctggcaactctggggcttcccctatcacacagtaacctcatctcaactggacccaaaacagaagaccaagatggtgggcctagggtcacctggagggagtggtcccaagggtgtgtgtggacctggcaacaggaggaacagtggtatgagggaccctgtgggtttgtgcagactggtaccaggaagtcctggatggagaagacgccaaaacaggaggctaagtggcacctgggcaccttcctgggcacagcaggaaagagggagagggcactcgaacggaagatggtgcctgtgacccattcctgctggaagacatctctccttcccactcctatttcaaatggacacatttacttcctcagtcagtgggtactgggggacatctcctttgtgctagggtgtgtgctagaagatgctgtgctcccatcaagatcccagccctccccgtcccaacagggagagaacaccaaataaatcaacactgatacacacatacactgcaagggtctgtacagaaacatcacagatgtcttcagacagggcattatgtctccttgctacgtgtgggctatgaaggggaaccatacagcttgagctggagaggagctagccagccaaggactttgaagagagcgttccaggcagtggaagaagcttgaggaaaggtgtcacagactcctcccggtgcatatctacaagatcagattgcagttaggaggggcccaagtggctgtgagactggttagggctccccttcaggcctccagggtgaggggtgatggtggtttgttctagagggcgctgcgatggtaggtattggaagggtaggctctgggataaggagtgatgctagctcacccttgcctgccctcgtgctccgttgggtcttgctatcttggtggcgtgaggtttgaggcctccctcctagggattcctctactcagaccagagttgagcttttgggaatgcccatgagcaccgaaacagtaaagcttaattttcccaagatgggaaagttcatgtctcccctgcttccaggctccgtagagatcacctgtatctgctctacctgtcatgctaagagaaggaagctagggccttgcactctgagaactcccgttttttgctttctgtagggcttctaaggagcagcagccggtggccaggaccaagtgtagctcagcaacctttacagagacaacatgaaaggaatcttgcccaggtccagtaatgagagctgggtccactcccatgctctgggctaggtagctcacccttttctaactgtagagacccagcaggacagaatctcaaggctgtggattggaaggacgagggccatatgctagagagtatttgtcgggttaggtactgagcacgcagaggcagaaagctgcagtgatggctaaggccagagaagccccagacctgagtcttaagtaccttaaggacgattcttgtgctcttttgagtttgctaaactaccagagccacctgagcccctaaatggtggcccaggagagtgcatgtcccttattttccttccaactttggaaaaatgagccatgctgagttatcagtctaacagggaatggggtgactctgcaggaatcaggctaacacccagcccagcaaggaaagattggcttggttcaagggttgtgtagcaccacactgccagccagtgatcagcccacggggtaaatccgaacagccgggtctgtgcagacagcaaaccacactttgatttcacttgattctctcacctaatgattgatcgtgaggtcatgaagcccaggaggaccacctgcgtgggaaatcagctatcttgtttcgcttgcatctgggcacagacctctgtccaacagatgggcacagaagacaagaagaggatctgaacataacacccaccccggggacgagccgttctccctgatcagcaacttctgagtggaacagattctcccatcaagctcccaggcctactggctgatggggaagaggaaggtactcctggcaagtcctgggctagcttgctccatgactgtggtgagccacggcaccatggccatcttgcttcataaatcaatgtgacaattaatttggtgtcgtgggcccgagaggatgaaatatgacccggtggcctccgctcttcagtccatcccagctgttcaagaggaggaggagctctcagcgtggcctctgagagtcataatcacgggaaccacgccggccccctccctgccacataaatcacgctaagaagcacacaacgacttctttcctgatgggctaattgtcttgggtggtgtctccggccccaggagcggggaggtcgggagcacagccactttattgttgaaaggccatctgtgagatttgaatacaaagtgcctctttgagtctcctacccgttctgggatcccatttctgtgtctcccactctgagtcctttgaagctcatctctcatagaagccctcattgcctgagtcctttggccctttgggagctggaattatacagaccttctgagaatggtgattcttatttgtacatgtcttattattattactattataataataattattattattaatttcccctccgactcctgtcatcaagacccttactaatcacagtcaactccaaggcaccaagaaggttctccacagtacaggcacgggcagctttgccacgtggatgcattccttcagtgagaaccctgcagggagcatgcgctttggagagggcaggggggtcccgccgagcttagactcccctaaacagacacatcttacgaacaaaacagtaaaggcttctgaagcattaggtgactgaacctgtggtggctcagctggtgagagacccagtcctttgtcctgtgtggatgcaaaggtgttttgagggacagaaggaagaaaagtcacccatgagcctccaggagaggcaggagacaatgatggctgtctcagacatcttggtctcttccacggaggaagcatgctttggagacagattaagtgaggagcgatagttttcctaagtggtggcccaggttgaaaacaaacaagcaaacaaacaaaaccagaaaaacctatttccacaggatttgacaaaagtctgccgtgaaaggcagagatgctctccggcggcggcaagctccctggaggaccttccccttctcagtctggctttcagcaggatcattggtcaccgtcatgggggcaccctggcagtaaaggaatgatgacagaggcagggaagagtagcttaggctcgggcctgctagtctgagcataggtacagaatatagagacttaacccaaatgcagtgaagagggctcccctctgccaggatctgagcctgggttttgctaatccactgggtttagaccaacagatctaagtaactgggaaccgaagggatcagatttcagcccccctcctcccactccctctccgcagagcattcttttccccagctccactgcttttctggctgcctccagacctcctgccctccctccctccactgctggccaggctgagggcagactgctttatgttaggactcggccatctttcttctcttttttttaactcttaaggaacagagaacaacctgcctctgtgctctgtcttactttccttttgctccaagctagtctctagaaaggctgccactccccagccattgagtgttggatgatctgccagacactcctgtgtgagccaggcatggcttctaactcctgcccttcgctttctctttgaccttcactagagcctgatgtggtatggtatccccttaagaatagactcctgctctacctagtttgtaggtactggatcttcaaaaggttaaacttgctgagatcacacagctaatgtctgcacacattagtgggtcaactgtttccttgcaaccacagaccattcattccagctgagaaggcctgacagggctgggtcatcagtgccttgttgaagggctctcccgaggtcacagcttgactctccatgctcttctggctccatgggtgggagtgtccctcccaaaagttcttgtgacttcccatgggcaggctgttccttgacaccattgttcactttcaatgtccctggcggctgcagtccctagggagaccagggcttagcacctctttgacacaccctttctgaggtgtgcctcagagatggctgtccccgcccacactgtgcttgccagaggagtgtgttccatgcctattagcatggtgaaccaggcagtaaggtctgccacaccggaaagcctgcaagctccttaggggcaagcggaggccataccttatttcatgttgcatggctcataggagatgctctgtagcggtcagaggcctgaattcaactgatgggcgggtccctccttctattctataatagagaagaagaaacaggatcacaaagaggaagtggcttttttttgcccagggccatgagccctgggaccagagctgaggtttggttcagaggttttactcttgcttcagaggctatgcagataccagcaggcccacacccggcttaatctatgatgcaatctggccagggttaaaccctatctccacgctcatgcaggcatcctcagagggaagaaaacctgatcataacaccctggttctctaagtctgagggtacccctctccacacacacacacacacacacacacacacacacacacacacacacacacacacctgcctctgagaaaaccagggtagggattcagaagccctggtcttgagtagtgacttatctagtacttgctgtgtgaccttgaacaaatcacttcacttttctgatcatctgtttccttacacacacacgcacacacacgcacacacacacaaagtggggggtggggggagctgaatacaggtagtctccagggtcagggtcaccagagtgcagaatactaggaaatgaccataaagactggcatacagtagttatacccttcaaaaagcaggaaccaactcaggttccttatcacagtcattgtgcctggaatacccacacccagactcttgacactggaattaccgaagattgggctggggtcagcagcacctcgtgactcagggaattggttaaaggaagaaagaaggcagatgtcttagatttcacagaccagtcctattggctcatagcagaaggaatcccaattacagacacctatgtgagaaaccctttcttaccttcctccccactccaaggttcctcattccggctgccctgggaagcagctctgttgtttccccttccctctccagccctctgccctccactgcactgggctcagcgtgccctggtctgttgcttggcttcatgcatgtttgcgcgcaggtgtattcttcaaccagccctcttgcccgccgagcctcaggctggctttcaaggagagctgggtcagtcgatctgactgacctctttcagtttccagtgtgctctgcagaccctgtcagaggctgccgggtggtggctctccattactgttgctatctgtcactcattgctcagacatagcaactaaagatagatttttctattgagggttctttcacacactagcacttccctacttgggatcagtgccattattgcaagaaaacagtattctagtggtctttctggctggagcattaagggttgtgtgggctagccttggaggtggaccaccacatatggcagtcttaaatggtaaatgtattctgagactcaccttcaactcccagaagcctttaggaacataatccaacatatgtatatcttaaagtggagaatatagtgtatagtatgctgagtaagtggggttttggtcaaaccataggatccttgaatgtaaaaccaaaagccccctttgtcctccagggagagcaacagttgaacaagccgatttgtagagaacaagaccaggataggtgctagaacttaggcacatagttggtggcttgaaggtctgcagaggggattcaatggtcttagagcacagagctcttttcactcagcaattgcaggaccattagaaagccccctaacctgggccataatggagagggagcagcttgccccgttggtacttgggctgatggtgcgggggtgggggagggggattatctagtcagcaggcatgtctacacattccgggcacgttctggctggaagggaatgaatgagctgcagtgttttacctggagcctggccgcatgcagtgtggtgggggctggtagagccactctgcttcctgtggactgttctaaaaatagcagcgggaacatggctgaggggaagaggagggggctccttgggagctgggtggggatgactcccctcttcctcttcctgtcaggccctctgtgaggaagtcccacagagtcacagaattgagatgtgggcaggtctgggagccctctgtcttcacctctcttccttgcctacactaccaggcctagagacctggagttaagaaaggactgtcctgtagccaccaagtctggggaggaggttccagaaggtaggctcttttccttcctgctctttcagaagctttgcttccttgggtgcacagggcctgggaactcctgggaccagatgtagtctgcctttgtgagagttgaatgtcaggtgaggagcccctagctagtgtatgtgtgtctagtgtgtcgcctgctccctgacatcagccagttggtcttcagcaccaaaccttcccttttctgatgttccttcctcactgacttgccctctgttcacttcctgtactgtctgcagaaagccagcctgaagaagagagggtcttaatgctctggcactttctctgcccttcctagggacaggcaggggcagccgagggactggcagggctgtaaaatgagacaagatgtagcctgcatcctctctgccctatgaagatggaagcgtgtaggacctttctcacagagcttaaggagaagtaggctgcctgacagtcaggcagtggttttggttgccttcatcccagcacttgggaggcagaggcaggcagatcttgttagaggccagcctggtctgccaagtgagttccaagacagccaattctatacagaaaccctgtctcgggaaaacaaacaaactaacaaacaaacaaaagacctaaaaccaaaaccaaaaccaaaaccaaagcaaaaatagccagcggagaattaggttcccagcaaggaaagcaactgtggagaaaattagtgacccaggacagactctccatatcgaccacagaggcagagcgaggctactattatcttagcgcagttgattttgctgttgttgtgaagaattataattcttgtcattgacatctgttatggagaaaacattaaatacagatgaaccaggaaaagacaaggctcaccatctgcagtgcccaaggttaactgctactaacattttggggtgtgtacggtcagagatgtgtttcccatgaatatttcttgtttgaaagttagggttatttccaggtgcagttttttggtttttggttttgttttttttattcttctctcatatatttcattcactgctgtagtttcctctccctcccctagtctccccacctcccccaaccctagacccaaccccttcacctcccctcagaaaagagcagggcttccaaggacaccaatcaaatatggcatcacaagctacaataataagaccagacacgtattcccacaccaaggctgaacaagacaacccagcaggaggaatagggttccaaaggcaggcagaagaatcagagacagccctgctcctactgttaggctgggtgaagttttaacatatgccctttcccatttaacagcggagtatacccatacttcccactaacaaatgatattctacagcaccacagttagggtatttcatttagaggtgaaacctgaatagccgagtcctctctgagcactagatgctcgtcacctcaagtctagaaacccctgagatacagagccttcggggcgcactgtggaagcccccagaatctagttcatgcctagtacgttgtctgactctcaataaatatttattgacaaagattttgttggaattcatttggggcagcgggatgtctgggtcaaagtgtgtggcctgtgaagtgggttctggctctggtagctgcgtcactcttccgaatggctgtacctactctaatgccacctcatcttctttgcccccagtctctctctctctctctgccacctaaatggaaccctcatcttctttgccttctctctccctctcccccttttcctccctcccctcccccctcccctccccctcctgctagggagcctgccttgtgcatactaggaacccccagtgtgagatttcccacttttaattgtttaagtcctacttcctaagaaacagacatcttagaagagaactactatttccctgcagcctcagtgaccctgtatattgttacattaaaaagattttttttagatttatttattttattttacatgcgcgcatgcatgttgcttgcgtgtatggacatgtacctacatgcatgcctcatgcttgcagagggcagaagagggtgttggatcttctagaagtggggttacagatggttatgaactgccgtgtgggtgctgggaaacagagccaagtctgctgtgatagcaacaagtgttcttaacttctgagtcattcctccagcccccattatattccattaaaaaaaaaaaggctctctttgattactggagttcctggacatgtatttacatgccctttggttacttaatcacctcttagggcagtagtctcctcaagtcctttgtccactttcttttccgatgtgttgtttatagttgaattgtttattcacaaagagccctttatataatatggatatttgcacactgcccttttcttggaagttctacaccttgactttagttcactagcattttgcctcactgatttcatttacatatctccgtgtcaggcaccatatcaatggtttgaaatagtttgctctcccttcctccaacccatcctaagcctgtcagctggcccaggattccctttgatttcctctgcagccccgagacgctgttgacattatttgcagccattactccctattgtcactaccttgaaagcaccagttctattgagttttaagtcgcccttagcccttggttatgtcatcaatcaggaaatctctaaacacttgtgacttccttgctggcccatttctgatggtactccatcttatccttgacttctgggctttcagtcactgtgcagagaactttcttgaagcattttcccaagtcagtggatattctactttcttggttctcataaggctggaaatgtttggccttatgcttcagtcagagcaagcttgactagaggacgctaggtcaacagtcttttcctctaagaacctccagcatactctttggtcttgtggtctttactgttgtacaaagggcactgttgacttgactctctcaaatcccctcgtgaaaacaaccagcatttctcttcccaatctttggaattcacagtgtccccagaattcaggcacttgttctccttggcaacaatcccccatactgactccccgaagccatttcagcctagacacccaacattttcattaaatatctttggaatggtgttctgtgttcaatttctacttcctgaaatctctactgcaagtaattaataataatgatgctaagtacacagcataccttccatctgctataatgtgtaatctgtcttgcactgttgtttttattccaactttattacttttttttttgaaattcaaagaagttttttttggtagtaagccaaacttgggaccagctcatttgtgtttctctgggtgaaaggttagagtaactctgttgtacccgttcccatcccacagagagcactgggctaggattgctattgatgtaaggaaggagagattcgttttgctcacagtttcagagggttcagtccatcgtggtggggaggggagggtagagagaaagtggggtgggggtgcggacaaagagaggaagtgggccagaagagagggaagaggctgttttcttattcctgtttacagttaagaaatgaaggggcagggaagttactgtactctcctccctgcctgttgaatcccaaccctcagaaccgagactgacccagtgctgcctagtgctgactctgcatcctatagggaaacatttgggagtctagattgacaggctgaattgctgagggatactgaggcctaaagaagagggatacatctgtcaaaagttctccggtgaatttagagttgggaatcatccattctttctgtctcaggctcctttctcaggcatcgtctccattcctgggactcctacgtggccttctgtcaaacctccctcatttcactcctgtccctgtggacatctctctaaatggcagccaagatgactctttctgatgaagcaatctagtcactttcttgttcctgaatgtttgttgggtgactgaatgaatgagcaaacacttttagagtgcctcgtgtgctaactaccagtgatgtatcagtcaggaaagtgacccaaacccactccataagctacagcttgcagatgggatcccctggatgatggaaggaagttttgtgtatggtgggttagactaaggaccttgaccaaacttcagttttaccctttcccctgcttggttctacctacttacctgttggctcactccctcagtggtggcagtaaagattccaggagagtcagtttttttgttttttgttttggtttggtttttttcgagacagggtttctctgtgtaactctggctgtcctggaactcactctgtagaccaggctggcctcgaactcagaaatctgcctgcctctgactcccgagtgctgggattaaaggcgtgcgccaccaacgcccggctgagagtcagattatgaccgtctggtttgactccttgatttcaacaacagtgctaggcccaagtcccgttggcccatgtgggatcatgtgctcatcccagtcactgaagaatgtaggttgggtgaacagattgtctgaggcctggctcacaggcccatctctggagtcatgtggatcaccagagttgagtatggatgtggcaagtggaggctctctgatgccaaagaagggtgaatggaagctggtcaggcagaccctcagccggcagccagcacagtcctcatcaccatagagaacagtcagtctagtatggtggaaggaaagttggaggagagacagacaccatccaaatctgaatagtatgcaaggaatcagcattggttgggacagagggctcctcaggagtatctggctagcctggtccaggatgttaggagaggaggcaggcacttggggtgtaagagggtgttctgtataaggaccttaaagcaggctattgtagatgcaggaatgaggaagatgaagggagcacgagataaggctggagcagggtttggggtgaggctgtggtgccacccactccagccccgtgacaaggactttgaacttggttccaagggcagtggagctgctggggctgggtccgtgtggtagagagctcacagtggccacctgcggaaggaccgggagccttttggagctcttgtccttccacactgtcaaggagaggcgatggcagcttagtgcagagaggaggcactgtctcggataggaggtgagagagacctacgtgctttggtgactgatggatggatggaggggctagggagagggctaacgctggggactggcgtaggcccatgctgtacactgagccctgggcacagcagagagtgaggagttctaatgaccgacaagctttcaaggccaactggagtggtagtgtggagctcagttcatgagttctcccagaataaggcttgtttaaaccagagcctcttagaccctatgaggcagggcctttcccttctgtaggatgctcactggatgtgatgtgtcacacctggcctggcctggcctccattcagtgggatgtaccctcggagttcatgctcagatatggcaatgacagattgtcgtgggagtttttccaaaccctcctcagttttactacttaccccattgcaggccagtgagaagtcaggccaccatgcctttctgcagattaggttttgtgtgggctggcctagatcaagtccaggactcctcttggagacagagccattgatgctcagaggagggtgtcgccttcaattgggaaggcagcagtaaagttgtcctgttattgtagcctctcctctgctgaccttgtgtttggacagcctgagcacaaacctgattgtccaagcagtgggtaggcccccgggggagtgtggaaatgaactactcctggcagctagcttcagacgctccggtctcctgtttgctgagtctgcagctgaacacttcccaggaacccaggctgtcaggatacaacctgccccttagctggcagaagcagagtgggttaaggattgctccta

SEQ ID NO: 178 - DNA, 4692 bp, Mus musculus
gacacttcctgtcacccggggctttgggaagctgaactccagtaaaaccagcttccccgaagaatggactccatgcggaccatggccttttccctttgtaatctgctgccagccgtggaactgcactttgacatcttacactgatgcagaagaagactcagctctacctcagccttaaggtccagcttgccgggtccagctgagccgcagatagctgtccattttctctggctggatggagaggccacatcaggatgcttccttgtccaaaaaagatgcctgcacccagacttacccacctaggaggaggatcaggcatgcccaagtgcaggatgcaggtcaactgaagctgtccattgatgcccaggatcgggttctgctgctgcacatcatagaaggcaaaggcctgatgagcagggagcctggcatctgcgatccctatgtgaaggtttctttgatcccagaagacagccagctcccctgccagaccacacagatcattccagactgccgagacccagctttccacgagcacttcttctttcctgtcccagaggagggtgatcagaagcgtcttctggtgacagtgtggaaccgggccagtgagaccaggcagcatacgcttattggctgcatgagctttggggtgaggtctctcttgactccggacaaggagatcagtggctggtactatctgctaggggaggacctgggtcggaccaagcacctcaaggtggctaggcggcggctccagcccctgagagacatgctgttgagaatgccaggagagggggaccctgagaacggggagaaactccagatcaccatccggaggggcaaagacggctttggcttcaccatctgctgtgactctccggtccgagtccaggctgtggattctgggggcccggcagagagggcgggactgcagcagctggacacagtgctacaactgaatgagagacccgtggagcactggaaatgtgtggagctggcacatgagatccggagctgtcctagcgagatcatcctgctcgtgtggcgtgtggtcccccagatcaagccggggccagatggcggagtcttgcggcgggcctcctgcaagtccacacatgacctcctgtcaccccctaacaagagggagaagaactgtactcatggggccccagttcgtcctgagcagcgccacagctgccacctggtgtgtgacagctctgatggtctactgcttggtggctgggagcgctacactgaggtgggcaagcgcagtggccagcacaccctgcctgcactgtcccggaccaccacccctactgaccccaactacatcatcctggccccactgaatcctggaagccagttgctgcggcctgtgtaccaggaggatacaatccctgaagaaccggggactactactaaagggaaatcgtacaccggcctgggcaagaagtctcggctcatgaagacagtgcagaccatgaagggccacagtaactaccaagactgctcagccctgagaccgcacatcccgcattccagttacggcacctatgtcaccctggcccctaaagtcctggtgttccctgtctttgtgcagcccctagatctctgtaaccctgcccggactctcctgctgtcggaggagctgctgctgtatgaggggaggaacaagacttcccaggtgacactgtttgcctactcggacctgctgctgttcactaaggaggaggagccaggccgctgcgacgtcctgagaaatcccctctacctccagagcgtgaagctacaggagggctcttcagaagacttgaaattctgtgtgctgtacctggcagagaaggcagagtgcttattcactttggaggcacactcgcaggagcagaagaagagagtgtgctggtgcctgtcggagaacatcgccaagcagcaacagctggccgcaccacctacagagaggaagaaacttcacccttacggctctctccagcaggagatggggccagtcacctccatcagtgccacccaggatagaagctttacctcatcaggacagaccctgattggctgagcaagtccaagggcaggactatgcttctggcaactctggggcttcccctatcacacagtaacctcatctcaactggacccaaaacagaagaccaagatggtgggcctagggtcacctggagggagtggtcccaagggtgtgtgtggacctggcaacaggaggaacagtggtatgagggaccctgtgggtttgtgcagactggtaccaggaagtcctggatggagaagacgccaaaacaggaggctaagtggcacctgggcaccttcctgggcacagcaggaaagagggagagggcactcgaacggaagatggtgcctgtgacccattcctgctggaagacatctctccttcccactcctatttcaaatggacacatttacttcctcagtcagtgggtactgggggacatctcctttgtgctagggtgtgtgctagaagatgctgtgctcccatcaagatcccagccctccccgtcccaacagggagagaacaccaaataaatcaacactgatacacacatacactgcaagggtctgtacagaaacatcacagatgtcttcagacagggcattatgtctccttgctacgtgtgggctatgaaggggaaccatacagcttgagctggagaggagctagccagccaaggactttgaagagagcgttccaggcagtggaagaagcttgaggaaaggtgtcacagactcctcccggtgcatatctacaagatcagattgcagttaggaggggcccaagtggctgtgagactggttagggctccccttcaggcctccagggtgaggggtgatggtggtttgttctagagggcgctgcgatggtaggtattggaagggtaggctctgggataaggagtgatgctagctcacccttgcctgccctcgtgctccgttgggtcttgctatcttggtggcgtgaggtttgaggcctccctcctagggattcctctactcagaccagagttgagcttttgggaatgcccatgagcaccgaaacagtaaagcttaattttcccaagatgggaaagttcatgtctcccctgcttccaggctccgtagagatcacctgtatctgctctacctgtcatgctaagagaaggaagctagggccttgcactctgagaactcccgttttttgctttctgtagggcttctaaggagcagcagccggtggccaggaccaagtgtagctcagcaacctttacagagacaacatgaaaggaatcttgcccaggtccagtaatgagagctgggtccactcccatgctctgggctaggtagctcacccttttctaactgtagagacccagcaggacagaatctcaaggctgtggattggaaggacgagggccatatgctagagagtatttgtcgggttaggtactgagcacgcagaggcagaaagctgcagtgatggctaaggccagagaagccccagacctgagtcttaagtaccttaaggacgattcttgtgctcttttgagtttgctaaactaccagagccacctgagcccctaaatggtggcccaggagagtgcatgtcccttattttccttccaactttggaaaaatgagccatgctgagttatcagtctaacagggaatggggtgactctgcaggaatcaggctaacacccagcccagcaaggaaagattggcttggttcaagggttgtgtagcaccacactgccagccagtgatcagcccacggggtaaatccgaacagccgggtctgtgcagacagcaaaccacactttgatttcacttgattctctcacctaatgattgatcgtgaggtcatgaagcccaggaggaccacctgcgtgggaaatcagctatcttgtttcgcttgcatctgggcacagacctctgtccaacagatgggcacagaagacaagaagaggatctgaacataacacccaccccggggacgagccgttctccctgatcagcaacttctgagtggaacagattctcccatcaagctcccaggcctactggctgatggggaagaggaaggtactcctggcaagtcctgggctagcttgctccatgactgtggtgagccacggcaccatggccatcttgcttcataaatcaatgtgacaattaatttggtgtcgtgggcccgagaggatgaaatatgacccggtggcctccgctcttcagtccatcccagctgttcaagaggaggaggagctctcagcgtggcctctgagagtcataatcacgggaaccacgccggccccctccctgccacataaatcacgctaagaagcacacaacgacttctttcctgatgggctaattgtcttgggtggtgtctccggccccaggagcggggaggtcgggagcacagccactttattgttgaaaggccatctgtgagatttgaatacaaagtgcctctttgagtctcctacccgttctgggatcccatttctgtgtctcccactctgagtcctttgaagctcatctctcatagaagccctcattgcctgagtcctttggccctttgggagctggaattatacagaccttctgagaatggtgattcttatttgtacatgtcttattattattactattataataataattattattatt

SEQ ID NO: 179 - protein, 610 aa, Mus musculus
MERPHQDASLSKKDACTQTYPPRRRIRHAQVQDAGQLKLSIDAQDRVLLLHIIEGKGLMSREPGICDPYVKVSLIPEDSQLPCQTTQIIPDCRDPAFHEHFFFPVPEEGDQKRLLVTVWNRASETRQHTLIGCMSFGVRSLLTPDKEISGWYYLLGEDLGRTKHLKVARRRLQPLRDMLLRMPGEGDPENGEKLQITIRRGKDGFGFTICCDSPVRVQAVDSGGPAERAGLQQLDTVLQLNERPVEHWKCVELAHEIRSCPSEIILLVWRVVPQIKPGPDGGVLRRASCKSTHDLLSPPNKREKNCTHGAPVRPEQRHSCHLVCDSSDGLLLGGWERYTEVGKRSGQHTLPALSRTTTPTDPNYIILAPLNPGSQLLRPVYQEDTIPEEPGTTTKGKSYTGLGKKSRLMKTVQTMKGHSNYQDCSALRPHIPHSSYGTYVTLAPKVLVFPVFVQPLDLCNPARTLLLSEELLLYEGRNKTSQVTLFAYSDLLLFTKEEEPGRCDVLRNPLYLQSVKLQEGSSEDLKFCVLYLAEKAECLFTLEAHSQEQKKRVCWCLSENIAKQQQLAAPPTERKKLHPYGSLQQEMGPVTSISATQDRSFTSSGQTLIG

SEQ ID NO: 180 - DNA, 153986 bp, Homo sapiens
atataatatactcattatatgattatataatataataaatatatatatcttccatgtctttacttcacatactctttttttatttttatttttaaacagggtcttgctctgtcacccaggctgtgatcatagctcactgcaacctcgaactcctgagttcaagccatcctctcatgtagctaggaccacagtcatgtgccaccatgcccagctaattttaaaagtttttgtaaagatggggtctaagttgctcaggctagtctcagactcctggcctcaagccatcctcctgcctcagctgctcaatgtgctaggattacaggtgtgagccaccatacctggcgtacttaacatgtcatttctcggttggtttctattgattttctccttattatggttcatatttttttctgcttctttgccatacctgttcactttttattagataccagatttaacaaattttgcctttttgggttctagatatttttatattcttacaagtattctttagcttgttctgggatgcagttaagttacttagaaacagtttgatcctagctgggtgcggtgcatgcctgtaatcccagcactttgggaggctgaggtgggtggatcacttgaggtcaggagtttgagaccagcctggccaacatggtgaaaccctgtctctactaaaaatacaaaacttagccaggtggggtggtgcacacctgtagtcccagctacttagcaggctgaggcataagaatcacttgaacctgggaggtggaggttgcagtgagctgagatcttgctactgcactccatcctgggcgacagagcgagacagtatcaaaaaaacaaaacaaaacaaaacaaaacaaaaaccaaaatcaaaaacagtttgatccttttgggtcttgcttttaaacttttttttttttttttttttttagatggacaagtacagcatttaatctagggttgattattccccacaactgagggaagacccttctgagtattctatctaatacctcctaaggaattagaaggtctttccactctggttgatgagcttaagaactattcctggccctgtgtgagctttaaagattgttccctgtaattctttggtggttctttccccagccttgggatactttcctcaaacccatgagctcattagcacttagctgaagttgtgagtggggactctctggagacctctggggccctctctttgtgtgactgtctcctctctggtactctgccttggaactctagctgccttggcctcccgaacttctcagttcagggatttggagttggcctgagttccctctcccttttggaaagtctctcccgggaataagctgggctgatcacagggcacagcttgtctcttttctgtttctcagggatcactgtccttcgttgcctgatgtacaatatcttaaaaaccattgtttcatatattttgtccagtcttttagttgtttcaggtgaagggaaaatccagttcctgttattccatcttggctggaaacagaagtctatattgttttttaattttgaaaaactgagggcctctggaatgtaggattatgccaggccaagttgctcattatcaggccaggaaaagcagctcttgaagaggctgaaagggcttccagcctaactgcgagggtgctgagtcattctagcagagaccaggcactctgcttttctggctcttatcaagtctttagcttttatctttggactcaacttactagttcacattcctttggtggtgaaggtttggtctcttccactttgaagcagtatctctccgcttacacttgaaatcttgaatcttttacttggttctctttagtccctgtttgtgtatttaggtcactagaggcttctacatctggggcacattaaagttcctcagtggtatttacagcaaccagcatctgtttctgtagagaacaattaacccaaagataccaccttgttctaccttgaagatgaattacagagacacttttaaaaggcaaatccttcatttcaagggtgaataaaataccacttaacaaagcattccagctggttaaatttaggacatgaaaaaaacctgacccaagaatatcgtctggctttgagtccagggtgtttttccttttagagtaaatttggtaccttttcattcatgtgaagttgttgccccccagcattttattctgggatgaaaggtcaacagggactgtcttgttgctaaatctaatggacacttctcagttattaaacctactggacctcttaacaatatttgacactgttgactattatttccttcttaatacatcccctgacttttccttcccctttcaggcctttcttcctctgcctgttttttcagttggtactactcttggttctgtcctgagctttctcacattaaacattccctgtgggctgtcttatgcatgctcatggcctcacagggaattcctaaatctatatttctagcctaagtattttttgctgagcttcagaccattatgttcaactgttcacttgacatcttcacttggatggcacatgggtcacccaaccttagcaggctcacagttgaactcatccattctcccctcagttcagccctgcctctcatgttcttcatttctgcaaagggcacttctaaacaatttctcaagccagaattccttgcattccatcttctactcaatcaccatggcctgttgattctatctctttccatccctattgccacttccctagtttggtcattgtcatcttttacctggatgaccagaaaagacttctaagagcaatttttgcttccgaccctcatgtcatgcaaacgcctccacccctaaccaatttgtttttttttttttcgtattctagccagagcaatctttctaaaatgtgaattaaaggctgttgggatcttgcttaaaatatttgacaactgctctatgctcttaaaataaagcccaatctccttataataaaatatgcagccctatatgatttatttattttttttttgagacagagtttcgcttttgtcttccagactggagtacaatgcgatgatctcagctcactgcaacctctgcctccgggttcaagccattctcctgcctcagcctcccgagtagctgggattacaggcatgcgccaccacactggctaattttgtattttagtagagatgggtttcaccatgttggccaggctggtctcaaactcctgaactcaggtgatccacctacctcagcctcccaaagtgctgggattacaggcgtgagtcaccgcgcctggccgaggccctgtatgatttggcccctgtttactttcttgcatattactgattccctcacgttctaagttccctgccacatttcccattgttcagttcctcaaacgtacaacgccccctctcactttctggcctttacatgttttgttctttctgcctgtaacccttccttcctctcctatacttggctaaatcatactgcaggtgattttctttgggcagtcttccttgaccccctttatcatcttggtttgcctagctccccagattaagtgaaatgttattctatgcttccagaggttgctgtgtttcctctattgtaatgcttacccaatctcccacttgactataaactccatctttttcactgctatatgtatccccagtgcccagttataaggctcagctccataggtgcttagcaaacacttgttgaattgaactttaatgtgtcagtagccacagaagtctcagtcctgctagaccgtagccttgccactttgagcaagaggactgctgggagagatggtattctataatggttctcttgctgggagctggatttttatttccccactgtttatttactagtttagcaacctgattcagttaacaactctgcatcttagttgcttcatatataaatacaaatgcttgaactttctgaaagcaaatggtgggccagatttttttttctttttcatttccttggttactagaaaacccaggtagcttttgaggcaatttctataagaccttcaagaaacagatgatgccaatgcaattttggctatttcagaacccaggaaaaaaatgaagatttgtcagtgctaggtaggaagctagacagagacaaaaaccaaataaggttagaaacaggaaactatagacaaaaggtcaaaggtaaaaatctcttcatagaccaatttgactgatgcctatagatgtaaaaatactaataaaatattagcaaatcaaatcccacagtgtatgcatgatcgagtcagtagagacggggtttcaccatgttgctcaggctggtctcaaactcctgacctcaagcgatccgcctgccttggcctcccaaagtcctgggattacaggcgtgagccactgtgcctggccaaattcatttttttagttaaaaacattttacatttttctggccatagaaaagtctttaactttaaaaattttcacccaaccatttgaaaatgtaaaatgcatccttagctcacctgttgtacaaaaacaggcagccagccagatttggttggtaggccatagtttgccaacccctgcactaatatgttcactaaatttgaaccatttttgcatctctaggataaataccaacttgatcatgaatatactgttggatttgatttgcttgtattttattagtatttttacatttatattcataagtcagattgggctatgtagaaatttcaaactagctgtggggtatagatgtattctatttagccttcataacattttaaaacattttgaatgagttattaatattaacaaattgggaaatattacatggattatttaagattgctggcttttctttaaaaaaaagtgacaaaactgggagaatgttggcctagtttcgccacattttaatagatctgctctattgtatattttctttcttttttctttttttgagacagagtcttgctctgttgtccaggctggagcacagtggcattatcttggcccactgcaacctctgcctcccgggttcaagtgattctcatgcctcagtctcccgagtagctaggactacaggcgcatgccaccacacctgactatcttttgtatttttagcaaacatgggtttcaccatattgatcaggctggtcttgaactcctgacctcaggtgatccatccatcttggtctcccaaagtgttgggatgacaggcatgagccactgcatccagcctctattgtatattttctatttaattaacttctattcttacttttatcttttacctttggtctatagttttctgtttctaaccttacttggtttttgtctttgtctagctttctacctagcgctgacacatctttgttttttcctatgttctgaaatagttaaaactacattagcatcatctgtttcttgaagatcttatagaattagcctcttaaaactatctggattttctataattttgtcgaatagagttttggtttccttttctattttatctatagttagtgatctattaaaaatttcaaactttttatcaattttactaattaatactttctagaaaatcatccagttcctttcagattttcaaatttatacaataaggttgcagtggttttctcttataatttaaaatattagccagcacggtggttcacgcctataatcccagcgctgtgggaggccaaggtgtacggttcacttgaggtcaggagttcgaaaccatcctggccaacatggtgaaaacctgtctctactaaaaatacaaaaattagctaggtgtggtggcgcgtgcctgtagtctcagctacttgggaggctgaggtatgagaatcgcttgaacctgggagtgagctgagattgtgccattgcactgcagcctgggtgacagagcgagattctgtttcaaaaaaaataaaaaaaaagaggccgggctcagtggctcacacctgtagtcccagcactttgggaggctgaggtgggcagatcacctgaggtcaggagtttgagaccagcctggctaacatggtgaaaccacctttctactaaaaatacaaaaaattagccgggcatggtagtgtacacctgtaatctcagctactcggaaggctgaggcaggagaattgcttgaaccttgggaggcggaggttgcagtgagcagagatcgcaccactgcactccagcctgggcaacaagagagaaactctctcaaaaaaaaaaaaaaaaatcacctgtatatcttggctttctcttccctaaacttgcttatttctggttttctgtatacattttgccagaggtctattttactgaacttttcagagacaaggctttggtcttattgttgaagtttatttttttgaggataaatttcacctttaaccttatttccttttaaaattttctcctggccaggcgcagtggctcatgcctgtaatcccagcactttgggaggttgagatgggcagatcgcaaggtcaggagatcgagaccatcctggctaacaggtaaaaccccgtctctactaaaaatacaaaaaattagccgggcgtgttggcgggtgcctgtagtcccagctactcggggggtgctgaggcaggagaatggcgtgaacccaggaggtggagctttcagtgagccgagattgcgccactgcactccagcctgagtgacagagtgagactccgtctccaaaaaaaaaaaaatttttttttcttctgaattagcttattcctcttctaactttttgaaatgaatttttagttaaaacactttaaatctttgttattttctaaataaattatccccttgaactttctactctaattccatcgatctgtcttttctttttagttttatattatttaacaccatttaacatctggtagtacaagttccctttgttattatttttctaagttttcttggttattattgggctagatgatatcttaaagtcactaagattctttgagagttattgtgaaaatgcacccaaataaatccatttagtcccttcttttcaaactcaagtattccttattattccagatatagtcagtctttaaaaaaatgcctaaaatcattgctcgatactttattaagtgcttcaaatcaatctgtatatatgcatatggtatatatgtagtgtatgtgttttgtgtgcatgtgtcagtgtgatgtgtgcttatatatatgcataggatgcatatataatgtgtggggtgtgtttgtatatgtatgtgaggtgtgtatgtagtgtgtttatgtatgtgtatatgtgcatatgatgtgactgtgtgtgtacatgggatatgttgaggtatgtgtatgtatgtgtgcagagtgtatgattgttatcgtgtgtggtatgataatgtatgtgtggagtgtgtgtgcacatgtgtgaggtggaagaaccccagggggtgctagaatgctcaggacatgtgagaaagccaggcttggtccaactctcctgccttcttggggaaagcagggccatgatcatgagcctttctggatgttgcttttggacagcagtgtgggttaatagggccagtctctcctgaagtgccctgcccaagctcccactcacctctctcctccatctcttgaggaaagggtgaccgacctgtccttttaggaaaaggaagcttccagcacgctactgagtaaaggagccttactggtggtggtgaaggtgataccatcagaggggccagctcaggatcaggctggccttgcaatcttccaactgaatatgttagctgcagagtggggcaggagtcaggaggggacctacaaagcagtagaatctttgttcccattaccgggtgtaagtgcccagtgtgggcctcggtcttttctctcctaggtcacattcagacagcacacctttgcccaattttctttctggatctcaccgtcctgagtgttgtacctgcaggttgctcacagcctctggagcccaagatagtctcccctttgggaggaggctctacagtggtccctggcgaagttgtgaagaggtgactatcatctcaggcacatcaccttcccttttccctgtgggccttcctttgctgtttcctgaacaccatgctttctagttcctactgggagtgaacacaccttgcatggagcatcttcaggccatggctaactcatgctcccatcttgctcctgcaggtctgccacgtctctgtgctcagtgtcctctctacatcctgtggcttgagcctgagcttgcccatattccctggctggatggagtggctaagccctgatatcgctctgcccagaagagatgagtggactcaaacttctccagccaggaagaggatcacgcatgccaaagtccagggtgcaggtaagtccatctgtcactggcttgaggctaggagagtggacctgctcttgttaaaggcagtgttcaccatgtgtgtgtgtaaccggggttggagggggagagtggggtggggtgggggggtgcagtaaagagcagggcaggacttcacgaagtgccaggattcaaacaatcctacggcatttatgtgatttatcaccagtttgctgattcagggctccttctgcagtttctgctcctcgctggtggccacctgaccctgtggcgtttgctccttccacctgctgttggccatggggcagatgtggaggccaaggaagaataggacaatggcgtttggggcagacaggcctgggttcaaatttcagctctgcctattcctagctctgcaaaccttgggcatgtcacctgtcttctctgcctgaggttcagatttcttcctggtaaattggggctaatacttattagacttaccgtgaagattaactgagatgatgtgtgtaaattgcccagctcagctcagcctctggcatctggtactcaacacataactcttctctccactttctgtcttgcatctccccatcttgtttttgagtggatcactgaaccacaaatatccacttggcgatgaagtctggggaacagggacaaataccaacacttcccatttttagatttacacgagactaacagctttccttcccacagtggcaacagagatttgcagagcagatgtcttggtgtgaaactgctacgaggaggtgtcctgtaaatgtttgctgacaaagcagcaaagcagggtttgaccttccagctctgcctccccgcaccaggctgggggattcacccaccccactccgtttcctgtgcgttcctctttctcagaggctgtgggcctgtcctgctgtccgatggcatcaggctgtgggacggggggccatcaggttggttggagcaagctgctcccatccggacctgtgtcaggcagcacttgttcaagaggaggctcaagagagtgatccaggatgcagggtttgggaagaggatgcagcatggtggggggcgacctgtccaagcgcagagaacacttttccaaacctcactgccctgggccatcgggtgctcctttgcctttgcttggatctaatgattataggcctgagcttcaaagcaggttataaacccgactaattgctggtctaggagagctggacgaggaggccaagcctgcccagagtgggcaccccggactgggccttctcgtgggactggcatttccaaccgggagcgcggtgctggggccgggatacccggggtggccgcaccgtcctgctggctccttgggtggctgccgtcgctgctcagcgcgggtcggcggcgccgcctcccccaccccggcccagctctgctccggcaggtggaactctccccattcaaacccgcgcgggccaatcagggccgggcgcgccctggccgttccaacgcttggggcagccctacctcccgctcgcgctcctcccgccctggagactccggttactggggagcaacacagccgcctcgggttgcagacgctcctgtccgggtcgcagtgggacgccatggagcgctccctgcaccgcgtctccctcgggagccggcgtgcccacccggacttgtccttctacctcaccacctttggtaagtgcccgctggggctggcggcaggggctgcttcaccctgctcccagcgcccagaaacgcagcccctcgtggtgacaggggaggctgggagcaggtgctctttctatctaggggcaccttctctggcccctttctcctgtgactgcccaggaggggctcagggcacaggctcagtccaagcaagctgctggacaccacctgctgcccggccatgagtgccaactgcggttggttctgcctcacttggctggaataatcacgctctggttaatctttcagagacctgggttgtcaccacggagtttctcattagcaagcagctcaggttaaatcaaggtcttgttatagcaactggagatctcattcacccactttcctttggctcagggagcggacaggtgctgggccctttggccctgctgccttgtggggaggctgcaatttgactttgttgggtatctgagccacagtggagatgggagaattctctcctccaagaaagaacaatcccttaggagggtcccagggctgcctcagggtttgaggtggaaagaagtgaacagtaggcttcactcccaagcccctaagtagcagactgagttcccccaaataacagctgggcggcagctgcccaaaggtctgggcaaacctggccttcctggtagccatagtaaaggtaacaaccctacccttgagggtaacccttcatttcctcactggtcctgcaactctctgtggagaggggttatttttcctctgtgaagacttgaaaccaagagatcttccatgagccagtggcagagttcgtagctgagctcaagctttccagagatgacctgtccagcgcatttttgtttgaacttgcatacaatttccttctaaaggttggggctgttactgaaacattactggacattgcccagctttcaaagacagagtgcccaaggagtttggtccctccctggggttcctggctcttctgttttcaggcttactcctgctcaacatatttggttttccacaacctgctttttttccttaggggtagagggaatgatggaagagcagtggcttggcctctgaaattgcctgacgtctggcagcaggaattcactggtctagttggtggacgataaagggcaattaactagccatcatttgttgagaacttaccattgccattccttatgccaagtgttttacctgcattatctcacttaatgccccagcgtaggaggcaattcctgctaaccccattgggatgcagggctctgtgagacaagggtggtttccaggatgatctgtattggctggggtaggagtgatcaggaaagggtgtcagggagctgtgaggccctcttaccttagctgtgtcctgattaaaaagtaaaaatatgtttgcttttttcctccttattatcatggttacatgtgtttactgctgaaaacttagtgaaaagaagaaagtgaaaatcacttgtaatctgacttcccagggagaccactgttaactttctgatttatatcctcccaggcttatttccacacctatttctgtgtgtgtgtgtgtgtgtgtgtgtgtgtgtgtgtgtgtgtgtgcctgtgtgtatttaggggtcaaatttcaacacaattgagatcaagtttgtatggacaattttgtaacccatatgttttccttagtggcctgatgtgaatatttccttgcattggtccatgttcttctattagattaatctgcctgccagatctgggaagctgaggagggttcaggcccagcagggagtggatcttcctgcccagccatggcctcagggctgagtctgatgggtatcagggaaggctgctgcttgaacaagtgactgtgacctgagtgtgcaggaggcagacaggagcctgggtggggtgggaagccacctgctcttattcgtgcaggctcctctcacatctctctaaggatgcttatgagagcatttgagaaattctctcctgtttcctgcactggctctgtttccctgggtgccatttgtcgtggtgcccctctttcaggctgctgattttctttatccactgtgatcttcactgatctgcttatgagcaaagattcctatcagtggtttccaaacccagccaaatatcagaagcatgtggggagcctgttaaaaatacacagattcctagaatcttcttctggagactctagtttaataggtctggggtggagcctgagaatatgaacacttaagaagccatagagcgttcagactgtcatccaggtttggaagctatggattcagagtcagttttggtagcaattgggaccacttttactgtgaaggttttggctaagtttttctcagttcactggcctttccttagcaaagtaggtagcccctggccttctactgtgagctttgccttggtagaaccagatgaagatgttgcttagctggtagtttcctgagcacagacatgtaaagggagcataatcatctatggaaatataaagagacaaaactgttttgatgagaattcccttcggggagagtactgcatgatatatgtatttgtgtgtacacatgaacacaaccccttgtcccccaaaaggagtatgttcaagtgacattaattgaaggacactgcgttctgaggaggtggccttacttcaggggaagggagtaggcaagctgaggctaggacccaactactctagagggatttttttttctttattgtgaaaaatgatgtaatttgaagtcattgtaggtatacataatatttttctccaggattgtatattttattttgattaggatatttgctgatttttcttgtaacagctttattgaaatataattcagatatatacaattcactcatttaaaccatacaattcaatggtttttagtatattcacagagatgtgtaactattatcacaatttcagaacattttcattccctcaaaaagagacattatgctctttagcttgtaccgtcctcccttgtcccgagcccaaagcaattgctaatctattctctccctctgtagatttgcctgttctggacatttcatataaatggaatcgtatttttttttttatgactgacttctttcacttagcataatgttttcaagtttaatccatgttgtagcagatatcatactccattcatttttatggctgagtagtattcattgtatggctataccacattttaaaaatttattcatctggtgatgaatattttggctgtttctcccttttgactattatgaataatactgccatgaacatttgtgaacaagtttttgtgtggacaaatgttttcatttctcttcatatacacacagtatatacctaggagtagatttgctgagtcctatggtaactctgtgtttaactatttagggaactaccaaactcttttccaaagtaggtgtatcattttatgttcccatcagctgtgtatatgggttttggtttttccacattccttaccaacacttgttattatctgactttttaattctagctatcctagtgggtgtgaattgatattcactatagtttcgatttgcattttcctgatgacccgtgatgttgaacattttttcatgtgctcattatttatatatcttctttggagaagaatgtattcagatcttttgttcattttaaaattgggctttttgtcttgttattattgagttgtaagatttctttatatattctagatgcaagctccttaaccgatatatgatttgcaaatattttctctctatctgtgggtttttttcactttcttgatagtgttcattgaatcccaaactttttttggggatggggtcttgttttgttgcccaggctggagttcagtggcatgatcatggctcctctttgaccatgcagcctcaacctcctgtgcttaagcgatcctcccacttcagcctcctgagtagctggtactacagatgtgcaccaccatgcctggctaatttttcttatgtaaaaaaaactttttgtagagatgaggtttccctatgttgcccaagctagtcttgaactcagggactcaagcgatctcctgccttggcctcccaaagtgctgggattataggcatgaaccactgtgtccagccagaaccccaaacatttttaattttgatgaagttcaatttactttatcttttgttacttgtactttgtgttatatctcagaattcactgccaaatctaaggttctgtcagttaccaagagatttacctgtatgttttcttctaagagttttatagttttggctcttatatttaggtctttgatccactttgagttaatttttgtgtatggtatgaggtaagagttcaacttcattgttttttgtggctatccagttgtcccagtaccatttgttgaaaataccattatttctctattggatgatcttggtacctttactgaaaatcaattgcccataaacccacggcttatttctaggctttcaattctattccattgatctatctgcctattatcattccagtatcatactgtcttgattactgttgctttgtagtacattttgaaatcaggttgtgtaaatcctccaattttgttcttctctttcaagatcattttggctgtcctgggtcccttgaatttccatatgaattttaggcataatattttatatagaaaataaaaaaactcaagttcacaaaaatgttggatagatagttttaaaatatcatcttgaagggataccaacttattagtttgactgatgaagcaaattattaatttacctggggtctctgaaccaaattttaacttgcttgggatctctagtcacctggatatggtgagtggtcaggagagagaacaggttgccttttctgcagggtatctgggtctggagatggtgggcaagctggacatgttctgaggtctgcaggtggctgtggacattgggtgacaaaatgcacctctctttagaaatgccagccccctatgaacctacaaaatgaaagctgtcgggagcagctctaaatgtaggctcgagaggactgcctggagtcactgatttgccatagggaagttgggaagatgtggttctggaggcagagtagacttaggagtgtcattgatttgctcagcattttttttttttttttttttttgcctcatgtttgttgtgttggtacaatgttagctggggcctgtttcactcctttctctgcctctctttagaagccgtggagataaataattcattttctgtagtgagagtgaagcttgggaacagatgtcagccagctgcgtggtgtgttgggcagtgcacggtcaggccctgaactggaggccttcaatgtgtccctgccagctgcccctggctggcacgtgtttccagtcccactgctctgagcctgggagattccctggcatggttggggaaacctatccaactgtttctcaggagctcatcatttgctggtcatactcctcagcatttattggcttttctgtcattcagagtccaactgctcaggagctttcagaaattcctcaaagtttctggcccatagatagccctttgtcctcttttcccattctgctttgtgtgttcttcttaaacatttaaaaaagtttgaaatattatacagacagacagaaaagtgtccccccaataatgtgcaatccagtgacttctcacaaaaaaaaaacctttgtaactttcaccagagtcaaaaattgaacatttctagtatttagaagacgcatgttgataatgcagtttttttctttatcatttacttcaaaatattttctaattttcattgtcatttctttttcaatccttgggttagttagaagtatatttctaaatttctaaatattggggattttctggtaatatttttatatttactttgcattttagtcagagaatatactctccatccttttaattccttgaaattaatcaaaatttacttgatgcctcagcatatagttgtttttttttttttttgtcgttgttgttttgagactgagtcttactctgtcaccaggctggagtgcagtggcgcaatgtaaactcactgcagcctccccttcctggattcaagcaattctcctggctcagtctcccatgtagctgggattacaggcacccactaccatgcctggctaatttttgtatttttagtagagatggggttttaccatgttggccacactggtctcgaactcctgacctcaggtgatccacctgccttggcctcccaaagagagtcaatttttataaatgttctttgtgtatttgaaaaggattctgcagcagttgggtgcagtgttctttgtgtatgtcaagtttaggtcaagtttgctctttatattgttcaaatattccgtatccttgttgatttttcctgttttctctgtcagttcctaagagaggtgtattagaattcccactgtgattgtaaatttgtctatttcccattgcagttctgtcagtttttcctttacatatgttgaagctatgttaacaacatacagatttagaattattatctttctggtgagctgaaatttttattatgaaatctattattgttatgaagtcttctttatttctagtaggtataaagtctaattttcctgatattaacatagctaaccatgcttctttcatttaatatttgcctgacatatctttttccatcctttttctttcaacctttttggatctacattgtaggtgtgctgtgtctgctgcaaagaacaggcacatggctgggagtggtgagtggcccatgcttataatcccagcactttgggaggccaaggcaggaggatcactcaagcccagaagttcgagaccagtgtgggcaacatagtgagagctcatctctacaaaaaataaaaaaattagctgggcatgatggtgtgcacctgtggtcctagctacttgggaggctgaggaaggaggatcacttgagcctaggaggtcaagactacagtgagctgtgattgtgatactgtaccctagcctgggtgtcagagtgagaccctgactcaaaacaaacaaacaacaaacaaacagtataggcagagagttgttgttattattattattttcttctcaatgcagacctaggatgatattttccttcaaaaaatctttgttcgtttgtcaggtgcctagggtcactgggttagtcttaattcagtgttgggactgagagtacttgaaatcgagctgtagtccctggagtagctgtgtctgattacagttcactctattcctatggagcaacccttcagggtccctatgcaaaaggtggggctcagaagaaccctgcttcttggtgggccctggtccctagttcctattcctctagccctgagaagcaggcagaaactcactcagtctcttgatctctcaatcagccctctggaatttgaaaacaccccaggaggaaattagcccagaaaaacactaggtttccttctacagtcctccattcccctagatcctgcctggtagctcctctctctcttgttgtttatctaagaagatgctttaacatattttgtttagcatttctagttttcctcagtggatctgtcatcccagaaatggaagtcccctacatatattttctaagcttttttgagttggtttttgtttttttttccctccctttctgcctctctccctccttttctcctccctccctgcctcttccgtcccttcctcccctccccgctctctctctccgtccctcctttctttctccctgcctgcctgcctacctgcagttgtccgagcaggcattactggggctggagggtccctttccaagatggctcattcacatggctctcagcaggaggcctcagttccttgctacctgtaattaggaggcttctgtttctcatcgcatggacctcttcgtaggattgcttgagcttccttattatgtggcagctggcttccttctaggcaagtgatacaaaaatgaaagcaagaaagaactcccataaaaagatgagtaacccagctcaaaaatgggtaaaggatttgaatagacatttttttccaaagaaaaatggctaacagcatgtgaaaaaatgctcaatgtcattagttatcagggaaatgcaaatcaaaaccacaatgagatactatcatactagaatgactataataaaaaaagagccaataacaggcgttgaagaagttgaggggaaattggaacccttgtacactgccggccggaatgtcaaatggtgcaaccactttggaaaagtttggcggttcctcaaacaattaaatgtagagtttccatttgacccagcaattccactcttaggtataaatccaagaggaatgaaaacacatgctcacacaaacatgtgtacacacacacatgttcataacggcattattcatagtagccaaaaagtcgaaataacctgaaatatccatcaccagatgagtggataaacaaaatgtggtatatccatacaatggaatattatttggccacaaagggactaaaatactgatacgtgctacaatatgggtgaaccttgaaaacattatgctaagtgaaagaagtcaatcacaaaagaccatgcgttgtgtgattctgtttacataagtatccagaataggcaagtccttagagacagaaagcagattagtggttgacaagggctgaggggagaagggaatagggtgtgactgcgaaagagtatgggatttcttttaggggaggatgaaaatgttctaaaattagatagaggtgattgattacagaatcctgtgaatatactaaaagaaaattacatgctttaaattggtgaagtgtggccgtgcacggtggctcaatcccagcactttgggaggctgaggcgggtggatcatctaaggtcaggagttcgagagcagcctggccaacatggtgaaactctgtctctacaaaaaatacaaaaaattggccaggtgtgggtggtgcatgcctgtaatcccagctactcaggaggctgagacaggagaataatttgaacctgggaggcagaggttacagtgagctgagatcatgtcattgcactccagcctgggcgacagagtgagactccatctcaataataaacaaaactgatgaaatgtatgatatgttaattatatcccaatacagctgttaaaaaaagaaggaactaataatacctttaatatcctaatgttgaaagtcatccactgtcatttctaccacattctatttgttagaagcaagtcactaagtccagcccatgtctgaagggaggaactaggcttcacctcttgaaaggaagagtatcaaagactttgtggacaaattttaaacccatgataggtatagagaggctaacagtgggggccctggactgcctaaatgcaaaccccagctctgccacttactggctgtgtgatttggacaacctgttttagctattttcttttttttgagttggggtctcactctgttgcccaggctggagtgcagtggtgtgatcatggctcactacagcctcaacctcctgggctccagtgatcctcccacctcagcctcctgagtagctgggactacaggtacacaccaccacgtccggctaattttaaaaaaacgtttttggagagacagagtcttgctatgttgcctagactggtctcaaactcctggcctcaagtgatcatcctgcctcagcctcccaaagtgttgggattacaggtgtgagccaccatgcccagccaacctgtttacctcttaataatcttcagcttccttgcctgtaaattgggataaaagtagtaaccatttcacggagttattgtgaggagtaaaagaaataaaaagcttatagtaaagtgctgagtacctagtaaacatctaagaaacattgactttgttctctccatgtgtgtgcctagcctggtagttcactatggccctgaactctgggttgagatgtgtgtgaatcctgtaggatgtttggatctgagccccacaggactgctagtggtgttatgatccagccaagattagatgctgactgcagtagattcaggagttttattttaccagcttgcccaggacggacctagaatcccttgtgagtgatccatgggaatctaaattatcaagagactgaatgctaatttattagtttatgctgaaaaatagaatttctgagtagactagaagacttatgctggccggagcaatctctttctgtaaggaaaaagagcttgggaaactacattaatatcagctttcacaggaagcagagaggccaggggattgaactgacccatcacaatttttatgccagtgctgtgtgtcctatgtcctcaccttcgcaaaccagggccacttttttgaatggaactcagggttctccttcttttaacacagtagccatgggaaattctcctgggttatgtccatagagctgtgtggctgcctgtttcccagcgccactgcagcctaccatttctcccttagatcaagcaggcagtgaaattggtaaacacatgcttaaccatttctgagcctggatcagggctggggtgtggatgaggcagctgaagaccacagagagagggcgtgcctggcatctggctgggcaccctccctcctgcgaggaagacttgagtacagacgtgtcctcataaacggaggggaaatctgtggatgttagcggctggctaggctccatgtagacccaactgccttcatatgtttgtctggatatcatcacccttcctgtagcttttaacatgtgacagttcttaaatgggcagcggcttctggggtgaattggattttaggatgcctgctgcttcatgctagccaggcaagtccatcatagatgtattctctgcacatctcagggtggcatgggctcccactgggacacattccggctgatccctgagtctagcaaaggtgtgcagtccccatctacttcctttattttctgagtatgtctctttctgactgtggcctgtgggttagagttcatctgtggttctctactgagtattgtctgccagactgaatttctttagctggtgtccacatccatttaaaagtgcccagtaagtctgagcccttcaagtcctgtgcccagcagaatttgggtttgttgccttttccaggctttctgaagctcattcccatccagtatttttcctgccatatggggccctgtctattctccctttggctctgggccctggtacacacttgcagcctctctgggcatccatcaccaccaccttttgcacatagtgttggtgcccaactgcgatctcatgggaacaggggacatgccctgtccaaaggccctgcccaacctcgatgaggatgacttcaagccctttagcctgactgctccctgagtctagggaggaatggggagtgttgaaaaaaacagaggtgtaggagcaagaatattattgggaaaagttttaggtttttgttttttgagacagggtctggctctatcatccaggctggagtacagtcgtgcaatcatagctcactacaacttcaacctcttgggctcaaggaatcctcctgcctcaacctcccaagtagctgagactacaggcacgcaccacggtgcccggctatttttttaattaattttttgtagagaagggctcttgctgtattgtccaggttggtgtcaaactcctggactcaagcaatcctcccacctcagcctcccaaagtgctgggattacaggcatgagcgaccacaccccacaaagacaagtttttaaaggaacaagcaaatttcagaacaatacatagggtatgtatctgtggagggaggttgggtggggggggtgttctgaaaggatgccaaattagctggtgcttcggtgagctgaagactccagggattcagccctacttccccttcacctggaggtttctttctctagattggagacatttctaggaggctgccctctattttttttctttttcttttttttcctttgagacaggtctcacgctgttccccaaggtccaggctggagttgcagtggtgtgatcatggttcactgtgggctcaacctcctggattcaagtggtcctcccacctcagcctcccaagcagctgggactataggatgtgccactatgctcagctaacctcttggtttcttgagaaaagctgtggcacctggtgctgtccccgatggttctctctacctctgaatctgaaggttgtgttggcaaacgcagtgggcacagcagaggaggtgcgtgctagagggctgtgggtgttccagaagactgtgcacaggaaagagtgctggagtgggggtagagttctaatctccagctctggattctctgggcccagagcaaatcaccttccatctcaggcatgaccgttctggctacaaaatgaggagactggacaagatgacttcaggggcctgtgtgtcagacatttggtggagtagcatgatggggggaaggaggggacaggcatggccgagggagggatcttgtgaactggggcaggtgtgtcctggcctggggagcctggagtctggtctgctgggtttggtttctctgctgtaacagggtacagggcaccctggccttcctgagaagcccctggctggcagggcctggaacgggagcagtgcagtgtggtgcaaactcatctcaatcccgagtcagcctttgcccctgggcctttgtcagcctccagcttctcacttggccttgcccaagtccctgtcctagccactgggctgtgagccctgtgagggcaggcacctgcccagcctcgtgcagatgcccagcaaatatttgctaaatggaattagtgaccatttgtgtctggagatttcctgatcctgacttctgggcaaagggccactgttagttaggtgataggtgttgtggagcacaggggttcctgtggctttcggatccaagcatgtttgtgccagagctggctttgcacaggtagtagtttcagaaaaaatgtttcatgttaaacataggtgtctttgagttggtgaaattcaacccatgactgcgggcttcgtttgcctgtttccaaacctctctctctcccaccccacactagattgggcacagttttcataggtttctcagctctaggaagccacaatgaagtaattgctcagactttgagataatgataccgtcagttctcccggcgcctttcatccaaggagtcctcctcacctgccagcattatctgatcacagcttggagagtgccataacccctgttattagctctacctcacatccatggccactgtggtcctgaaagaagagggcagttagggctggaactgaaacaggattcctgggcttctgagatctgggtcctggacaggagaacagcagatatttctgatggatgacgggctggaccagggtttgcaggagcctgaattgcttgggactgaagcttaaccaccagaagtatgagggtcaagtgatgtctgggtcacagtgattggtggacttatgcagagttaggagacatgaagggttctccaaacctgttctctaaccagaaacaaagcaaagccccagctgccagcctagtttcaagaggcatgtccagagctggccagatgggatgatgaggggatgtctcactgtgctgtgagggattgtggaaggactttggagttcaggtctagaggaaagagcccagagaatgcagaactagatccgggcaatgaaagttaccgagaggccactgttggcttaatataagatgcagcattgaacaatcagagctctttcaaaagggaaagggctcccaccacaggaagcaagctccccattgctacaggtgactgggcagagggagggcacagctagccagggttgtcacagatggagccatgcctgggctttctggtagacggccctgccctgctttctgatgtctccagtgcctgtccatggggtggactgagttcagcagctttttgaggtcccagggaaagtctactggactgagagaaacattttcgatgtcaccgaggaagaggagtgtgaccctctctctcttctctgtcttggctggaggccattgggtatctgtgaggatgacctgaagttttgtcctgttttttctttttttaaaaaatttaaacaaaaatgggaaaagccaggggataaacctcacccggccactcattcttgccctgccttccagccccgtccttctgttctctttacatgtcccctccctccctgttctcctcccttcctccctgctctttctcttcctcccctcctttctcctgcctctttccttcttcctttgtttcctctttcctttctttttaattatagaagtgctatagttcgtggatatatttgaattattaaaacaacaattgtgatagattgaaattcctcttgactaccctcctccaattcctagtctgttctctagcagggatcactgtttttaatttggcatcctttcagaaccctccctcccccgccagatacataccctatgtattgttctgaaatttgcttgttcctttaaaaactcgtctttgtggggcgtggtggctcatacctgtaatcccagaactttgggaggctgaggtgggaggatcacttgagcccaggagtttgagaccaagctggataacacagcaagaccccttctgtacaaaaaattaattaaaaaatagctgggcaccgtggttcatgcctgtagtctcagctgcttgggaggttgaggcagaaggattgcttgagcccaggaggttgaagctgtagtgagctatgattgcacgactgcactccagcctggatgatagagccagaccctgtctcaaaaacaaaacaaaacaaaacaaaaacctaaaacttttctcaataatattcctctgccaggttgtatggtgctcctccattctttataacagctcatactattccatatacagctatagatggtttacttcactatttctatattgatgaacatttcaggtgtttccagtttttccttaaacaatgctgtagtgccagcctttgtgtgcacgtgcttgtgtttgtctacgacagtgacctggaatgaagacttttaggtggaagaatatgcacatttaaatttcagtagatcttggcagaaattaccctccattttcactccttccaacagagaatgacagtacttgttctcctacacctttaccaacatttgacaacgacccagcagtgagatttcccagcatccacctggctgcctgtacagtagtgagctccccatcaccagaggggcacaagcaaggctagagaaccactgctggaggcattcgaaagggactcccgatgtggtgggcggggctgaaccctgtggcttctgaggtccctgccagccagagacttgtgtgagtctttgaatggcttcacatgaacaaaagagcatttctgtcacctttcctctagttttttccaccacacccaccagggagctgaggcaaggttgtttctgttgctgtttccttaggtcagctgaggctgtccattgatgcccaggaccgggttctgctgcttcacagtgagtacggctttgtgcaggctcaccaaggaaggggcgggccactcagcttgctgcctggggctggggttgggggatggtggcaccatgggccaaggcttcttttctcatccttgtataaaggatgtgtccattgataaaagccagtattcacctggggctctttctatagagcagccctggtcctgccttggatgtgtctggagtccacatggtagacctttctcattgacaggctacagctgcccctgggtacctcaacttccttcttggccccagcagagcagggccacagaagagttttcctatcttccctcccttctttattccatcctttcttcttttctctatttttctcactcattcatttattcattggttgacaggcagcatagtatcatggttaagatcatagtctttggagccagaccactataatttgaaccctggctctgatacttgttgagtggccttgaacaagctccgttttctcatctgtcaagtagtggtggtaatactatgtatcttacaggttgctacaaagattaagtgagttactgttagtaaagtgcttagaacagtgctgaacttgtagtcaatcctgtgtaagtttttgttagataaaatagaaaactggctgggcacggtgactcatgcctgtaaacccagcactttgggaggccgaggcgggcagatcacgcggtcaggagttcaagaccggcctggccaacatactgaaaccccgtctctaccaaaaatacaaaaaaattagccgggtgtggtggcagatgcctataatcccagctacttgggaggctggggtaggagaattgctagaacccaggaggtggaggttgcagtgagccaagatcatgccattgcactccagcccaggcgacagtacgagactccgtctcaaaaaaaaaaaaaaaaaaaagaaaaccatacattccaaaaatagcgattgagcattagctctgtgctaggggctgggaacaccaaggagaagcacccacccctgtctagatggtgttgatgggatgccagggaagacttggcggagggggtgatgcccacacggtatcctgaaggaggaatgggcctgagccaggcaaagaggagcagggagggtgtggctagcacttcatgcacagggctagcaagtgcaaaggcctgggggtcagagagagcaggatgcatttgaagagctgtctagcatggctggagcacagcacaggaagagttcatactccacctgtttgtctgtccatgtgtccatccttccatccggcacatgaatagttacatgagttgctgtcatggcccccactgccaggactcttctgtttagcccagaaggccctgtctatctctccagcctccctggctcttgccgctgacggtaccctccacctccagctctatccagttacatgcactcccttgaatacatcttgcttgctcctgcctctgtgcctttgcacctgctgttcactgtgcctggaataacctttcttttgttttgaaccccttttgaaaaataactctccacctgctctgattttgcaagaaatatgcctgccttcatcatcattaagactcaggaaggaagggtcattttgccttattatttccccctccaggaatcatccccctgacccacctgtctgggctgggtttattgctttctcctttgtgtctttgtcacagccctgactatactgtgccacctgtgtctggcctctctgccagactgagaatgcaatgaggacagggactgggtgtggttcattgtcactgctggccagagagacccaggaggtcaccagacctgggtcctgccctcaagaaccacgccctcgagggaaatgatgcacacaggaacagtaaccaggatactgggcagagtagactagtaggcgcctgggtcctctggtcatggccatggggggcccaacgtgaagttcccaaggagcagcagaggggtgttctctgcctgccagggcctgactccagctgtgcaaacagtttttgcaaaatgcatcttggcctccaccactccatttgtcctgcacagtttgctttggcttcaccccagtctcaggcccttcatcccttcccaccggtccccactccttccattggtttcccaggccttgcacctcagactactgggagcactgtctgagccaaaccctagggctcaatgaaaaccagacgtaaggctgggtgcattggctcacgcctgtaatcccagcactttgggaggctgaggcgggccaatcacctgaggtcgggagttcgagaccagcctgactaacatggagaaaccttctctccacgaaaaatacaaaattagccgggtgtggtggcacaagcctgtaatccccgctacttggcaggctgaggcaggagaatcacttgaacccgggaggtggaggttgcagtgagccgagatcgtgccattgcactccagcctaggcaacaagtgcgaaactccatctcaaaaaaaaaaaaaacaaaaaaaacaagaaacaaacaaacaaaaaaatccagacgtaaaagaaaatagaactgaggctcaggttctatcaggtctattgtcttctttctatagacctcaggcaaatggtgctgcctactcttgtgaccacacctgcacccaccccacacctctccccttgcctttatttattattatttttctttagcaaacattttttgagcaattacttatttgccaggcactcctctgagcacttcaggcacattacctcatttaattggaacaactaccatgtgaagtgcatgttattatcactaaaccattaaaaatggcaaattctgtcccatgcaaagcaactcactctagcttatatggtgagtaagcggtgcagctgggattcatgcctgggtccgtccacccctgaggccccagcttgtgactcctgtgctgtgctgtccgccagccacagcacggctcacggcacaccgtgagtgccacggcatggctcatggcacatggtgagtggccccttcattcctagaaggcagtcttgtgtggtagagcactgagccgggagtcaagagacatgggttccaaatccagcggtcattcccattgttctgtgattgtgggcaagtttcttactatcttgggttcccctcgaagcctcattttccccattacatgaagggttagattctataaactgtagttctcttccagctgtaagattcagggaattgaatgtacctcgtaatgcattggtgagggtgctgccagagagtggaagatggtgggaatggcctagaccagagcaggttcatagccaatggtggttatgcagattaagggcctagtagcaggggccatagccctgctactcacagatacgcttttcttttcaggtctctttattcgtgtggatggatatgtctatgtgtgtctctctttctcgctgtgtgtgtgtgtatgtttccattcatccaccccaatgtctgaattctcttttagttatagaaggtaaaggcctgatcagcaaacagcctggcacctgtgatccgtatgtgaaggtatgtggtggggccggagatggagagtgggatattgaggggccatgttactgggctcagtcccaaggtcccagcacacctgtggggctggtgacctttgaggaggcagttgccatctcactcatcttctcaataggcatttattgggcccagtgctgggacaaacccattcccttagctcggctgggtccctggggcttcctgcaacagccaaaatcttaagggcgatcttggtcatctatataggtgggcagtgagtatgtggatggctgaaatccacaggtaatcccaagacctcttgtgaaaagcaccgttttcacccactttccccccaaactaggggcaggatggccagatttgggcagtagagtggagggagtgtctctgagggctggaagatccttctgggttgggcttttgctgtaaagacagggtccttataggggtggggctctactttcagtgagagccaaaggccaggagcttcctaaagtgtggcagctggggttccaggtgctggccctcagcattcttcctgaagccttcaggctgatcagaagcccctgctggcaaggaatttatcaggagcagggctagaacagccctgggttgagaacatggatttggggccttggcagaggctgacctggagccttcgtgaagggagcactcagcagctgctgggaccttagaagagaggagtcctttcgcttctggggaaaccactctgcttgggggaagagcagagatgataaagttgtaccccagctctggctgggccgtggctgcctttttggtaccacccaccatgaggccctgtcctggcatctgcctccaatgtctcttgccctgggctccttgttcccttgcagcatctgacaggggactctattctgtcctctgcagaggctgacttgaaggaccctgggaagcctttaacttggagatgtgcagagtcagctgctgggcttaggtgggccatgagatccgctaatcatgcttccttttttccaattcaagatttctttgatccctgaagatagtagactacgccaccagaagacgcagaccgttccagactgcagagacccggctttccacgagcacttcttcttgtaagagtctggtgcagctgggccctagaaaggagagggaaggagtgtttatctggaaacagctctgtttgccaaatctagaactagatctatgcaaaaaaaaaaaaaaaaaaaaaaccaaaacaaaaaaaaccagtgccttctaaaggatgtctttgttttctcactcacttgtgtccttgcatccctggcaccaggcccagcagcgaggtccacagtgataaggtatcacttggctagctctcataactaaaatgcccagcctggggctggcagcccataaaaagtgtaggcaatttcccactgtgccttgggccaagctttctcctttagccgaaggaattttccaagctgaaggatgttttgcctccctgcccccctttttacttcaactttctaacctctctgagccttggcttccttatttgtaaaatggggctaataatagtagcaacctcagagagctgtggggtataaatgggacagtataacataacacagggtaccagctattattgttattatttctttccccaatctctgaactctggggccaatgggaaggtaatgtacattttgtattttcctattagtgaaaattaatattttggtttttctcttactacataaagtagttttggttatgataggaaaatagaaaatatagatgagtaaaaagaagaaaatagaaaacacctatagccctcctactcacagatacgccctactgtatttcttttcagaccttttaaggtccttttcagaccttttcagaccttttaatgtgtatgtttgcgtgtgggtgtgtatgtttgcatgtgtgtgtgtatatgtctgtgtgtgtatgtttacaaaaatggaattttttttttttgagatggagtcttgctctgtcacccaggctggagtgcagtggcacaatctcggctcactgtaagctccgcctcctgggttcacgccattctcctgcctcagcctctggagtagctgggactacaggcgcctgccgccatgcctggctaattttttttgtatttttagtagagacggggtttcaccgtgttagccaggatggtctcgatctcctgacctcatgatccgcccacctctgtctcccaaagtgctgggattacaggcatgagccactgtgcccggcccgaaaatggaattattttataatagcatgttgtaacctcctttttgtccttaacaacataatataaactgttttatgcatggaggtagtcatctcttactttatttgtaatatagtttatttaaccagctgttgacgttacttccacatttttggaattatgactgactctatgagtcagctatggcctggagctcagcccttactaacactccgatggtctgattgatttcgcagtcctgtccaagaggaggatgatcagaagcgtctcttggttactgtgtggaacagggccagccagtccaggtgaggagagctgctgagctggagggggactctgctctgggctagtgggtgacagccaggtggccagcatacaccaggggttcgattagtgctttctggataaatgagtgatagtggcaatactaaattgcagaggctgcccctccttgagtctccatcattccaggtgttaccaaggactgtgttatcaatgagcatttgctgagcactcggtatcaaacaaggcactgtgctggtcactggggaagccgaccagcctacacatggaaatttattctcaaggtgtccactgttcacgtggggacaccaggcactgcatggagagaaattacaataacaacatgtacgtgctcagttctacaggactctaagcaccttgaaaaacaggactatttcttttttagtcatcacagtacctagtgcctggcatatagatgtttattagatattggctgcatgaagaaaagaatgacatgagtaataaaggccatcagtatgggaagagggagagttcactgtggtctgagatgatcaaggaaggcttcatggaaaaagtggaattttgaacttgggcacagatgaagaataagacaactaaagaagaaggttggaaatggcattccaggcagggcaaagcatgagcaaaggcaaggaggcagaaatactcactgtaagctaaggctgccatgatgaggccaggtaagggagtatagaagttttgtgtaggagaatccaaacaggctgatcttgcaggcagtgcaggacacaggagggctgaagtggccattagtgacggcagttagagcggagcaggggaggagtgccgggcaggtgagcatgagaattggctgttgagtgacagcaatgcactgccatggcccactgttagcggcagtggctcatttggctggtgcagcctaaggaatctgggataccccatggtcagtatcatttgcggagcaatcacatcactgaatggtgactgaaaaggggcttccgtgaatgaaaatcagctcaagtcaccagctgagacctggaaaacatttttgggttcaatgctctttagtactctaaatgttattagctaatatgttttttaaaatcggggtgtatttaacatacaaaacgaaggatttctcttttaataaagtatccacttttcatcctagggtagtatagtacaataaacctcattcattcattcatccagctgccatttcctgggtatcactgtggcaacaacatgctggggatgcatgcatagggtcaaagactttcctatcggatcaccgatagagacttggagctgagagtgaggagggggacgtcatgttaataacaatagcaattgctgactgggtgctgacctggagccaggggttaacagtgcattgtctcatttaattcttttttttttttttttttttttgagacggagtctcgctctgtcgcccaggccggactgcggactgcagtggcgcaatctcggctcactgcaagctccgcttcccgggttcacgccattctcctgcctcagcctcccgagtagctgggactacaggcgcccgccaccgcgcccggctaattttttgtatttttagtagagacggggtttcaccttgttagccaggatggtctcgatctcctgacctcatgatccacccgcctcggcctcccaaagtgctgggattacaggcgtgagccaccgcgcccggcctgtctcatttaattcttacaacagctctaagaagagtgtggttttgtcctaagttttcagaagaggaaactaaagtttagagaggttaggaatttgcctaaggtcatacagccagttaacaatagagccgggatggaatccaggtggttggaccccagggtctttcctctcaacactgtactgactcatgggtggacaggtgaaaggacagaagaaagagccagtaaagtagagagggaagggcagggcaagagtggagtgaggagggatctgcaaactcattgacgttgctggaaggttaagtacaaagtagggactggctaaagattagctgaagaggttggtataagccaagtcagatgattctgtagattctctttggagtatggggtttctcctaagggccggtggttctcgatcctggatatacatcagaattccttgggatgcttgtcaggaacctagattcttaggtgccgcgtcagattaattacatccaactcttcatgggcagggctgagaaatctgcatttaaacatgtttgcagggtgaacctcctgcagtcactttggtgtttgggaatgtctggccattgggagatactgaagtgtgtcaagccagggaatgatggatgcacattctagatctatcactttggtaggtctttggaaggttgaggtgagagagaggctttggggctagggaggggaaaacagactcaggccatatttaggagattaaatcagtagtgcttagtggtgatttggctgtgagagcagtgtgagaagtcaagggtaactcctgggcggctggtggtgtctccacctaagacagagttactggaggtggaggtgagtcagcttgggatacggtgagatgcaggtgcttggaggggagccaggtcagagctgtgaagtagggctcacctttgcctacctggaacttggaagacagagatatgggagccatgagcaggaaggcagtgggtgaaattctgagcaagtgagattgtcaaggaaggtcatcgaatgctaaggaccaagggtccgctccctgtctttgaagggacaggccaatgaagggaaggtcctgaaggagacagcagagtgtcagagaggcatatggacgcccagaaagccctttgggtggaggcagacaccaaactgctggagaaggagccggtcatgcccttcatggcttttggaaaagaaaatgaggccagggaaagtgagtcagcgtcatggggcagtgtctccacgtgttgcctattttgggaaagtgagatgccttattaaacaaactacagccaaactcacggtcacagtcccagcccgaagctcaggaggatcagggccttgggagcagagggccctgtgaagctgtgagcagcacgcaggccggcctggcctccttgcgctctccttttcctctctcctttatcgatccatttcggagcgagaaggcctctgagctggaggaggcagacagagtgattgcaggaaacttcggctctgctgaatgctctcaaatcaaattgtgcctctctgaaggatggacattcaacttatcaacatgaaagacaattgtggaaggaaggaaacaaacatttatggaattcttctctgtgccaagcactttacatacattatctcattttatcctcatcatgatcctaagaggtaggacttattattgcccctctcttcagagaagaggaaactgaggcttatgaaagccgaggcacttgcttgaggttatgtaacagctcatatttaccaagcacttactgtgtgtggacattaagcacatggcactcgttctccaatttaaccctcacaacaacataagaggtaggtattattatttttgctcttttataggtgaggaaacaggcacagaggcgttacataacttgcctaaggtaacacagatagggtgccgtgaaaacaagatgtaaatgcaggcaagctgacgccaagtccaggttctcgcagctacattacggtacacttgaccatctcacatggatgataaatgactccaaagcatactctttctgtgtcagtatgcttgctcctcaggactcagggtgcttctctttgcatttatagtgtagtttcattgattgattgagacaggatctcactctgtcacccaggctagagtgcagtggtgtgattagagcttactgcagccttgaactcctgggctctaatgaccctccagcctcagcctcctgagtagctgggactacaggtacatgccaccacacccagctacttaattttttttttttttttgtagagacgatgccttgctatgttgcccaggctggtctccaactcctggctgcaagtgctccttctgcctcagcctcctaaagtgctaggattacagacatgagctaccgcagaatttataatggagttttatgtaaattattcagccaaatgtgtggtggtcacattttgaaactgataggagataacaggaaagcatctgtttcactaattctcacgatccttccagggatggctgtgaacttgtgttagagaaacaagatgatctacaaagaagttctggggaagggccagatgatttcagttcatcatggtgatcacagtgggaactgaggagaaccaggcctcagcacagtagattttggcttagctttgactagctgtatgaccatgggtcagtcccttccctgcgctgagcctcaatttccttgtctgtaaaatgcagtgatcactaatgtttctttcagcttcaagtttctgggagttttttataggcactttcaaatgtgtgcagaggtagaaagtatcatataataaaccctcatatactcatagcggagtttcatcaattatcaatatatggccaatcttatttcatttacaccccatccactttccccttctccagtgaattattttaaagcaaatcccagacatctcatctcatcggtatatatttctaaaagatggctttaaaaaaaatcatgatgacattatcacacttaaaaattaatagtaattcctcaatatgccattgaatatggaactcagctttaaaaattctgtttgataatatggcaaaagacaaattgaagcttccagtattaatcagaacttgtggccagggaacagacttggagagaattataatgttatgtactaaggtaaaaaatgcatatatgtattatatttatacctccaaagattatgttcaatatataatatattattataaattatataatatataaaatataatatattatattatattttatattggtatatataattatatataacttaattataattatattggtatatataattatatatataacttaaatataattatatatcgttatatataattatatataacaattataattatatcagtatatataattatatataacctaattataattatatatcagtatatataattatatataacctaattataattatatatcagtatatataattatatataacctaattataattatatatcggtatatataattatatataacttaattattatatattggtatatataattatatgtaacgtaattattatatattggtatatataattatatataacttaattataattatatattggtatatataattatacataacttaattataattatatatgagcatatagaaattatatatactaatatataattatttatatattatatatattctttatatattattatatattaattatatgtaaacattatttatatatgtaattaaagaatgttatatatatgtaattaaagggcataatctttttttaaagtaatttttttttctttttttttgagatggagtttcactcttgtgcataatctcagctcactgcaaactctgtctcccaggtagcgattctctggcctcagcctcccaagtagctggcactctgcaggcgcatgccaccatgcccagctgatttttgtatttttagtagagatggggtttcaccatgttggccaggctggtctccatctcctgacctcaggtgatccacccgccttggcctcccaaagtgctgacattacagccatgagccaccgtgcccaggcaaggacataatcttttttttttgagatgaagtctctctctgttacccaggctggagtggaatggcgcgatctcacctcactgaaacctccacctcctggattcaagtgattcttctgcctcagccttccaagtagctgggattacaggcgcatgccaccacgcttggctaattttgtatttttagtagagacagggtttcaccatgttggccagactgatctcaaactcctgacctcaagtgatctgcctgccttggcctcccaaagtgctgggattacaggcgtgagccactgcgcccagccagggcataatcttttatactaatagtaggtacatttagggagattctacttgtgatttgccctgcactgtcccaggcactgtaagtgtatgctctcctttaatctgttttataaatgagatctcagtgccaagtacagtggcctaacgtcagaaagcttgtgaccagtgatgggtactgagcttaaggaaaaagtgaatggaaaaatctaagttcaatttaagtcatcaaattaaatataaattaggattaaatggtataaccctgtaacagaaataatttacctgagagggagaactaaagtgcatttcctcaaaaaataatctattttttcatcttgtaatgagtctgcaaccctatgctcaaaagtaaactgaatactattccccatatgtgctgcatgaagttacttcaaagcctttgtaacggctgttccctctgcccaaaatgctcttcattctctctggctcagttcataggtcttcttccagcctgtgagccctaaactacctcttgtgtccccgagccttcagaatttgttgcctgcactgttcatctgtcaatcgcaccctgtcttgtgacatcccctgtattgctgtcttgaactgctatttaaattcctggatgtttgtgttgtttccttaacgctgtggctccttgcccagtgcctgccaaccgtgggcgtgatggattcatccatttgtcaagccttcactaagtgcaccaagcctggagctcagggactggtagtcagaattaaccaaggcttggttccggagactttgcatctagtgagagttcaggcactcccgagggtgagcgctagttcccaagtttataaactgactgctgtattgtcatatactcaggttgctttaaaagaagtctttcttcctccaaagatttttcaaaagcaggcataagaaatagctaattgaagaacacttagagagaggttcctgcttatggacattaattgtggcaatttacgctgcctgagttaccatgaaagcatgggaggccccttagcaggaagtaaaactcgagggaggctattaaccatttaacattctctaaacaccagggaatgaagatttcgcttagtgaagagcagagagaggttgctgagctaatgcattggcctggagactttgaaagtttcagccctacccagtaggaaagaagtgtacaacagagtagtatgggcacctggatagcagctggagttctcttgaatgtgtgacaaataaaatgaaattggtatgaggactttggcaaagtcttgccaaggcttttctggaatggcagctcagattagttttggctgtttatgatagtcactgcaactgcctcctattagtgctgacttggctacttcccaagggggaggagtatttgtttttggtggtgggctggggaggtggatgtggaagggcactttattggggtgagagcattgtcctttttgaatagattattaatagagccttggatgatgagagaggcaaggaagaaggcagcagatggagccaaggctgaaggagctgggagcaggagtgatgaactgagagcagctgttgagagacagccagaagcaggggcctcagctctgggccatggggcagagcatgggtttgcaggcaggtggaccagttttgaggagcaatcccccagcatcctgcctccccacccctcgcttgacttggctgcctgtgagaagctagttttgttttgcttaggactgtccggtggtaagctgccacgctttctggagaatctgaacaatatgtcttttttgagaccttctagatcactggtctttgactggggcaggcataagtgggtgcttggcaggataccctggagagctttctccaggctcccatgctcgaaccccaccttggaccaactaattttgggttctcaggaagaagtcctggagcatatacctcagacaggctgttcaggtggttttgtggtacacttctggatagaaccactgctctagctcaggcccccttagaccaggttttggaaaacacatctctagggagtttactacctatccagaagcctgttccatctttggttttgatattgtgccttccataggacatgccaaatctctcagctatgtgggtccttcagctattgaagccagcctccagggttatgctccagcctaaatatccacgatgtttcttgattaatagttattaaaccaacctatgaattagtccaagttgaggatggggtaagagagaggagaacagaaagatgacattaaaaaaaaactcttactgtcaggatagaacaggatgtggcacaataaaagtccttaaaagtatattgatactgtctttttttttctcctgattataaaaacgatacttgttccctatgcaaacagtgaaaacccataaaggaaaattaaacccctagtaatcccacctaccagatatgaccattgttagtatttttgtgggtgtctttctcattaaactcacattactcattaaatttacagctttgtaaacttctttttctctaacaatatcaagatatttttggactttattaatattaactgatgttatcattattatttttttgagacagtgtcttgctctgttgctgcaactgcctcctgttagtgctgacttggccacttcccaagagggaggaacagtaacacacaatcacagttcactgcagctttgacctcccaggctcaagtgatcctcctacctcagcctcctcagtagctggggctacaggctcatgccaccatgccctgctattttaaaaattttttgtagagatggtgtctccctttgttgtccaggctggtctcaaactcctgggctcaagtgatgccttccaaagtgctggattacaggtgtgagccactgcacctggcccatgccatcattattaaaagctgccaactcttagtccctgattattggacattgagcctcaatggtggacattcttcaggaactctgaattcttcttcttcttcttcttctttttttttgagatggagtcttggctctgtcacccaggctgcagtgcagtggtgcgatcttggctcactgcaactccacctcctggtttcaagtgactctcctgcctcagcctcctgagtagctaggattataagcatgcaccaccacgtagggctaatttttgtatttttagtagagacagggtttcaccatgttggccaggctgttctcaaactcctgacctcaagtgatctgcctgcctgtgcctcccaaagtgctggcattacaggcgtgagccaccgtgcccagctgtgaattctttttaaccaagaagattgaatttagcccctcgccatagtctgacatccccatgaggcctgaccctggcccatgcctacctgccctgctggtggccaggtcagattggtctcagcagcttttgtgtcaggttggtttggaccttgatctgtagccatctaagaactgctcagctccttcctggacctgagatagaacttcttgagcttgaggtcccataactgttctcctccactgagcatcaccaatgatgtgggcaaggaggttccctgtggggaccagctcttcagatctacctagcaccagaacggttaaaactcatgaagtaccgctgagcttctgtgtttggtagaggcagtgctgaacttgtcctgtgaccttgggaaagggaccaactctgagtctccatttttccctctgtaaaatggagataatagctcctctctatcctgcctcacagagtcagaaggatcaaacgagatgatgtgggtaaaaagctttgtaaaccacagtgcatcaggcaaacccatgctatacttgataatggacctcccgatagagcccagaaaaaaaatgctgactcaagtctcacttgttctcccagacagagtggactcattggctgcatgagctttggggtgaagtctctcctgactccagacaaggtgggtcctagggatgcttctgtcaggatcatcccaactgggccggggctggtacaggcagagtttctctgtcagctcttgggcagggcttctctctgtgagatggtgccccactgagacaggtgccctgtggggtggcctgcatagcagcactgtgtttattacctgcctagctgagagtttgggtccccttcttggtttgtcttgccagagagcagtttgttaggcagccccaagtcttcccaggaggctctgagtctggtgtctgctgttgaagacattggcagatcccttggggcccagagcactcctgggcctgccccagaagatgagggccaggtgcacccgtggtccgttccaggggtcctcttcatgtgtctaccaggcctgatatttctgggcctaacaggtgctcaaggatggagtgagcagcaccatcctctgtggagctttccttcaggctggaggaggactctttgggacccaagactcctagctctgggtcactggtcccttatcaatttctacgctgcactggactccccaaactggaaggtggagggtggggagcactccttttgcacatccctggaaatgtcctggtggcttgtggcatggcctgccacgcagatttttgtcctggggtgggtggctgaggaccctttatcctgcatgtgagtcctaaagagcttctctctctctctctcttttttttttcttttgagacggagtctcactctgttgcccaggctggaatgcagtgttgtgatcttggctcgctgcaacctccgcctcccaggttcaagcaattctcctgcctcagcctcctgagtagctgggattataggcatctgccaccacgcctggctaatttttgtatttttagtagagatggggtttcaccatgttggccaggctggtctcaaactcctgacctcaggtgatccacccgtctcggcctcccaaagtgctgggattacaggtgtgagccaccgcgcccggtctagagcttctcttgactgcagccttggcttcattctcctagaaaagatgttccccctggagactgctcaggagccacaggatgccttttggtctctccatccctctttcactccttcacttctgttctgtcaacaaatatggctcctactgtataccaggcatagtgtgaggcacatcaaagagcctgtgcacaacttagtgggggagacaggcaagtagatggttgtcctccagggataagaggctgtgggaatttggcagaggggagagccagatctgccctgagcatcacggaaggcttcctggaggtgcaggcatggcagctcggggccaggaaggctggagagtctgtctctcctgtgggtgggtgtccagtggctacttttggagggggattggtggctgcctgacctgtgcttctgcctcctgtgtctgagcgtgccattccttctctcgtgacaggagatcagtggttggtactacctcctaggggagcacctgggccggaccaagcacttgaaggtggccaggcggcgactgcggccgctgagaggtacctgcacacccccttcagcttcccttcccaggacctgccccctccctcctttcctgcatagcggcatcagtactggtatttggtggcccctgctactgagaatgctatcagcctgctgggtgcagggacttctcaggagcacttgctagagtgcaggctgcaggaagcctcttgcccatgcctccactgtttatctggttggacttttactgtagaggctatggtctgaccccatgtggtttagctccctcccttgtggggtactttatgcttccccagtggccccttcccagctccatgtctcagggatcccccaggctgccttgctcatcttgggatacccacctctacagacagggcgtttaggtcctgccatgatccctaaggctcagaatgtggatttcatgacccttttccatgttctgcctttcccacatgcagccctggctcctgagtccctgtctggattgagcctcaggtgtccccacatcctgaggccaggagtggccctgggcagccccatgggcctgtttcccagtgctgtcctctgggtggtccgaggaggggagacttctctgccaccagaagttttctgattctgctctgtcaccttccagacccgctgctgagaatgccaggaggtggggacactgagaatgggaagaaactaaaggtaggtggggacaagctagggcattgctccaggagctggatctgctccttgacagcccctgggcccgggaaacccctaaaggggcagcatttggtgcttgaaactcagcaagtcatgtactcagaaggaataatttcttgattttcctgaggtgtattacaggaaataaatgctcttctcagggtatccatgatcgtggcaggggtggggaaatggccaggcccccacctctggaaatggaagcatctggatcttactaactttgggcctctagaaaccgagtcctccccttcccacagacttctcggccccctgcttcccctgggactgaggccgaatcaccctcccaggttaggcctgcttgatgtcagggggcagctgcgattctgaacctgagaccaaggtgttctaactctattagggcttcaagtctggaaaggagcctttttcatataaggagttgggagaattctccaaaagtcattccatctctttgcagggcatggcaggggatctacggttttctttaacaagtaagagagggaattacttggccaggtgtggtggcccacgcttgtgatcccagcactttgggaggccgaggtgggcggatcacctgaggtaaggagttcaagaccagcctggccaacacggtgaaaccttgtctctactaaaaatacaaaaaaattaactagacatggtgctgggcgtctgtagtcccagctacttgggaggctgaggcaggagaatcacttgaacccaggcagcggaggttgcagtgagctgagatcatgccactgcactccagcctgggtgacagagcaagactctgtctcaattgaaaaaaaaaaaaaaaaaaaaaaggaccgggcacggtggctgatgcctgtaataccagcactttgaaaggctgaggtgggcagatcacttgaggtcaagagttcgagaccagcctggctaatatggtgaaaccatgtctctactaaaaatacaaaaattagccaggcatggtggtgtgcacctgtagtcccagctacttgggaggctgaggcagaagaatcgcttgaacctgggaggtggaggttgcagtgagcggagattgtaccgctgcattccagcctaggcaagagaacgagattccatctcaaaaaaaaaaaaaaaaaaaaaggagaaacaaactcccagcaattcattagcccctgtataccaggtgctgttacctaatcttcactgcccgctctaaggcagctgttacttccgcatctcacagatgagagggacatacatggttcagagcattaggccctctctgtggccacacagctggcaggtggtgaaggcaggctctgagtgagggctggccaccttttcagtgtgctgtggcacactgcctcctgtgcatggcctagctgggaatataagacattgctgtagttcctaatagtattttacgtattacacaatatcggcgtattacaatctaccaaacattttcacgttcactgactcaagtcattcactcattcatcattcattaaatatttccacctatgtaggctgggccctgtgctgggtgctgggatgcagctctggacctgtctaaggccctgccccatggagcagtctagagctgtgctggccagtgtggtgaccacctgctacctgtggctattgagcacttagtggctagtgtgactggggaactgagtgtcaactttagttttaagtaatttcagtttacctggcacatgtgtctagctgcgactgggttagacagagaaacttgccaggagtaacttgtcaggtttgttttctgtggtttcattagttgaaaagctttcctctggcttctgtggggaactgcaaagacctttcctcctctctttctacttgccaagcacagagaggatggtgatcagggggcctccctcgtgattcatggaaattacatgggcatcaacaccgtaagtttgcttcctccaacatcacaggtttcttggtggcttgtaaagtcctcctgcgtgctggattctgcacacaggccctgagccccttgttctgaggtgcactggattttcctgaacttatgtgctcagagatgtctgtgggactcagcaaagagggtgtgcttctcagaggcttggttggggccgggggagagcccccagaggccatctcttcagctcctgtgctgtgcaggtggggagatggaggcccagaaacctgggtgacctgcccacagtcacacagcaaccaaagctgggttgaaccaaggaaccctctgtcatcaaggacttgagtgtgtggctgggcttccccaggggctctgagatgggcaaaagcagctgggctcaccatgcgctgctctgcaggatgctatcctgggactgccaggcaagaaataggacccaggttctggtcctagccccacactgccctgctgtttgaccataacctctccaggcctcagtttgtttgtcagtaagatgaggacgctgggttgtctgatgacctggaaatcccttccacatttgactttatggtccatgtgtatcaccagatcctgacagcaaaccacttccatggacaaaggacaaataaattgacttttttttttttttttttgagacagactctttctctgtcacccaggctggagtaccgtggcatgatctcagctcactgcaacctctgcctcctgggttcaagtgattctcctgccttagcctcccaagtagctaggactacaggcgcctgccaccacgcccagctaatttttgtattttttaagtagagacaaggttttaccatgttgaccaggctggtcttgaactcctgaccccaagtgatccatctgccttggcctcccaaagtgttgagattataggcatgagccaccacgcctggccgaaactgacttttaagtagtttccaagtggcaggcaggtcttcagactccaaatgttttatgttccctgtcatgagatgggatgtctgtgagtgcaaacccccccaaggtatccttggattctttaggctggggcagtctcctggatttctagcagggtccctgggacttgcagggggaggaggtgttgttatagagcagccacgttttctgcctgggttctcctccagtgaggggtgtttgtgagaacattggaatcacaaagtggcccatggcggagaatgcagccagaacaaaggcgccctctccccgccgggcccggggaatactaactagttgacaggaattttaatataaaactctccctcttccttgtcattctgaggtttcaggaagccttcgggcttatcgtgcagaggcacacagcacagacagggcttggggaggtgagaggtgatttcctgccattcttctgtggggcgggcttcccagggtgctcatgccaggctgacgggtccagtgcgggctcccgctgctgggggagagctgggttttcatggggcggcagccgaggcaggacccgcagccatgaaccgcttcaatgggctctgcaaggtgtgctcggagcgccgctaccgccaggtgggtgcttggcctcttgtggggagcctgtggggtgttcagggataggggtagagggaccatctgagaaggatctcgctcctcacaaggtcttctttgacctttcctgctccctgcaggctcacttggatatggggaggaggatagagacaggagctggacccaaggcccctttagggcccagctctgtatggagtcctaaccactggctgggtggtgtttttggtgagataatccagctagctttctgttctttttatctggggaggggctgtgggtgtgagattgaaaatgccatggttgctgagcagctgggagcagagtttgtatttttgctaacttttcctgcttctgacaggacagcagtgcccattctgccccctgtgcgtgtatgttggcacgtgctcatatgtgagatcgggtgttttcgtgtatatgtacatatgtataactttcctctcccctactgctgatgcctcactatggctcaggattcctttggctttggaatccaactttacagtgagggtttggcctcttagcctccggtcttagaaagggggaagactgggccattatgatcccattagctcccctgagcctcttctagaactgtgatgggccattttttctcataaaataggaatggggttagggatggtgaaggcaagtgatatctaatctggaagggagttctgaaattgtcctgattttaaaaaatcacatagagaagcccctctatttgttttaatgaccagattggactgtgggtcttgactcctctgactggcagtgcttaggtcccagggagatgcccagaggggtccctgcccccccacctgcctgctaggggatccagtgttttctctctagccctcccccgctctcaggttctgcccttcaggccccactctgtgtttcctgccctcatggggctgggaaaagcagcccctgcgacactagcgtctggatggcagagtggtgagacagagagagcactggttgggacatctagtagtccttggtcaccctggggctatgggctagaagactgggcatgctggctgtcagagtggggccaggagcaattgtgggctggacctagggctcagggactcagagttcaagatggtttctgtgttagaaaccagtgcagaattgagagcagcaagctttttgtcaggtctgagctcaaatctagctctgttcctctttagctgtggcttttgagcaagtcactgttcctctctgagcctttatctcctagtcagtaaaataggataatgaaatccagcgatggtgccatgggagtgaataggatgatgtgtgtgaagagcctggctcagtgtctgctgtgcatatttatctaggaggtgtttaatacatggcagaatttggggattacagtctaggcaggacagaggaacagaaactagacaggagagcagaggtaaggggctggcatgggtgagacctgggagcagtggctgttcctgccctggacaggaaagagcgagaaccacccgcaggaaggacaggctctgtcagaagccgccaaggcctcggggcagggctgctcctttcacctccaggtcagagcagggctgagagccggagggtggagggggtggcacttcgagtcttatctccttgtctgtaaaatgggcatactcattcccctaggggctgcagggatggtcaggttctttggacactaccctctcaatgtggtcagtgatcatggtggacagagtgtaattctgcttcctccgagctaggaggtgagcttgcctcccggcaccctctcctcttcccctccttcacactcccatctggcttggactgtggtctgggctggcacttcttaagctggtgcccaggagggtgaggggcccccagcccacagtcctgcttggatgtggggtctgggtgtgggaggaggaggctgttttcttggagcacactcctccccagaccccactctccagttactgccccataactggccatccagagcccagggtgctgggatgggttttctatgcagggggctttggccctggatggggtaggggtggggaagtgctggataggctttgggaccccagcttgtgcttgggttgagggttggcttgtgaggcccctaaaaaatccccgctggttccatggagggggccaggctcctggcgtcttccctggcctcaggcgggcccggcaactagtggctgctcctttcccccagctttccacactcgtacccgcgtttgtttttctttctttctttccatttttttctcttcctgtcttagctgcgtgttttcccagaattcttatgggaacggggtattttcctgcctcctcccccttccccttgtctgtcaggtttcctgttttacaaacttgctttgaatccaggcccggggctggtgggaagcagagcctcagaggtccctgcagcttccaaggcccttggtcactctgagccccctcccactcaccttccttatgcctggccctgggatggtgggtaggtgaatgagtgcaggtgcctagtcttgcagggacaaccctcaaaggaaggagacagaagtctcctgacaaggcttgtgcccttgaccttttccaagcttgctgagctggcctttgtctcaactcacttgggacacccttccctgtgcctcaccagggcccaccccaagtcccagtttctctagggggtctctcgggaccccttgaatcccttttctgatttgtgctgcctttagcagccggaatgggctggcagaccaccctacatcctcctgtgtgtgggacactgccaggctgtcctccctgcattagcctctgctgagttcctaccatgtgccaagcatggcgtccatagtcggagcataaaggactgagaatggcccagtcctcctgcttttctttagtgcccgctgtgccctgcttcactctggagaggtttgtgtaccctcgtgctcctctgggaaccagagaccaaggctgcatgcctctgtatgtccacagagcctggcatgctgtaggagctcaataattgtgtgccagtttgaaaagagcatccagatggcaaggccctctcatggacttctgaaagtaggagttgtggacctgtcaagcacatgggcctcagcaggcacatgagtcagtggctagttcaggttcagccaggaagcctatctgtgaccttacctgggagtcctcatgggatgccttggggccctggccacagattggcccccagaacctcagctctcttcctctgacccttggcctgagatggagtgagtgtgtcccagtgtttcctcccctgtgctctgggagggcagtgaccaggctggccttgactttgggcccttagcacagggcccgccccaggctaacgctctgtgaacctctgtgagaaaggaagaagggagccaggaaaacagtggatcaaaggtgaggctgagtcatgcagtgctggtgggcccttggatcaagggctggggctgctggggctcaggatggcaaagtttgcttttccaagaccttgtccatcccaggccctccccacatcagcctgggtttacttgctgagctttgggccttcctgcttggcccacaacccagtgctcaagttgtctgggctgagatagggacactgaggggctggctagctcctttgtgcctccagttcccttggagaggagggtggctcttggcaggggtgggctgtgggcttcctgaccttggggtagaggcaagagcctccagcttctggcagtgaccgggcagggctgtgtcctagatcaccatcccgaggggaaaggacggctttggcttcaccatctgctgcgactctccagttcgagtccaggccgtggattccggtaagttattgacagggggatgccaaccccacttgcccaccacacatgtgggctttgcaaacatagtctggaactaaaaggggagccccaaactggagcaaagtgtcctggcttttcaaaatgaaaagaataatatttttaagtgaccgtagatgaaactgccatttatgaaaatatgcccactttttttttgttgtttttatcaaaatgaaaataggtttttatattttgtttcccaatcagtttgaacaggaactaaacctatattttcagcaatggctgcaagggaaaatgagagtcatttgtgaactctatttgaagctgttttgtatcctatccagagcctgatcagcacttaaaaagagccatccttccctacttttcacaaatgaagatttctcttaatcacagagtgagcatctcaaagacagaagccagggctcagtggtcagggtgtttccagtgcctacacaagggtgggcatgaggttcgtgcacaatgattggcagagaaggaataaatgtagtgtgggagcctggccccagggaaggttctcaatggggtaggaggccctggggaggggtaagggcccgggtagaagggtggactgcagagaggtaagccagcagtaggggaggtaagccagcagtaggggaggcaagcagggagaagggaaggcaaagggatgccttctttcaaggctcttgagaggcaccaagttcagtccctcatttcacggatgaagaaacttagagaaaaagggaggtccttgtctgaggtcaccatggcagcaaaggactccagatcctttgaaggggtcttaggcttcaggggcccctgaatggcttttctttgtccctgcagggggtccggcggaacgggcagggctgcagcagctggacacggtgctgcagctgaatgagaggcctgtggagcactggaaatgtgtggagctggcccacgagatccggtgacaggggacagcgggtggcctggggcctcaggctgatggcacaccctccccacccctgggcacactgccttgcctggcccagctcttgctgctccctcttttgcctagctgtgagcaggcaattccttttgctcttcaaggaatctgtttcttggcctgagaatggaaggttcaggctcagagcacttttggattccagagcaaacagcagggaagatgctctcagactctgtggttcaggacggggcaccaggaggttgctttctgctttagctaatttttgttacctaagagctaagcccatttgttatttaagggcatgaagatgttgcaaatgtttcaattgcacaattaaaaaaatattcttgaaaacattggagtctcccaaattttgatcctctagggtaaaaccccgatggccccattttaggtctgcttctggaataaccagatgagggcttgcacttaggtgacctgctagctttacttgcttatatcttgcttttgataagcatcatggattgagtatggaactctttcctgttgaaactggcctggcctcagggtccttctcaaccactgcccgtcaataggaattgacctaggtgacccatttgctgtctcttctttaaatggcttcttgcatcccttcctgccctgacactgggggcttcccctctggtgtctgcctcctcttcccccattatcctctctgccctgtgggccctcactctggctgatactggctttccccaggctcaacctgtctgtgtgatcccccaccttccaggagctgccccagtgagatcatcctactcgtgtggcgcatggtcccccaggtcaagccaggaccagatggcggggtcctgcggcgggcctcctgcaagtcgacacatgacctccagtcaccccccaacaaacgggagaagaactgcacccatggggtccaggcacggcctgagcagcgccacagctgccacctggtatgtgacagctctgatgggctgctgctcggcggctgggagcgctacaccgaggtggccaagcgcgggggccagcacaccctgcctgcactgtcccgtgccactgcccccaccgaccccaactacatcatcctggccccgctgaatcctgggagccaggtacggacagctggtgtggggaaggtgaagggtactgggtccctgtgggaggccaggaagacttgaagacccaaagttgtgtgatgagcagcctgtgaggggctgcgatgttgggcaaggagatggggtatgtgctagctctgccttctgcaaggctgttcttggtagggaggacagatgggtctatgtggcctcagggcacagattcaagaccagggcatgcacaggctggaagatttcaactcacagaaggaagagctttctactagcctgtgcttttccccagtggaatgggctgccttggtaggtggtgagcccccatcataggaggtatgaaagcagacactgcatgattgcatggtgggatgatggagtgcgctccccaaaacattagtcccatgagatgctctgggaaaaaggtgttctgaggtcaaataagcttgcgacatatcccataccctcttcctcatctaggagattctcaatgcaaaggagcctagtagaggctctgctggcatcctgtactacagcaggtgtcaaccaaataacaccgcatttcccaaacttgcctaatgggggcacactttagggcgtggttggtaccgtcttaccattccagtgttccctagaatgcactttggaaccagctgctgtaaaggaagttggggacttgccaaggggttaggcttcatgacccataaagcctctttcaacttgaatattctgggattttgtgttctctcccagcctcctccctcagctggttaccagaactgctgtttttctcttgtgccctgaggtgctccacttcctctcccctggggcccccgtgtccagcagcctcctgggctgtcctgccctgttcctggggctgaggtggttttcctgtctttcccttgcagctgctccggcctgtgtaccaggaggataccatccccgaaggtgagtctcctgctgctgctgtgccctcctagctcagagaggcagcaggggtcagctgaggcctggcccagcctccgcccctgagttctgaggcctttccaatggagtcaggtcacttagcctatcgacacagactctctttccacgtggtaccttttctccctcacggaaccaatgtctttcttccttgaagccagaactgagaaggaggagaggggatcttaccagggcattttgagagaccgtgtgtccaggcctcaggcattcaattgagattcatccaattttacagagcaaccgatatatattaggtgccagaggcaatgtggttgggcttgcatggaagggagtcagggagcgtggaggtgggaggtcttgagttggagttctagctatatgactttgagcaaatcatgtctccttggtcgggcgtggtggctcattcctgtaatcccagcactttggcaggctgaggtgggtggatcacgaggtcaggagattgagaccatcctggctaacacagtgaaaccccgtctctactaaaaatacaaaatcactactgggcgtggtggtgtgcgccaatagtcccagctactcaggaggctgaggcaggagaatcacttgaacctgggaggcagaggttgcaatgagccgagatcatgccactgcactctagcctgggtgacagagcgagactctgtctaaaaaaaaaaaaaaatcctgtcccctcgctgagcctcagtttcttcatttataaaatggggtcaataattcctacctcagagggttgttggggggatcccatgagagaatggttatgagtagttgcctgtatactgagagaggctatacagagggtagctgtctttgaagtgcacagatgtctctgctgctggatggattcttcttctttggcttttaaaatcctgatcaggggtggaagctgagctcaaaaccactttcttctcccaggaaggctgagatattggtcttgaggctgaagctggctgggcattccttgagatccttcgcgtgcctgccagaaagctttgactcagaagtccatctggtgtctggaccgccttccttgacagtggcttttgcttagccactcacagacttgcttccttgctgttcccctctcagtggtgtgaaggcgatgcttctagggggtagttggaaaagtgcttgtgccttttgcgggtgtgaagcgctcccatcaggctcagggatgctgatggaagacatcttctttctctccggtctggggcatttgggcagttgagcctggtcagttggaaataaatctgtgttccttctggggagaagtccgacagcaattcaatgatgagttttatttttattttttatttttccatagattattggggtacaagtggtatttggttacgtaagatttttagtggtgatttgtgagattttggtgcacccataacccgagcagaatatactgcaccccattcgtagtcttttatctctcacccccctcccatccttcccccgaagtctgcaaagtccatggtatcattcttatgcctttgcgtcctcatagcttagctcccatgtatcgttgagaacatacaatgtttggttttccattcctgagttacttcacttagaaaaatagtctccaatctcatccaggtcgctgcaaatgccgttaattcattcccttttatggctgagtagtattccatcaatgatgagtttttaaaaagcttttggttggcacattaggttagagtggagatgctgcagctaagtagggacttcattagggtcaaggcctgggcctggcttatttctgtaggtccagtgcaggacccagggcctggcggatggcagatactcagtagaattttggttgtgtgactgactgaaggagaacgacttgggttgcctctgaggctttggagtctggtcgtggaggaggggggctggagaagtgtgctgcctggagtgggcccatgcacacaggctggtgtctggggttgattccttctcagttgagaggtacttctgtgtctcccttctgtgctcccagcctgtatccatgtttcattcccctctgagagtataatacatagtaagtcagcaagagcacagttatctaagccatggggaaagggacaagtgaggaaatgatgatgatattaataaccatgctagctctttgaatgcattgtattaagatcctgaccttactttatgtattcttcataataataaatcttcactctttaccagggatcaagtctttgtagctcacaattttaggattcagaggaaagggtgaaattcagggcacacaatttcccttaaacacacttgggattgtccagaggttaaggctgtcaccagggtgctggcttcttagtccccctcctctggctgggctgccaagagatagcccttcaggagtgttgggtcatcctgagttgaataggagggagagttaagccatcctgagttgaatagggtctggtgcccttccggagcccagagtgcctgcccggctgtggttggcatgtttcccagggctgctggtgcccttggcattgtccctgccctgtaaaggtgacctggcctcagattcgccactgccagggcagggtggctgccagggctcgcctcagaatctgggagcaaagccctgtaattactgtatttggtcggtgaagcaggtgttggaggagaaaagggtgatatgggggtttggaccagacatcggtagcaggtgggaagtaaatgagtttgccttcacagagctcagtaactgggttgcaagctgtactgttctaaaaaaaaaaaaaaatcagttttacagagccactcccactagccacatattatccaggggtgggtggagattgggcacaagggcatgactgctgcataggttgggttaatcctgccttgtataatttactagccaaatgaccagtcaccctaccattccagacctcagtttccttgtctacaaaatggggctgagccgacttttcctctctgaaggcagaattatgtgttgggtacttcaggtgaggcccttggtgaggattctgtgacagccctgggcccctgggctagagaagggaagaaatcaattttttaagaagtccgagactgggggcccaggacccagattttggcatttacagttggtacccatctttacttttggtctattttgttccagtcatctgcttgtcagtcctgcatggttttgccttctctgctgtaggcttaaccatgttaaattagactgtctagatccaggctggccatggggtttcattcacagcatggtttgagaccgagcagccctgcctatccttctactaaccctggtaggtggattacttggaggcttaggatttgtgataatcccctgactactcacactgtggtacaatccaccaagctcttttccatcaggtctcttgtgtgaacctcccactggccctggggcaagcgaggcagcaatcagtattatctccacttcaaagtggagaaaactttgattcagagaaggaaggaagctgttcagggttacacagactgtctctgacttgggaagtcagtgatcaagctcgggtgtcttatccaactcaaattcagtgatgatcttgagactgaggatggtgctttaaacaaagggtccagggcctggcagcacacatccctctgggactgatatgtagggccagatcagacaaggagctatgtgacatcttccttgtatctgttcctcctgtgcccatccagggctcatgctcattctactcctctctccgtgactcacagaagaggcaggaagtggtttgagttatcatggtttgagcgctgcccccagatttgtctatgatcagtggtcacttgtcaggggcacggggggagtcaacttgtttttcttaccttgcttggtgagaaggggctgggggtgggaggaggaagcaagtgtgaaaccttctgaggtgagttttatctccgaggctgtgggtgcgcgttggtggggagcttccctgaggtatagctggggtcaggccacctgttcccccctcgctgccagggctgctggcagcagaagacagcctgcacccaggacccaggctgggcacccaggtcagtgaggacctggtagttgcccatacagtagcaggaatgccttagaaggggcccaggagtgtgtggagcctgactgctttggagtttccctcccacctgcttggtccaggaacccctgactttttagcgactttgtgttttgtccctctgcctactagacggaatgtaacaaaaacctgtgcacaggctgggcatggtggctcatgcctgtaatcccagcactttgggaggctgaggcgggcggatcacctgaggttgggagttcgagaccagcctgaccaacatggagaaactgtgtctctactaaaaatacaaaattagccgggcgtggtggtgcatgcctgtaatcccagctacttgggggactgaggcaggagaatcacttgaacctgggaggtgggggttgtggtgagccgagatcggccactgcactccagcctgagcaataagagggaaactccgtctcaaacaaacaaacaaaaaaacaacaacaaaaacgtgtgcaccaccccttgttcagggtgaggggtgtgtgtccatcagtgtccccttaaagagggacccctccccccacaccgccgttgcagcctctgctgtccttcctgggggtggtcttgtttctctgtttctctctctctctccttatgattagaatgatttgtgagttggtggccaagccggagtacctcctgggtacagtgaagcctgggattcccagagtcctatggggcacctgactcccaaacttgcttttccaagtggagaaatcacaacaacgaaacaacactgagtttgcagctaacttttatcacacacttactaggtcccaggcactgttctaaagactctaagtgaacttagagtatttcatttaatcttcactgtaacccagtgagcttggcactattgttacagttgaggaaatcaagactctgagggtgaaataagttgcccaagctcactgagctggtaagcaggggagcaggatttgagcacagccacctggctttgaagcttgtgcgctttcctgtgacctggggcagcaagtgccactccttattctagactgactggagtgggccaggctgctctagctcccttggctacagagggaggactccagtacatcctgggaaagcctttggtctccgctgccactgctgcagagagtggatttttgtctgtggggcagggagggaggaaacagattgggctgggctgagcttgtgcagggagtagtgggaatggtgtgggggtctgttaaggagagcgcgtaccctgccacacaggctggtcaccactctgctccaactgattgttccacgtgggactgtgggctcagtgaggacagatcttctgatttttcaaatatgagcgatttcttgatttttaaaagactgaggccaaaatggaaattctgatccggggcctgggtcagcaggtggagtgtgctgcctccatcatagctggtggtgcccagcgctgtgctagccctggacttgcttgctcacgtgtcaacgtctctcactagagtgcgagggaattccttgaagcccgagcccatgtgaagcctccctgtgtttcagcatcgtgcgcagggcctggcacaaagtagctgctcagaaagtggttgttgacggaatgagtccgtgtcccctgtttctacagaggggacacctttgcaggagtgacggaaatgtctcatagtcccccatctctgtttcacagaatcagggagtcccagtaaagggaagtcctacacaggcctggggaagaagtcccggctgatgaagacagtgcagaccatgaagggccacgggaactaccaaaactgcccggttgtgaggccgcatgccacgcactcaagctatggcacctacgtcaccctggcccccaaagtcctggtgttccctgtctttgttcaggtgagcccgtggctggtcttaaaggttccctcaggaggaacggagaaagaggagggcccttgccccaggactcagggatgatgacttatcccaggactgagggccctgttttgggaaagataagtagctttagatgcataggattctaggggcttatactgagggagcagagatttccagggagatacacaggaaaaagtgaggccgggatagcccagtaaggaaagggtcctctccttcccccacctcgcctcccctttctctggggaaagggcaggtgcaccccagctgcttgttgccatgtcacagggactgtttgccaaagctcccgctccctggctcacccagtggttttttatttgaaaataactgagggagacccttggggtctgtgccttatctgctctccctggtctctgcaaacaagtttggcctgtattcactggtggcctgcgattcactagatcgctcttattctccaacgtcaaacaaagtgcttgaagaaagataatgaaacaaacagcaagctgggcctgaaatcccagctacttgggaggctgagatggaaggatcgtttgaggccaggagttcgaggttacaatgagctgtgatcataaccctgcactccagcctcttcttcttcccccttttcctccccatttatctctccttctctttaaaaataacctttattgggccaggtgtggtggctcacgcctgtaatcccagcactttgggaggcctaggtggtggatcacttgaggtcaggagttcaagaccagcctggtcaagataaaaaccccatctctactaaaaatacaaaaaaattagctgggtgcggtggcaggcgcctgtaatcccagctattcgggaggctgaggcaggagaatcgcttgaacctggggggtggaggttgcagtgagccgagatcacaccactgcactccagcctgggagacagagtgagactctgtctcaaaaaaaaaagaaacaaaacaaaaacctaaaaatctttatttattccatcacccagatatgatagtgtgaacatttcagcatcttttctgtgtgcatatgcacattaaaaaacagaccttattctatattttatatcatgttgcctttttaaaaggaaaattgtagcatgaacctttcccacaccactaaatgctctgtgttttacggtggttgcccactcttcttttatatgggtatactgtatttatttaaccagttctgtattcagatacttctgtctactcttttgctattgtaaataaccctgtgatgaaaatccttgcgcatggattgcctctctgattattttccttgggagagattgctgaaagggaaatgactgggtcatgggtcataaacattttaaaggctctttacacatattgacaaattgctttgcaggaagattctaatggtttatcgtcttatcagcagcatagacatgacttggccccacgggcttcatttctgcctgtgcctctctggtctccctggcatcccagtctgagcctgtcactgtccagtaggcacactttgttaggatgcaacacatctctgggagctcacacgcctccccttagacagctctgtcagcagggcctggccttagcctttctgtgggtctcttctctttcttagcatgtgacacaaagttcttggcatctacaatgtctaattttctttctttttctttttttttttttgagatggagtttcactctttttgcccaggccggagtgcaagggtgcgatctcggctcactgcaacctccacctcccaggttcaagcaattctcctgccttagcctcccaagtagctgggattacaggtgcccacgaccatgcctggctagttttttgtatttttagtagagacggggttttaccatgttggccaggctggtctcgaactcctgacctcaggtgatccacccgcctcggccttccaaagtgctgggattacaggcatgagccaccacatgcggcctgtgtctaattttcatgttcattttaatatttgtataagaaactacttctatttaagagacagtctctcgctgtgtcccccaggctggagtgcagtggtatgatcacagctcactgtaacctcaagctcctggcctcaaatgatccttccacctcagcctcccaagtagctgggatttcaggtccagcttgctatttgtttcatgatctttctttaagcaccttgcttgatgtcatgtacttagaagccatattagaaatatacagtcataaggacaagtcctgctgggtaatccagagcttagggagcttcctctgggctgggctgggcaaggtgagggagtagggtgagaggtttgggtgataattgacccttgggggattgcctgagaaggagacagttcaagtgtgctatgagtgcagagcagggactggcctggctttgaagggactcaagtgaccaaatctcttggcatgtggctctcaggatgcctcttggtcctgtgaggcatgaacaggatagatgggggatggcgggggctgggagggcccaggagcccagtgcagtggggggtgagagctggggctgaggactgcagagggcctaagcctgtggttagacttcctgtcaatgagtgtagctctcacggtgagggttgatggggaaggtggcagcaacagttccacaggacagcagcgtctctctttctgtttccatcttatgtatgagggggtgtgtgggttctcgggtcggtggcgggctgacagtcttctctgggtcagagggttctctgtggctggctttgacaagctgctgcttcctccccccgggtcctcacccagcctctttttgaactgcccactcagcctgctttatttccagcctctagatctctgtaatcctgcccggaccctcctgctgtcagaggagctgctgctgtatgaagggaggaacaaggctgccgaggtaagactttcacctgcattttttagggggctttctgggtgggcttcattggcattctccaggcccctcactttggtctcttcctgagtatcttagaattgtacattctcagggtaggggagacctgagaaggaccccgccactctccctagcaaaggctacccagctttttcttgtacatctcctttcaaaagctgtcgaatccttctttgatggttagaaagtttccccagcccctaaagacaccccattgtttatcccaccttcctctcaggagcagaagagatggcaatttaccctggctgtggggagtgactttggtggcaggaagagtaaagctattagccaaagtgaatttttagaccagcatcagtttacctgagttttctgggcctgttttaacccaaatcccatgtcctcttctgagagacgagtctatgatttcgcctgggttgtagctctgcctgtggggtgctgacatgggacctgtgtcacccttcctgggagctggcctgggatgcttttctctaattgggagaacttcattcatctacacaaccccagagctggtcagttcagtctctgagcttaaactacttgggtacagaagttggagccctgggctctgccctggctacctggggccatggggtgagggtagcaggctctttgcagatcaggccccaatgtagagctgccttggctgagtcgagtggcagcttggggtagtggaaagatcaggaaacttggagacaggaagtttgtatcgagacccaggtctgctgctggctcacatgtgatttcttccttcttcctcagtctttccatctgagcagtaggtatgtgtgtatttgaggcagtaagggcagggtcagaggttggtctgtaaggacgctttaaacctcagccttctgggacactatgtgtgactgtggctgaagcaggaggttggtttgttttttaagtaagcagactggactggaactcatctattccaaatgtacattatctttttcaagggagtgccctgggggactgcatgctcccttccaccgctcgctgttgcctactgtatttctggacctcctcttttccgaacctcctcttgggaactttgcaaactttgggaacttaacaatctttgcatatcttctgaattgtctcagtgggagtaaaacttcatctgttgggagggatttaagttttagggatgagaagtcacttagagctatgtttggtgaatgagagtgtggtggacctaagtctggcatccaagggtcagaaattgaggtgtggccataaattcacagactcataagaagccagttagagatggcagccaccctgaaacatatacataagtctaaattcactcttctgtttgtccacttacccttgaatctgcaaacattgagcacttattgtgtatcctcattgtgtatgcattttacatacttgaccccaattagctcttgcagcacccccatgaaaggcacgattgtccccactctgtagttaaggcaactgaggctccagtgagattcactgggacccaagagtctccaggctggtaaggaatggagccgggtcatttctggctcagtgatgctttccatgaccccacactgcttctggcatgtctgcataaagacaaactaaggaacacaagctgaagccagagccttgtgacagttgcaattcgtccagaaaaccctgccttatagatctctggagacttagaaccaagagacccctctcccttagccttgaagattgaaggaaacaatttgaagacaagtaaaataaatattaatgtattcctttttgttgaagtatgatggcaaccaaacatgtagatctgggcatcctgtcatattactcacaccaaaaaaaaaaaaaaaaaaaaattcaaagggatttggataaattcatgaaatctcagcattggttaggctttcaggagtcatccatgctaattgcttccttgtaactttccagttaaatggttttctgattggtgcttgaatcttctagggcagcccattagagcagtggtttttttttttactgggaagggctaaattgtagagcattctcccttacactcaacagaaatctttatttgtggaatgttcctccttggttctttgtcccatcacttctctgggcatgctcaagtttgctaacatctgtgagctgatccagtcccgcaccgtgaactaccctcatcacagccccttccagaagtaatagacttgattaatgtgccctgaggtctatggccctgtgcgaggttctgggaataccatgaagcacaagacagacacaccctccctttacacactgactcatggagtttaccattaactaaggcaccaaagtctttttggtaaactctgctcttaggtcagattcccaagaagaagcttagttagggccacttgggagaagccaccctccaagtggtaaggacccccttaccaagtgatccctcaactctgaccctttggaaaatcagatgtgtccttggagcaagtgtggggaagacactgggtgacccccgtggcctgtggaaggcgacaggtgattgggccatggagatgggcatcactctcccatgggctgccgtggcccctgctggtgctggtgagatgggggagtccacatgccctccccggcacgcttgcccctctgctctgcctccagctgtgtgccagctctggcctttccctgacccaacctttgggaaatttttcatttatgccttaatcacttcctgtctagaccatattctcagccctgggaatctgagccagagtggtggcctgggccttttctcaccttgctcatggttcttccccagttgctggtggctcctcctacttgccctacttccacccctctctgggcctgggctgttttttttttttttttttttttaaactttctaggctcctgacagattgtcggctccagcccttcccctgccagcctccctctgggtctggaggtgactaccagatttcccttgagtcagcgacacgttttgtgggaccctgagggtttgctttgtgtttctggctagtttagagccttctttccattgctcggactttgaagtcttctcagacaaccaattccttgactccttctgagctcttgagtcattttcttcacctcatctcttaacattattattatcattattattattaattattatttttgcctcatttgctccacctctttggtctctggattctttcacattcaggaactgcacagctgtaagcacattggtatctctctgtatagtgatagctttaggtcagctatacctgggtaatggtccctggctgtgtggccatggacaggtcacttaacctgtctgagctctagggtcctcatctgtaaatgagggcagtggtgttatttataagtgaggatccactgagcagaaaggaagcgttcaacacttgaagacttctcttgggctgcactgagacagggctgtggtgggaagggttagggtcactaccaagatgccttatagcccagggttctggagtcctcatgtttgggccccattggagaagccaaagcccctgagagctccttcaaggacgtctccctgttgtctctgcagcccagatttcctcaagcctctgtatttgtgctacactcaagaagccaagccatattttgatatatattctatatttttaaattacaaaagtaacagtgattgcaaatataatacacattaaatcaaaatgtatcaattaaaatcccactccctggagtgaggagtgtggcatcttaactattttaaaaatgtataactatagagaaatgtgttgttttgttttacaaaattggattctatgctagatatttttgcacattgtactattttgatttacgatagacagatttctatttctgcccacatagctctactttattttttaatagttgcataaaattctgccgtatgaagttagcacaattcattttattcatcttctcttgatgaatgtttgttattttcttaaattacaaaaatgctgctgagaacatcctcatatgttcatatttatacctccttgtaagtatttctgtaggatagagtctcagaagtgaggctgtggggtcatctttaacaggttgatagctgaatgtcaacctgttggctttttaaatgtcaccaacagtccaacacacactcacggtacccttcagtgcatgccaagcccttctggctggttcttcttcagaagagacaaggtgtcaggtgtttgatatctcaaagggaagttcacatacttaataacactttgttttctttggagaatctaaaattggattttattgcttttgactaaaggccactgcaggatttgcaaaacaaagaacagtgtaatctttagtggcattaaaggatcaagtggattttcttagcataaaaatatgctgagcgtgcctgttggtttacctataatgtctaagaatagcctctgcctttatttttggagcagctaatgcatgaaaaagataaaagtgatgtccatgtctgtactagagtgtgagtaactggctgtttcttaaactgatttctcattaatgcaattaaacttatccacaaggaatttgataatattagctcacattgtgtggcgctttactaggtctgcaaaaagctcttggaaggatcctgtaagaatgccaagcagggactcttctccctgtttgggctgttgagaaaactgaaggggttaaggggtttaagccaatatttttgtggctagttggtggcagagctgggataggagcctcctgacttctgactttcaagtccagtgctctttcagccagacacttagagcagaataaaagcaaatatggaaaatcttacagcttaaggattgctccaagccccaggtgctgggctggaggctccaggagcatttggtcagagatgtaggcttcggggatcaggctgtggagaggcttgcagagaccagctgccatggagggtgagggccacttttccccttctgtttgcttttttcctactttgaggagtggaagtataggaagctggagggtgatggggccatcttgactgcaggtcaggactgcccttggctgaggctgtactgagcactgctcctggttttgtgtgagatgatgaggatgcattatctggggaggctgtggctccccaccttctcggggaggttgtggctctcagcctccagaggacagcaaagtagccagttctgtttgctctctgtcaacccaggtgacactgtttgcctattcggacctgctgctcttcaccaaggaggacgagcctggccgctgcgacgtcctgaggaaccccctctacctccagagtgtgaagctgcaggaaggtaagcagatgccgtaggtgcccagagcccctctcaacttgccccagtcccactgctctgggcagccctctgggatctggctgccagtcatccgtagggcactggagtgtgtgctgctgggctctgtccatgggctagtaggtctcagacactggcattctttctaggctggtaagccttctgatatacctgaggttttcagggaagtttctattctagagactttccagagaggctgtggagtcgggtaggaagagctttggattcagacagacctgtgctcaaatcttggccctgtccctccatactgggatgactgtgggcactgtactcagcctctctgagactgtttcctcccgtgtaaatagggataaaaatagtaaccgagaaggttgctgtgaagattaagctaggtcataaatgcaaagtgcctggcccataacaggtgcccaataaatacttgttgccacccactcaccccacagatctgtggacagagaccgcaactcggctctactcagctgcatggccctgcggagcccaagccgctggggctcaggcacatgtgggagcgtggagggaatttctaacccaaactttccaccacgccctccactcgtgggaggggaagccagctgggagtatctgtcagtggtttggtttggcgcctgaggtctctgctgagaggggctcggtttcctctcccagatcatgaaaacaacagacccgtttgaggatgggtgacaggggcagagaggaaaatattacccagtgaaagaattctgttttggtggggtttgctcgggaaagcttcctggctgtttgcaaactgtcctgcctgcttagtgcctgagtgttcctcctcctcggaaacccattcagtatgagaaccgccactctcacttccccacaggaagccactgacaacttctccatctcgggctctggcctttcccctgtccatggaagggaaaagcaagtcacctcactgggtcagctcctccctccaggcgggctcagcctgaccacagggcggtgggaagaagccgcctgagcaactccagttccggcactggcattcccagagttccccatgcctgctggagggcattaggttggagttccagtggcctctgttcctgggctttcctgccatcctctccatacccccagcccctccctggctccctcacacccagcttcccatatgcccattctccagcctgcagtgtgcatattcacacatgcactcacaccgagtcccttcttctctgcttccccctccctgcccccagcccagacagtctaggaccccatcacatttgagggaggagcactggatgggccagggctcagtaatatgccctggttggtacatgaatggaaccctctctctgttgtgcacattacaaggctgaagctataacccaggaccctggtttgctcagcttcctgcgagaaggagggagggaagagaagcaaggctcacactggctacaatttgggtggaggtggaggttgcggggagaaggtagtagaggagctgagggcagtggctgggagtctgggatctgggcgtggtactgctgtgctgtgctgtgtggcttcagctggccctttccctttgccttcagtttctctgactgggaactaagggtggggccagcgctttgtgtccctcccagctctgatgccctcacacagaaccccagagcttgctgtgagcagctgctggaccatgcctatattatcctgcctctacccctctgggggcctggttggggaattggttgggatctccccttctggaggccccaggccccagacttgaagctaggggtggggtgtgctccatcctccactgggttgtgatggtcaaggtgggtggtgtggggccttggggtgtcacagagactctccaggtgctgagctgcttttgagctgcagccttgtgtaagcttggcactgtggcttcctctccctgcagatggagggcgagctgcacaagggctgaggatggccaaggcagtacttctcaggagagaccaccatggacggaagagccccttgggttggtgtgggagaggggcctgtgtgtgtgtgtgtgcatgtgtctgcctgccctggatttttttggatagatggtttggggccaaactccagggagcctgagagctgctgagagggatggaaatggctccatttctaggtgcacaatccaacgcttagatttctttccaggcaccgatagagcccttgccttcccccagctgcccccactcccctgagacaggcttgtgggcccagaggctcatggaagtttagtgaccccttctcctgcagtctaaattggagccgcaggacccagtgttctgagtcctggcgtccaatttcctgcctgcttcccctgtgccccaagagacctgctgcagcagcaagggcctgaggcttttaagggatgcatttgggacctcagctggagcctctgttggcagaatggtctctgattaatattgctcatgactcctaggtttcttatttgtctctttcaaaccaccatgtatgcagaattcaatttggggcaaagaagatggcaaacaaggaatgcacccaacctttctggctggttggggctggcaggggctgctccctggcaggggagaatcagccccatgctagggaccaaggtatccctgtgtaacttgtctgaagagtccttagctccattggccaagcatactcccagggcctagcctggggcatggaacactgtgggtgcctaatcaatgtttgttgtgtgaatgaatgactaaaaggagagcagaagtgttgcctcagttcgggagctgggggtgcacctctcccccagggctcctgggtggtagtcacttaaatcttgtctggccccgtcctgcccagcctcccctaggcttcagcagggctgaatggcagtgtaatgggaacaggcggagagctggcgctaacaattggaacatctccggtcagccggggcccattgtggtctcttcctgcctctgctgcccgctagctttgctactctttgtgttgctgcctcccaggtggccagcgtcatgcccatagtgtgtctttctggcctgctctggtgtctcagaagtggcctggaaatgttttgctgattattaggctctccagtcaccttagagccaggtaggcagttgcagaaagtcagttgctttggtctcagctgctggaatgtttggagttaactcttggttagtcctcattttctgagcacgtcctcagaacccacatcagtgatagcagtgctggggtggtagcagtggaagggacacgttgccacctctggggctcatagcctggtggaatgcagacgagtaaccgtggaggggtagaagtgtgacatggtggtcaggacgtaggctctggaggcaggcagtcctcacttcaaagctcggctttgccacttactcaatgtatgccctattcatgttgttctccctccctgggcctcagtctctatatctggagaatggggacaataccccttctgcttgcctcagacagcgaagggggtttgcttaatggttgagttttggatctcagatcaggtgagagagggctctgggaaagtgacggaggggtcagacctgggccaggaagctatctctggggcccacccagcccgtgattggggatccctcctgcatggtccatgtattccttgcgggaagcgaggtccactctggaacccaatggctccttgttgcatttcaaaatgccaaggcagttggaatgtttaaaggaaaacccagatgcgtgctgcccttctcctccctcctagcccccagttctaatgttctagaaggggcagaatttctctcctgggtcagccccttgcagcctgttttctacagctgcagctcctctccggcacccttggcttcctcagtttgttgttcttttatgaggctctgaaccatgctgagtgctgcccccattccgtcctcctctcaaagtactgccagcacaaggctgtgacgtggaacagatttcagagaaagtttgcagtaatgcagggaggttggggaaggaggcaagggtgtcacagcacagaaaagttgtcaaggcaatccatccaccattccctgccataggaaatatgtctcagggagtgttcccccaacctcagcctcctatttccctgcagctctcatctcctggactttcctctcccttctagaaccttctcttttcttgccgccagcttctaacccccaagtttctgttattttcttacatagatccttttgactcttacttggcactaggatctgcttctggaaggccaaagaaatgtcccagtgtgttctcttaaacaaaagaaaccacctcctcttgtctccaccctcagcaacacaaggaaccagcagaagctttgaaattacagttttcttaaacatgatggacttcttaggcaggactccctccctccccagtccatcgctaggtgggaagaagtagaaagatttattctccctaagtccgaagtgaaccctcatttacataagggagattttttaatctggctgtgcctggcagcccttggccctagggatagctttgtctcagaactgcccatataccttgcttcgagggggcctggccttcacccacaccagggccctcattcactgcttttcttaggaattgacttgacccacagtctctatttttatcttgctgtcttctctttgcaactaattttgctgtctttgacaatttctttacttcaagtatgtgttaagggttctaccttgagcccagcactggcctggtgctttgagaggacagaggagctggatagggcatatgtggtgggcatttgagaggtgggctgtgtagtggtaggagtgtgggctctggatccaggctacctgggtctaaatcttgattctcttccttactcctgggcaagttactcaattcatctgtgcctcagttttctcaagagtcttgggtgaaaagagccctgtcttccaggggttgttgtgagggtcaagcatatccatgggaagcataaggaacagtggttggcatggagcactgtggtgcgctaaggtcctgtggccctttaagcatttactgttttacgtgctgcgtggttgcttccctcaacaatgacagtttgcctagtgagacccattgcacggtcacagggagtaaccatcccaggaccgtgcccagacaagtgacctaagcgggagtgctgccaggccctgaggagtggctgcagtgggcagggcaggtgtcctggagggagggaccaggctgcttctctgcacttgctcttccttgaacacaatttgtgcttctcttggaatgtcctttcttcccaccttgagtccaaactcaacagggccctccttcaggaagcttttcccagaagctgggtgtcatctcctggtcctcctgcttctgaagcgctctgagcaatcaccttccctcggcgttgacattggaccttagctcctctgctgaaggaggcagttgctgacagccctcccagatgcctcccaggtggaggggagttagtgaatggttgcaactgggatcctggactaggggttaggaggctataggaaaacatacagagaggtgaagcctgggcctggaagctgtctctgggctccacccagtctatgacagggtatccacctgcacagcccaccattccttggcggaaaacaagcctccctattgaatttcaaaatggcaaaggcagttggagcatttaaaggaaaatccagatgtgtgctgcctccaggtctctcactgcagaaatcatggaagggaggaggcctcctgggatggatgagggctccccccagtacctgatgcccagagggtgctgctggctacctctcctggggatgaggtttcagcattccttgggccaggctgacccgcaggcaaatgccttagagctgtacattaccctggttagttacgtagccaattttcctccagagacttccctgcctcccatgcctgcctctctcttttcccaggaggtgccacacacagccttctgggcaagacagctgactgtgctggagcaaactgctgaggctctttatccagttctaatgcaaatcttactttttgttccctcaaaggttcttcagaagacctgaaattctgcgtgctctatctagcagaggtgagtcctttcctctggatttgaggagagagatcttcgacctggtgcttgaggggagacactgggctgggatctagaccagtgttctgatgccagcctccatacccactcatgccgaagtcctgggcaaggccagagtagcggttttttgctaggtagaatgggactagccattcctgcccctgcctctctcacctctgtgttaaagagcagtggacaggaaagtgcttagaacagacccttgagattttctgtgcaggacctcctgaactgcaggaatctcagtgggggtgtggccgggcaactgtgcatcaccctgtttactggttaatagcccttcctctagagatcgccctgattcctgtacctgcctcttgcttccacgttttccaggaagtaccaccaacgaccccttgtacagggtcttgtcagtgtttcaaaaggcctgaaggtatttgtacctttacctgggccagataatacaggctaaaacaaacatccagtgtctgggtttcaggctggaatgatacccactcagtgtggttgagattcctggttatctcagtctgatcagaagcttagataggcagtgctgtgcctttgctgagcaacatctggcaagtaacttattacttgatttggtttggtagataaaatatcattaaggctggggtttaacccaagagatccttgaagatgaaaaagttgagagccactgagctatacaaatacttttcaattttcggtgaattttctattcactgcagggcggtgtctgttcaagcaaggatgcattagacacattcctgcctctgccttcgcttaagtttgtctcatgcaacagtccagggaacctgttttgtgggaggtgggacatggtctatattggctggccaagaggaacacacccctttgagaaggaactgtacacagtttgtgattgaaaatcattctttcagttcctggctaagaagtgcaaggcctagagagagtttttgaacagccccctggaggagaagacagttgatgagaagttagctttagcggagggcagagagttccaaagaggcagtggacattgctggggctcagctggggaactgggctgcctgaaatacagacctgagggccaagagggcattggatgtcctcccctgtgtcaggcacattcccccggagcacaggaagtggctgatggaatcacttcagtgctggagggtgtttagttccacagagccaagcaagcagagaggagaagccatgaccaggctaggctcttcctccagcctcaccacactgggttctgattctctggggcagttcctgaaaggaggctccaggttctttaatgccaatagagcttccttccaggttgggttagttttttcccagagaaaaggacttctgctccattagtttcctgggatctgtgacgtgctggcttccagagattgtgaagggatattgatttgcggctttttgtttcagtaaagtgccaggtgatctgatctccaggggctgtgggattgagcttacaggcagctagaagcctctctcttctcttaatgggttgctatttagaagaagtactataattcagggaagacaagatgccttcttgctctgtagcctggaccactcttaacatgggtggttttggatcctatcaagagcctgaaactcacatcttagttggaacttctgacaagtgatttctcttcattgcctgacatgcaggtggcatccagagaagaaaaagagagtcaggatttggagaagttttttgactctgtattgagaaaggcccaattgcctgggtgatggcagctctgattgttctctagctgcaagatcctgggtggtgttatccgaaagtagtcctgggctctgggtctctattgcctggacaggtgtgtttctcagttcctgcaaatacactggacagatgcagcccacaattggcttcagaacacagaaggctctgaagtcagttgggtccatgggcacattggtcagggactattctctaacctagaatctgatgttggctccattaatttaagagtcttggagttaggaaaacctagatttgaatcttggctctgccattttctgagtgatctggggccagttacaaactcatctctgaaatggggctggttctaccctgcagggttgtggtaatgattaaatgagattcaataagacttgcatccaaagcacttagcacagagcctggcacacagtgagcgctcaataaatggtagctattgttattgtcagtttcaaaacaaggggaagggctcttcatattcatttactctccattagagaaatcacaaatgatttattggtcttttaagaagaaagctaagaggaatagctcatattctttgtaatgtgcatatacagttatacaaatatggtaagatcacagactctggaggaggcagaagacaaacagtgaatctctcctctcccgagacctcctggggccagtgacataacctctctgagccttagttttctcatctgaaaaatggtagcagctgctttccttcctacctatgtcatagggtcattaggagaactgaattaaatgacagaatttttatcaaagcaaatgaaccaacttaatttatggctgaagaggttttgttttttacaaagatacagttaattcaggagcaaggaggtaaggcaagagcgggattttaaagaggccaagaggagctgggtgtctggttggatttcaggatgcccatgtttaaatgcacaggtctgtgcccagtgcttctgggccagggccagtgcatctgaaaggtctgtgcttggctgaccaccccatagtcaggaggcaccgtctgagtgagttatgtgaggaagccttcagggtggcttatggccttgaccacagagcctgctattgagggcacagtgggcatcagtgttgggactgacgagttggatcacaccctggattaaaagagatggtttacctgtgagggaagccaggaaggtaatgagtgtccccaatttagacagatttaggcagatgggaattcagcctccctggagggagctggcttagtgctctctctcttggcttggccaagagagagagagaccaaagcttaggtctcccgaaaatgtttgcccatctaagccagccagctctgccccctgccttggaagccttctgggtcctctagtattacagcttcaagctctgagagccagagacccagccctacactctgctgttgagacaggcaatacggtcaccatctcaggtgaagaaataatggctttccaaaggagattcccatggggcagggcagcagagggtggttcttgtggtgtcagcaaaacaggcataatcatggctattaccttgcagtgtcgttggaagaaatgtcgaggtatcactggtaaggggcttagcactgtgcagggcatgggatttgagggggctgcctcagtattgagggtaggtggctctctcactgtgagaggccctcccaggatggggggagctctttcatacttttgtagggagggggacaccatcctggagcttagagcagtggacagttatacaaaaagctgccagcgaactctgcagctgctctgagacccagctacctacagaatttctcctggaggctttgcattctggtcgcctcttggtccagtctgcaagagggagcattcctgccagccacaggtgtggcagcctgaccaggtgatgagacctccccaggtgttggagatgagatcccagcatgtggttctccaaggctttgagctggagctctgctcctcattggcgatgagactcagggaggtccttagctgctctgaaccttggccattcccttccataaaatggggacaacaatccatgcccttcctgcctcttcactgcattgccaagatcagcatgagatcgtgggtgggaaaattctgtttttttttttttttgagacagagtctcactctgttacgcaggctgaagtgcaatggtgcgatctcagctcactgcaacatccgcctcctgggttcaagcgattctcctgccccagcctcccaagtagctgggattacaggtgcacaccaccatgcctggctaatttttgtgtttttagtagagacggggtttcatcgttttggccaggatggtctcaaacttctgacctcaggtgatctgcctgcctcagcctttcagagtgctgggattgcaggcatgagccaccgtgcccagctggaaagttctttttaaaattgataatcagacaaaaggaattattagtaaggcagaattcctgcttcagaacagaaagaaaagaggacatggaggcccagggagattaaggaatctgctgaagcccacccaactgggtagaagcagggctgggaggctcgggccagggccagggccagcttcatggagtgatggcctttccaagctggaagggaccacagttcctgcctcaccccccacctttacatgggaacactggagacagggagcagagggccttctggtcagcatctgcctcacccggcttctccctgggaaatcttggggtcttttgctggccatatccttcccctgccatgggctagaggactctgggcagcggagggaagctgttgttaagtagaagctccaggagtgcctcagcgcaccacccagttccctgaaaccagcaggcagggctttctttcctctttccccagatgctcttaggaagatcaacttctgagcacttttgggcctgagaggaatggctggcactcagcatgggaagtgcccccactctgaagggtggcattcctgagggttgggttggatgcagggtagaagaagtccctagatattatcagctgatgtgatagtccaccccagctcaaggcctgctttcgctgcttctggaacagcttctcccaaacattgtttttgctggccccttcttaccgttcatgccttagcttgtgtgttgccctttctaagaggccttttctgatcacctcaagtatgacctctccctttatgaccttggtgacattttcacaagttgtaattacagttgtccctcagtatccaccaaggatttgttccaggaccccacagataccaaagtccaaagatgctcaagtccttgacacaaaatggggtagtatttaatataacctatacacatccttccatgtactttaaatcatctttagattacttataatatctaatacaatgtaagttctgtataaatagttgttaaactgtattgtttagggaataatggcaggaaaagaaatctgtacatatgtagtacagatgaattttttttttttttttttttgagacaaggtctgccctgtcgcccaggctggagtgcagtggcacaatcattgcttactgtagcctcaagctcctgggcttcagcaatcctcccaccttatcctcccaagtagctgggactacaagcgcacaccaccacacccaattaatttttttttaaaacttttggtagagactgggtctcactgtgtttcccaggcttgtctggaactcctgggcgcaaatgatcctcctgccttggcctcccaaaatgctggtttacagatgggagccactgtgaccagcctaaaatattttttcaaatattttccatcctctgttggtggactccatggttgtagaaaccatggatagggagggctgtatattatttctttaattgtttatttgtataaataacaaatattattgtctttgcccctaacctgagagcatgggcttagtctgtctcatttacctctttatttccaatgcctaggactgtctctgacacagagcaggtgctcaataaatagttattttattttgtttttttttcgaggctgagtcttgctttgtcacccaggctgagtctggctttgtcacccaggctggggtacagtggtgcgatcctggctcactgcaacctctgcctgccaggttcaagtgattctcctgcctcggcctcctgagcagctgggattacaggcacatgccaccacgctggctaatttttgtatttttagtagagatggggtttcagcatgttggccaggctgttctcgaacacctgacctcatgatccacctgcctcggcctcccaaagtgctgggattataggcataagccactgcgcccagtcaataaatagttattaaacaaatgaattactgaatagtaatactagtgactgtttgttgaggcctgattgttgtcctccttgcttgccctcctagtagctctgaaagccaggtgatgccattatatccccatttcacaggcagcttggtactttcctgaggttgacagctgggaagtggcacagctgggattcaaaccaggcctgtccaactgcaaaatgagaaagggctggatagaaacactgtcttttttttttctgttccaagggatcagctgatgctcttagctccctggctgagttcatctaatcgcagccctttggggttataatcaaattctagtggaggcagacagagcttgtactcccctgatgagagtacccggttgtgggtggcaaccctgggcatgtaccaccatccctaccccgcccctagcacactctgctttaggggtggctctctgggtccttgaagctccctggtgcttgtgccaaagctgacctggatttgaccttatcccagaagtccttcctggcaaccagagcttaccaaggccattgcttgctaagcactatatgaggcctagatgaaaaaggcctttctaggaggggtttgtagtttagttggggagacgagactgtagtacttaacaaggttgaatagcgaagcgggacctaaatgtcagcagtgcctgggatgttgctgccctcgagtgagctgaacagtcacagattagaccaagatcatgtgctgggcagtggggctgcagagggccacatgactctgcccgtcaaagactttccaaaggaccctgagttgctgtttgggttctgttggtatgcccgtccaaccacccgttcagccttggccttgggatcagagaagagcgctgtgaggaagatgggttctgtgagccaggggaggtggggagggttcctggctccacagagaatcagcctgaggccctggccctctgggcttcccacgtgctccctcagctgctgctttgtgctgcctgcccctgggggtgacctcatcggctctgtcctgctctccacaggcctctgctgtgttgggagccactgccttcctcccctcccccaacctgtgggcccacagctcgccagctggcccttgaacccacttccctgcgcctctggctgcctcaatgtcactggggattagtgtgcatttgcggcttttggcggacactcccctcctggctgcagcctcaccctctggagcccagggatgggcttgggcctgggagccccctgaaccagggagcagccctgaccgtccgtttctctattttccctgacgtcagaaggcagagtgcttattcactttggaagcgcactcgcaggagcagaagaagagagtgtgctggtgcctgtcggagaacatcgccaagcagcaacagctggcagcatcacccccggacagcaaggtaagggccttgacagtggctgtggcctggctgcctcgtttcccctcagccagcctagacccttgagcctctgcattgagctgggggccagcctgagcttccaacttggctctgggcaatgagctcttggcaagcggggacctgtgcccgaatgtctctcccccttggcatgtcattgggtctgctgagtgggtctgacagtgctcgtgtagagcgacagagccaaattaagcgtggcccatcagttctgcactctgttcttcggtttgcctatggcaaggtttaattcgggctggcctccctgatgctgcctggcatgcgttcacctctgccattgggtagcctgtgcctgggggcagcacactggtgtttaacattggccccaggcggatgcgatagaggggatgtttgcggcagaagctgttgtatgctgtatagttccatgtgggccagagccaagtagagctgagtgtggactgctggggtctggggactggctggcaggagcaccggggaagattagagactcccaggggaggctgttctgggctgggcactgctcagcccatccagtgcctggggagaggggatgggataggagctggaccacacagccttcccctttgacactccgatgccagccacaaagtacagttatattaccccatttgtgagtcattcaggtcccttcttttgctaaaagtgctggccatttgggaattgggtctggttggctgcaaaagttgctgaggtggttgctctgctggatctgggcgaagaggagagatgaaagaaagctgcagcctgtaacttgctggccttttcacttctccctggtgcagtcagtcccctatgccatgggcagcaggcctatgcagggggcagttggggggcaggcctgctgaagcaggaggtagggaagaggcagttggcagcctcttctgagggccagaggtggacagcagctccccagctattcccgaaaggagtgaggatctgagaattacatcatcttagctgtgaacgttctcttgttttacactagctagtggcaagaataacttggatgagggaagacagtaggaaaagcacggacttctgagccaccctctaccaccaactggcagtgggaacttgggcaagtcactttgctgctctgtactttgatgtccccatcagtaacctgggacaatagtccttccctcaaagggttgttgtgagaatgaaatgagagggtgcatatacgggctatagcacagtgcctggtatgcagtaggcactcactcaaccatagctgtggggaatgcattgccccctgcccagccccaggtggtttgttgcagcactggctggttgccactgtcaggttcttctactgagcagagacctgtccccatgcctataggctgccctgccccactgatcctgggttggtcacagtcagaatccaggccgcttcctcttcattggggtggcctctgggacgtcgaatggctgaacctatgccccagttttttttcctttgggcttgtgcctccttttctgggggaaagagctctttgtgcctcgctctcagagtttgctgactctggagtgtgttagcagcagccttctcaataccttggagaatctctccatcttcaggtttgggaggccagagggtgactgaaggcaggctgtttctgaggcaggttgtggtccctgtagggctttgggcttggctggctgaccctggaacggcccaagggtttgaggcctggcttcagggccacactagaatgtatgggaatcctgagcagagcagtttggacacctcttcaaatccaaactcttcaaacgcgtgttccatggagaagctgtgtgctggacaggagaaggatgaaggagggggcccaagtgctgggacagcctcagaattacctcccgggcctaagaactgggcctggagccacactggcataccccacttgggccaccctcctaagaaggccatgatgtagctgtcttttgtcaggctggccctagaggtctcactgctcaaaattccccatccctatcaccaccatgcacatgcaaagagtcttagcaacttactccttctagacacttatggaatgctccctgagaggaattccagtaaatagattctctccagccctaggtagttctagcaatgctttagcaacctcactgacagggcccgcctggctttccagctggtccacagcattgtccacttgcgctcagttccgtcagttcctggcagcctcggggtgaccaggaacctctttaccaagggctggccactaaggtctccatctctagggcagaagaggaagggccaaacggagcccggaggctggctgcttgctcttcaggtataagggtcctgctggaccgatttgctctgagatggagtgtcgctctgtcacccaggctggggtgcagtggtgcgatctcagctcgctgcagcctctgcctcctgggttcaagcgattctcatggctcagcctcccgagtagctggtaccacaggcacatgccaccatgcctggctaatttttttatttttagtagagatggggtttcaccatgttggccaggctggtctcgaactcctgacctcaagagtagcacacctttgaatgccttttctgtgttctttctgtggatgctccaccttctgctgaacaaaggaaaacactgcctagacccccaccccacccctgcaccacccaaatgcctctctgggaaaagggggtttgtaaggcaactccccaaactcccatgctcttttcaagagtgtctgctgacacccagatgtgggggattctttaaatgtcttaaggaatgtaaagctcttcccaaattcacaaaacgtaataagtgcaatttaccttgaagatgaaatatatgcttgttgggaaggtagagggagtcaggggaagatggacttaaagaacagttgggaggtcactcccttgctgtgggaccttcagcagccgctggctgctgtggtgtcagtagtcccatctgggcactgggcccgtggctctttctatctctccaagctttgtgattttcgtgaaagctgagggccgggggccatctagtatccattttttgtagaaataaatgaactactttctctcttgtctcaacttcctactcctgttcatcacccgctccttccttttcagagctctgcccctctgttgcttcattatctgtagctggggggcgcctacctttcttcttctgcctgggaatccttgtactaaactccctgcatggggactgctgcgaggcttctaatctagaataactcagagctgggcccacctgtggccattcaggttctaagctagaagggagagacaattatatattcttttgattattcaagcaaatatacataataaatgccttctcagtgccagatactggtttagatcctttgggatcacagagatgaatgagacctggtccctgtcgctatggaattctcctaataggagagagatgaggagggcactggagtggtgatctaagcatgaaagccatgcttgcgggtcctaagaaggatccagtggggtcctggctatccaagcatcatccgtgccgtgagcctcctgctcagtacccttcatgtgcctggtgctgggctgggctccaggaagccttctgagaagcatggaaaccaagcctttaggatgagaagggcagacacagtgcagtggggcctggccccattctcagggcaggtcctgtgctccacggggagggacgcacagagcaatccatcaccccctttcctcgggagatcacagtctggtggcagagacagacatgacagatagttcaaagtaacacagtaagcaatgtgacctcaggtgagccagttagcctctctgagactcagtttttgcatcagtaaagtggatggattaagaggcttcttgtgaggattgaactcaggatgtgctttgcaaagtggcatgcaagaggagctctgaactagccgctatcgttctcactgtcatggttttaaagtgctgtccatatgggaagattcatcgggggccttgttcattgaagctgctgctggtgctcggagcacatatgacaactgctccatgtcacttcctggtagacatctgccatattccaggggcccaggcagggaaactgaggcctccttgtctgctctggctctaagacttctcccagatgtgacggtgaggtgcgtgccaccttgtcatctccactggggccactagagacagccctggagatgccagggtgtgtgagtgccttagaaaggaacagaggcaggtcctgcagtcaggcagcccggcctgagtagacagcgagctaattccagttctgtctggttccacagaaactccaccctttcggctctctccagcaggagatggggccggtcaactcaaccaatgccacccaggatagaagctttacctcaccaggacagactctgattggctgagcaaacccaagggcgggactctgcttctggcaacttaaccctttcttgggcatcccctaccacacagtaacctcacctcaactggacctgaaacagaggaccaagatggtgggtctagggtcatctgaagggagtggtcccaagggtgcatgtggatgtcaacagaaggaccacaatggtgtgagaggccttgtgggcatgcagagactggcagcagaaagtcccaagaggagaggactcagaggcttcttccttccaaggaggaggaggaggaggacattccacatctgggcttccagtggtggctcccggacctgccttgggggcagcaggagaggttgggagaggtcaccctgatgaagaacaatgccatgatctgctgctgccagaggacatctccgcccatccactcattttccacctgtacacattggctcattcattcgatggatatttcgggtgcatctactttatgccaggctctatgctaggagctggggatactgtggagaaaaagtcggatatggtctcgctctcatcaagatttcagtctagctgggagtgagcgttaaataagtcaataccaacacacacacgtgcacacacgtgatggcaagctgtgatcatctatgaaagaaaaaacacagatttctttaagagggaattgtacttagagtgctgtgtgtgggggtggggatggggaaggacataacttttaaaccgagacttgtgggctggagaggaaggagccagtcctggacttggggaagagtgttcgcggtggatggaatagcacgtggagagtccctgagatgggaaggagctcagtgggctggaggaatggcgagcaggccagtgtggctggagcttagtgaggtgcaagacacagtgggtgaggtagttgatgtcttgttgatttcattctagatacactggagagccattgaaggcttttgaggaagggagttgcaagtacatttttacaagatccgtttacacataggaggggcccaagtgggtgtgagatcagttagggggctcgttcagttctctaggtgaggactgtcctggtggcttgtcctggatggtggctggggaagtggatgcctgaatgccaggctctggagaagagatgactccctgccccatccccctgcctaccctcctcctcaatggcccctctctcagtggatgtgagtgaggattaggaccttccccacagagccaccttttggccaggcctcgtgggggatagtgggggcagtgctgagttctaggagtgttcctggaagttgggggcagtgagtgctcagcctggcccaggtgggagagttcactgctgcccaggccttagcaggggctgctgtgctgtctttctgtcccatgctgagcattgtgataggaagctgccacacagtgccctggaaactgacttcgcatgctttccatggggcttccgagggccagggactgggctgggggtggcctagcagctctagtggagactgtgctgccgcagggctgaaggaagaccaaccaaggggacagccgtttgagcccagcccactcactgcctgctgcacctccagctggagcccagggttgggcagctctcatactcttatctaactgccagacctagagggagggaagcccaaggctgcaggtctgagggacacggctcatgggcaaaagggtatcaagaggattagagtcacttgcataggaaaagagggtcagagaggctgagggctggctgaggccagagaggttccctgaccttggacattctttgtgttgtgtaagacctcggcatctttagagaaaggttcttgtgcccctgtgagcttgctcagctgctatggccacttgaaccccaaaaatggtggcctagaagagaatacaccccttacttcccacttatcctcctctcaacctaggaaagatcagacatattgactcaacagtctaacaggggatgggctggatctgcccgtgaccagaccaatgccccccacccagcaagggagtaaacgctgcctgaagtgggaccagtgatacacagcatctctgtctgccagggctcagcccgcgggggggatttgtgagaggctgagcagctgggtctgcacagacagcaagctgcactttgatttcatttgattcccttacaaaatgacattaaggggaatgtgaggcacaggagactcgcctgtctgggaaggcagcaagctcatctctcctggacctggtgacctacctctgtctaccagacaggtgcagaggacaggagctctggccacaaagaaatggacagtctgaatgcagcacacagccctggggacaggacttttcacccagcctgtcctgacaagctgctgagtcgagcagatgctcacatcagggtcccaggtccggctgttagggaagtggacatcagttcctggtgggccctgggcagtgactgtggtgagccacagcaccattgctgctctgcctctcaaatcgatcgaacaattaatttggctccacaggctcgagaagatgaaacatgacctgatggccactgctgtccagcatcccagtccatcctagctgtccaggatgatgaacaagctatggaaattgcacttgagagctataatcacgggaagcattgccgagcccctccctgctacataaatcatgctaagaagcacacaatggcctctttcctgatgggctaattgtcttggtttggtgtctcaggcccaggagctgggaagatgggagcacaaccatttattgttggaaagaccatctgtgcaacttgaatacaaagtgattcttttagttccccacacacccccgaccctctgatcccattttcatgttttttttttttttttctttttatgtctcaggctctggttcttttaaaactcttcatctatcctgtaagccatcaggcctggatctctgctggcctgggtcttttggctatttgggggttgggacattgcagaccttttggaaataatgacatttatttatatatgtcttatatttttattctttatttttccccataaattctattaccaaagtcctcatttgtcacacatggcaccaaggcaccaagagggtttttgcaaagtgaaaatgcaggcaattttgcaacgtggaagggctccccacagcgaaagtcccacagtgagagcctaaactttggagatggcaactggggtccccaggcatgatctccccccagcctcccagcagccttgttttatggatgaaagacaccaaggctctgagaagttaagtgttttatcctaggtcacacagctggtaagggccaagcttgccctcaagccaaggcctttgaacctaatctaccactcatttctgataaaaaggtttgtcttttagggatagaagtaagagaaatcaataatctccaggaagaggcaagagagggatatccggcatgtcagaagctgtggcccatcaagctgtagagggaatgcttttaggataaataaaatgagatgccttattttccacccagtggagaataaacttccagaatgcattttcctgagggtggcacaggctgaaaagatcaatagcttcccacaagatttgaaaaaagcctaaaatgagagatcagtttgagctccttaagacaggttctcagggagctctggaatggttaggttacaccccttccccttttgaatttggcatcaaaaggatcagcagacagagtcatggagtgcttggcagtgatggaatattagccaaaggcagagaggtatagcttcaggctcaggctggcttgtgcccagcgtaagtactggaaggaggcctttgacctgagaccagctgagggcacagagagggcctgcccatgtggaacctgccaggttttgtgcgcagattttgctaattgactgatttagtatctcagccctgaataaaggggaatcaaatggatctgatttcagccatctcccctaagagatgcagactcttctccctaaaaactgtttccaggcagccaccagctctcctccccattccttgctgctgtcctatcagtggacagactgccttcttcgctgtcttgctcttggtctcagccatcttgctattgttttttttagcccctgaagaagacagtgcaaccttaccctctatcctgtcttcgccttctcttcctcgaagactttctctgaatagggccatccatcctccaaactgttcccagatccttggttttaaaggtagaatgataacataaggtaacctggtgggcacttacaagatgagccaggcacagggtcaagctttttacctaccctgtctcatctaatcctcatgcagacttacaaggtgtgttacccctgttatacatttactctcattatgcccaatttagatatgaagacgctgagtctcagagaagttaagaaacgtgcccaaggtcacacagctagtgggtagctaggattgaaacttggacagcccagctccagggtacctgcttttgattattttgctatatggctttcctgtaactgcagaccatccaagctggaagggccagggagactggactgtcacactcctgcttaaagaccattgtgggaggccactgtcttcagagtaaagcttggctttccaggctctccttggtagcactacactcctgctttgcacctggagcccggccacaccataaattttccccttctctaaactcactgtgcacattcacagttagggtgtttgatctgcctgacgttgactgccctccttggctgtccctgctggatgcaatcctcaaccttcaaggcttagtggctcctctgagaacacctttctcaggcatgcatcaggagtcctgacttcccccttcgtggttcccagagtactttttcccccttagcacaattcatccttagcatctggatgactgtgagcttcttcggagcaagtagatgttatattttatttgtctttgattctattgttgtccggtccgtagtaggtgctcagtagaggttgtaggattgaattaggctgtccagttcaactctcctatattctagaatttagacaaggaaacaggtgcaaaaagagaagtgacctggccagggtcatgggaaaagttagtgtcagagccaggactagagctcaggtctcctgattctttggattcagagctttttctgttgcacctcagctttgtggagaccagagcatggatctgcacttggtttatgaaggtctgaccaggttcacttcagggtcatggataccactgtgttcccatgctgacactggggaattcccagagggaaaggaagcccagctggagctgctgctgtaggttgcggggctcacctctcaccgagccccttgcttacagagaaaaccagcgagtgattctgaaaatcttgcctcgagtcctcattttgctggtattcaccgtgtgaccttgagcaaattgcttcacatctctgatcttctgttcctttaccaagaaaaatgagggagttgaattcagatggtctccaggagtcatctgattccagaatatcaggatataacaataaagatgaggataaagtagctactcccctcagaaaaggtggagatccagatctagggggagaattggctaggttcttcatcacagtcactgtcttgagacacataggtggtccatggaaacatttccatgagggatttcagaggggagaatgggcagactgcaaagcctcggtactctaataccaggcaaaaagaagaaagggaacaggcattttagttttcacattgaaacagagtgtatgtgtatggccctatgcaaatgttgttcctggtgaatattcatcaatgtactcatcacacataggtatatttagacagaaaggggtcctcatcacagacacccaaattatgagcacattactgcctcctctcccctagaggtgcttcttccagcctcccccattggaggccagcacaagacgggctctccaacccaatatcttccccttccctccttcctttctgctcaggtggctgagtatacacattgaactcttttgtttcaacttcacgtgtatataggttggtgcaaaagtaactgtggtgttttccattaaaagcaatgtcaagaaccgcaattactttggcaccaacctaatatgtatgcaagtacattctttaacctttccaactcccagtccaagccatcaggctaatttccgcgtggaatttgtggtcactggtttgcagtcctttcatttctggtgtggtcagaagtctccttcagactcttcccgataagttgccattggctttttcatcacctttagtacctacccacttttgctgggataacactacccaagataaattcaaaaaaattgtcctaagtgttagtgtgtttctgttttggttgaagtctattattgctatatggttttctactgtttctacttgatggaagactattaagggttaagtaggctggcctaggaagctgaccaccatttataacatacttttgagtgggaaaatgcattcagaggcctgtaatcaatacttaggtggactttgggaatatagtatttattttatgagtgactagaatattggtagaaccatagaaactttgaatgtggagctggaaagcctcctccttcccccactgagatcaattgattaacaagctaggttgtagaaaccaagtgaaagaggcaaaaacttggccaagggcatgtagtcggggacttctgaagattctgctgggctgggggcaggaaaggggtcacagacggtcttagggttgtctcactcagcaactcactgtgttggccttgggaaatgtaagtcactgtgttgggctgtaatggaaatattgagaaagcagctcagctagtggcgtggggagaggttgtctagtcctctggcttatctgtaaattcctggcatgtgcttgttggagcagaatgaatggggctgctgtgttttacctgcagctaggagcatggctggagtggtggagacactccctgtggtctgttctaaaaatagcagtgggaacagagctgaggggaagaggagggggctccttcgggagctgggtggggaggcctcacccccttcctcttcctgccaggcccgatgtgaggaagtcccatggagtcacataattccatctgggagagtcctggagccatcagccctcacaccccctcctcatacaggcgaggaggccctggaggcccggagagcagaaagcactggctggtgtcaagcaagcccagagagaagggcccagttggcaggctgtttttccctggctgtttcagcacagtggctgcaggccttgtgctgaggtttgctgtcactgcctttgggcgcacagagactgggaactcctgggaccggatgtggtcaggcttcctgagagtcgcctggcaggcgaggagtccccagctggcccaccctgagccctgacctcagccagccggctgtccagtgccacacctcctcttgctggtgtcccctcccttgctgacttgtcctcctttctttggactgtctgcagggagggaggacaagggccagcctagatctggcctgcaggacagaggcctcagtggctcaggacctttccctgcccctccccaggaacaagcagaggcagctgaggtagtagcagcctcctgcaggtttagagacagacaggccagggttcaaatcctagctcttcctctcactagccatgggattactgatgggtcacagagcatctgtaaaatgagacaagaacgctgatttcactggggtcttgtgaagatcaaaggggatctgttgtaatgcctggcatgcagtaggtacttaatagtagctcttgttgcaaaaccaagcagtgaacatgtatctgactttctataacccccttccttggggcctccactcatgaggcatgggaaggtgttttttttctttgtttgtttgtttgtttgaatgcagttgactttttttttgttgtattgttgcaaaagtaatccatgtgattgatgtttattatgaagaaaacatttaatacagatgaaccaggagaagaaaatgaagttcatccttaatcccagcacccagagataaaccactgttaacattttggaatgtgtcctgtcaggcattcgtttatacacacatatatcttatttgcaaattggggttactggtgcaatttttctaacctgctttttctcccccatttaacagcgtagtgtatccatgtttccatttcaataaatattcttctacaacatcattttcagtgcctgtggagtatttcattgtgtagatgaaacgtgctttatttaagtaatcttcagttgtttatcattcaggttgcttgcaatttttctttgttacaaaaatttcagataaaaatccttgtacaggaggctgagatgggagatggcttgagcctgagtttgaggttacagtgagctatgattgcaccactgcactccagcagtgagaccctgtctctgaatgaaaaaaaaatcctcttaggtgtatcttggcatgcccagcatccagttcaacacctagtacgcattcgactctaaataaatatttgttgggcgcggtggctcatgcctgtaatcccaccactttgggaggccaaggtgggtggatcgctgaggtcaggagttcgagaccagtctagccaacatggtgaaaccctgtctctaccaaaaaatacaaaattagccaggcatggtggcgcatgcctgtagtcccagctactggggaggctgaggtgggagaatcgcttgaacttgggacgtggaggttgcagtgagctgagattgtgtcaactgcattccagcctgggcaacagagtgaaacttcatctcaaaaaggaactaaataaacaaatatttgttgaatgaatgaatgttttgttagaataaatgcctgttagtagagtttctgggtcaaaggttatatatttataaaatggattattgatcctattgccaaattaccctgcagaatggttgtactgatttctaatctcatctgaattgactagctcatcctactttgcctgggacttttccctttttagcattgaaaatcttgcttgccaggaaactcctcaatcaaatcaagtaaaccgagatagtctggataagaaaatgtttattcctcctcatcattaccaacatggtatattgttacatttttaaataggttctttttttcgttattagagatgttgaatatttatttatatgccttctggtcacttgtgttgcctcttttgggaatagcctgttcaagtcttttgctcatttttctattgggatttttatagtttaattattaattcacaaagagctctttatataataaggatatttgtgtgttagccttttatttttattatttctttaaactacagatgtttctgacttattagtcatatctatcatttgttttagagtagttttattgagatttaattcaaatatcatacaattcacccatttaaagtacacaattcagtaatttttagtgtattcacacacttgtgtaaccatcaccacaatcaattttagaatattttcattatctcaaaaagaaatcatactacttagctatcatccattatttcccccatctcctccaaccctaagcgaccactagttcatacttttcatctctgtagatttgcctatattggacatttcatataaagggaattatataatatttggacttttgtgactggcttctttcatttagtctaatgttttcaggatcatccatgttgtagcatgtatcagcaactaattccttttcatggctgaataatattctgttgtatggaatatcacattttgtttaaccgttcatcagttaatggacatttgggttgtttacaccttttggctattctgtgtaatgctgctatacatatatgtgtgcaagttttttgtatggacatatatttttctcttaggtgtacacctaggagtggaatagctgggccaaatggtaactcatgtttaactttttgagaaactaccagactgttgtccaaagtggatgtactgctgggcgtggtggctcatgtctgtaatcccagaactttgggaggctgaggtgggccgattgcttgagtccagagttcaagaccagcctgggcaacatggtgaaaacctgtctctactaacaacaacaacaacaacaaaaattagctgggtgtggtggcaggcacttgtagtaccagttactcaggaggctgaggcaggagaattgcttgaacctgggaggtggaggttgcacggagctaagatcatgccactgcactccagtctgggcaacagagtgagactctgtctcaaaaaataaaataaataaataaacaaagtggctgtagcattctactttcctaccatcagtatatgagggttccaatttctttaaatcctcactaactctattttttcattttaaaaaattatagccattctagtgggagtgaagtagtatctcattatggtttttattgcattttcttaatgactataaatcttgaaaaatattattgcctttggcgtatgatattcactctaggattatataatattcacttttttcccttttaattttatggtttattttttaactcttaatattttaatcaattgggaatttacttttgcatatagtatgaggcagattacttttcatttttcccaaatagttatttgctccaattcttatgcattatattaggacaagtaccctcttattagttttctttaaaaattatttcccccctcttctcatacatttatttatttatttatttttttgagacggagtctcactctgtcgcccaggctggagtgcagtggagtgatctcggctcattgcaagacccgcctcccgggttcacgccattctcctgcctcagcctccagagtagctgggactacaggtgcccaccaccacgcccggctaattttttgtatttttttagtagagacggggtttcaatgtgttagccaggatggtctccatctcctgacctcgtaatccgtccgactcggcctcccaaagtatttattcttttaaatgaaattcagtgtactttttaattgtagctttataattcagtccttatcttctccctgcccctcccaaaaatatcgttgagacttttattgtaattatatttcaaactatacatttaaaaggggagtattaaaatctatacaatacggtcttctcatttgagaacaggatgtgtctcctcatttatgcaaattttaagatttcccaaagttttagaaagaatttcatataggtcttgcacattttttgttaaatttatttgagggaatttaaagttttaatttatattacaaatgaaaatatttatttggcattatatttggttttttaactggtaatatacatgcacaaaacttgtaccaaaaaattctaaacattactaaactgaataaaataaaacccccattccccaagcccatttccaatcaataattactaatatatgtttgatgtggttcctccaaattttcccccatgcacatatgtagacatatgctatgttttgttttactaaataatatcatattatacatacatttttgtaactcatctataaagatataggccaggaatggtggctcacacctgtaatcacagcactttgggaggctgaggtgggatgatcacttgagtccaggagttgaagacaagcctaggcaatatagtgagaccccatcgctacaaaaaataaaaaaaattatccaggcatggtggcatgtgcctggagtcccagctacttgggaagctgaggtgggaggatcgcttgagcctgagaggccaaggctgcagtgagctgtgatcacaccactgcactccagcctgggcaacagagggaaactctgtttaaaaaaaaaaaaaaaatatatatatatatatatatatatatatatatatatgtatatataatattatatataaatatattatagaaatatatattatataattatagaaatattttcgtggctgggcgctatggctcccacctgtaatcccagcactttgggaggccgaggtgggcagatcacctgaggtcaggagttcgagaccagcctggccaacatggcgaaagcccatctctactaaaaaatacaaaaattagccaggtgtggtgctgggtgcctgtaatcccagctactggggagcctgaggcaggagaatcacttgaaccctggagacggaggttgcaatgagccgagattgtgccgttgcactccagcctgggcgacaagagagaaactccgtctccaaaaaaaagaaagaaatattttccatcagcacctaaacttctccctctattttgaatagccagtggaccataatgtatttaatttattgatgcatgattagattgtttctaatgttttgatattctgaacaatgttgcaataaacatcttgccgcacttttctgttaggagagagtgtggcacacactaccgaagtgctctaaaaaagctttccttctgtttacacatgtcatctccccaacactattgttcttatcctattttatagttgagaaaccaaaggaacagaggttaagtacatgtacaatttgcattcctactcacagtgaatgagagtgcctgcttccctacaccctgcataaaatggaatgttattgcttttaattctttgttggtacaagaagtgaaaaattatatttaatcttaattgacatttatttcattattagtgaggttgagattcattttgttttatttttggagatggagtcttgctctgtcacaaggctggagtgcggtggcgccatcttggctcactgcaacctccaccttctgagttcaagctattctcctgcctcagcctcctgagtaactgggactacaggcacacgccatcatacccagctacatttttgtatttttagtagagatggggtttcaccatgttggccaggctggtcttgaacttctgacctcaagtgatccactcacctcagcctcccaaagtgctgggattacaggcgtgagccactgcgtccagcctcattttatgttgatcagtcacctatatttctgctttggcttgtcagttcattcatgtcatttgcccagttttttactgaggcgttatctcatttgtaagagctctttatgtggttagactattaaccatttgcttattatatgggttataattatttttctagtttgtcatttgccttctaactttatagtatcttttatcatttagaagttaactttttttataatcaagtttttttggggggttgagagcacctatattttctaaggtctttcctacccctagattatgagaaatattcatctaaattttattcagctacttttattcttttattttttgcatttacattttaaattcatctgcaattaatttaatgcctggtgtcagatggaactcttattaattttttcccccaaatggtttgaccagtttttccaacccgatttttttgaattgtctttcctttcttcacttatcatagaccaaatttccacatatggatggtttggtttctaagctctctcatctccctctttgatctgtctattcctacatcaggttagacttaatgactttagcttcagaatatggtttagtagtaaacatcccaaggccaacccctattattctgcaaaatttcctttggagttatacaccctaattctagtctgctagtggctttacccttacctttgtcacaaacatatttcaacatcaggaatgacaccagatccatagtagcctgtcctcgtggcctctaacccataatgatcatgtcggctggaccatacttctctgctttcctccatacctcctaggtattgttataattgtctggaatttcggtttccggttgtgactattttttttttttaaagacagagtctcgctctgtcgcccaggctggagtgtagtggtgcaatctcggctcctgcaacctccatctcccaggttcaagcgattctcctacctcagccttctgagtagttgggattacaggcgcccgccaccacgcccagctaatttttgtatttttagtagagacagagtttcaccctgttggtcagggtggtctcgaactcctgacctcgtggtctgcctgccttggcctcccaaagtgctgggattacaggcgtgagccaccctggccggttgtgactatttttaaacattagcactattctgttttaagaattatttacttaaaattgcacttaactttcagttatcagtagttaaggctctaaatgtttccgttttcatggcttgcctctgtctctcacataccacgtcatctcattcttgacttctcgattttaattcacttttgtctgtagagctttcttgagtaatttttccagaaagggtctgtgggtggtatcctttcttatccttgtaagcctgaaaacatttgccctcatgtttgagtcatagtttgcttgagtagaaaattctaagtgaatcgtccttctctcccagaagcctgagagcagtgttctgtggtttccccagtatttagtgttttaagagcagtttttccttgattctctaaaatttatttatggaaacaaccaggattcctctttccaatctttggaattcagaaatttccccagatgatttctagttgtttgttttcttttggtaatttttcctggtcctaactaggtaagtcctttcagtctgaagacccaagtcttcctttcgttcagggaaattttctattaatttaggaatggtttctattctgtgtgttcaatctcctctttctggacttcctactacaaataataataataataataatggtgcctaacattaaagcgtgctttctttctgtgataatatataatcttcccagcactattgttattatcctcatttcatagatgagaaaacaaaggaaaagagagattgagcagattatacaaggtcgcataattaggaggtgcaggccaggttctaatcccaagcacctggctccagagcccgtgtccttagctgctaaactatactccctgcctgtcgggtcccaaccccagagcccaccctgcccttccccccagcactctgtagtgacaatgttgagtgtcgacaggcagggactctgtaatcagtgggggaaagcttggggatgctaggatgatggatctgaaacagactgggctactgaggccagagaggggcagggattgtcagaggttctccagtgaatttagagttgggactcttccctccctcctcttcccttggtctcagccacctgcttcaggcctcctctttgtccctgggactgctgcattgcttcttgtgggtctccctcttcctactcctgtccatgtagtcacctctgtcaacagcagctgcgatgactcttcttatagaacacacgcagtcaccttcacactgctgagtgtttgttgaatgactgtatgagtgagcaaagaagtttacagtgcctaatgtgtgtcaaacactgtgctaagtactgttgatgcagtatgcattagtcagcaatctaccaattgcaagtgacaaatacccagcttccaggagtaaatggaatttactgggttagggagggtagccttcaggcctagttggattcagagccttgagcaatgtcactgagaaggcctcagcctcttcatttcttggttctatttacttaggtgttggctcactcccttagtggtagcagtgctgctgccagaagggccagggttatggccatggccttggagttggactccctcaatcatttcatcaatagtccctgggcctgatcctcattggcccaagtaggatcacgtgcccattccagccactgaggacagtgggatgggttaaactaatggactgaggcctgggccatatgcctctccctggagtgggagatgggttggttccttgtgaatcacctggcttgagaatgagagagggaaggctagttcctcaagtgaatggggtctggtcaggcagatctcagatgtcgtctacttctcggctcatcaaccagcatggtcctcaccccacagagctgacagtctaatgtggggtccagtgtggggcaaggacaccaatcatgaacagcatatgaaaaatcgatgacagttgtgccaaagggcctaatgagagcgcctactgggaggacctggggaaagtttctgaggcaggggaggcttgggatgtaaggattgttctaggtggggaccctaacgcaggccagcataggtgggaagacgaggaaggggaacagagcatgagatgaggctgaggtgtgttcaggatcagacagtgctggtcttgagaagctgtgggaagaagtgtgactttatcctgagtgcaggggttgatgggtgttgtagaaagctgatgctggcctcatagagaatggtgaggaggaaggcaagtcgagaggcagggagcagtgtggagctattggcctcggccagggagagccgatggttgcttggactagggctgaggcaccagggattgagagaggtgagagatccacaggatgtatagcaggaggggtctgcaaaattctgtgattaattgcacggggagtgtttgggagaagaatggtgctcaaaagtctagctcaggccaggcacagtggctcacgcctgtaatcccagcactttgggaggcctaggcggtggatcacttgaggtcaggagttcgagaccagcctggccaacatggtgaagccttgtctctactaaaaatacaaaaaattagccggacgtggtggtgggcgcctgtaatcccagctacttgggaggttgaggcaggagaattgcttgaacctgggaggcggaggttgcaatgagctgagattgtgccattgcactccagcctgggcaacaagagtgaaactccttcctaaagaaaaaaaaaagtctaggtcagggaaacagatggtgccattctctgagctgggagcagtggaggggagtggtttgggtggcaggatcgagtcccactgtatgtgtaagtatcatgatagggtccaagttagtgagttctcatgaaacaaagccatttaaatcagggctccttaagctacctgtggtgaggggctttgacattttgtagcatcacactgcatgtgatttattatgcaggcttgagaacacctgagctagcccatgccctattcagtgagaccagtccactcatctcatgcttagaggtggcaatgtcaagttgaagttctttaaacacaatcaatcttgctacctatctcactgcagactggtaacaagcagcctgtgaacccatatgattttgcagaccacattttgagtggactgatctagttcaaccccagtgcattttagagacagggaaactgaggcttggaggtggtgggggggattggccttgccccagggttcgcagaaggcagcagcaaagttagcatttcagtctttcccccactgaccctttgttttgatggcttgggctcaagcccaacagtccaaacagtgggtggacccaggggagtgtgtggagaactgtttccagcaaccaaggtcacaggcctggcctccccgtagctgagtcagtggctctgtgctgaacacttcccaggaacatgggctgacaggacacagcctggccctggagctggcacaagcacagtgggtcgaggattgctcccaaaagcccgaagtctccggccagcatgtggctggttggaccggagccaggaagggagacagtcatggctcccagccatcctgagctgctacagctgcccaaggtcagactgatactgctgaggtgactgcaaggcgtgccccaggatggaggcagaagccagccagcagcaggcctctgggctagctctgtagggggacatttggtctcctggcttttgctgcgtgtgggcttctccttgctgggttgggagccaccgtttccattagcaggttgggaatcatccattgcggtctcaagttgctgagaaagaggcagatagcaagggggagacatttggggaataagagattaagggcagaatatacagttaagagcatgggcctgggagccatgctgcctgctgggcttccgccttgtaacctttctgtacctcagtttcctgatctgtaagctgggcatgatgagaatagcctattcatcaacaaatggtaatgattctcagctattagtacacgccaggccctcatctgttagcccctcaacaggtgttatcacatttaattttaccatttacattaaccttctcaaggtgaattctgtcttttcacagatgatagcaacaatgacatcatagcaataacaatgatggctcttatttattgagcacttactgtgtaccaggcattccacatacaccacgtcgtctagtcctcctcagggtccgttgaggcccattttacagatgaggaaactgagactcagagatagtaaagggacttgcccaggataatttacactcagattttttagacttcaaagactgtgctctctctaaattccactgactgagctgattcctttagtgagagggcctgaaggggcatgggactgtccatgggaggggaggagtagggctggggccactggacaaccacttcctggtctcattttagagatggaggactgagatcaggaaggggaacgggcttaccctgggttctgcaggccacaaaccacagctccctgtgaacttgaacctgaggatacctgctctgtcttaccccaccccaccatttgtgtcaggtgccccagaacaaggcccgtgccaccaggaagagcaagacctacaccaagcaagcaataggagaatgtgtcccctgcccaggtgctagggtcctagaggccaaaacacagcatggcagcccccgtttgcagcatcagcggcttcatctgccatgaccccctccaagttccatcccatgggcgggctgctccggccagctctgtatccttagttcctagtaccggctccggcacagagcagggattcagtggttattgaaataactaattaacatttcttggccgactctgcagtggggagggcctttttgcatagagtctctagactcccaaaccagggctgtgagccccaggaagtaaaagctcagagctttctaagtgagttagcagattcaaagcttggactggggtggccatatacagacacttccatagagtttcaaagagcagcctggggtggtcactttcttctgcagtgagttgggacagtggcagggctctgcagaagttgaagccggtgtgtacccagcacagtcttggggtatctggggatgatgaaagctaagcagcttctggcaggggcaaggggctagtcttactctgaagtgctctggaattcctgggaccacatctttccctgacttctctctctctctttctctttttttctttttgaaatggagtcttgctctgttgcccaggctggagtgcagtgatgtgatctcggctcactgcaatcttcacctcccagattcaagcaattcttgtgcctcagcctcccaagtagctgggattagaggcacatgccaccatgcccagctacttttttgtatttttagtagagacgaggtttcaccatgttggccaggctggtctcaaactcctgacctcaagttatccccctgcctccacctcccaaagtgctgggattacaggtgtgagccactgtgcctggcctcttctcttcccttctcttcttttctttttctttctttcctttccttttcttttctttcttctccccctctttctgtctctctctctctctctgtctctctctttcacggggtcttgctctgtcacccagctgggagtgcagtggcacaattatcacggctcattgcagcctcaacctcctgggctcaagcgatcctcccacttcagcctcttgagtagctgggatcacaggcacacagcaccatgcccagctaatttttaattttttttttttttttgtagagatggagtcttcctatgttgcccaggctggtcttgacctcctgggctcaaatgatcctcccacctcagcctcccaaagtgctgaattacatgctcgtgatggggtcttgggagcataaacccatgaggtgcattggtcttcacgcaatggaagcagtaaaggaagacagcggaaatctcactgtggtgtgggctgtaggggagcagcctgtctctggcacctggctgcatcccaggctgttgctgcatcccccctggggcctgtctaaagacttgggctctgcttgggggtactgtattccaaaaataggaggtgggtccctgctgaacctcgctggtcctagccctgggagctgctgccaacctgtctgaacagtgtggagtttgcctgtgtggttgggctgtacagttctctgtgtaactgatgggctcatctgttccatgggctgccctgcgccatggtgcaggacacagtggaaagtgaagtgggcttcatctgtagccctgaacttactagagtgtgaccttagtctctctatgcctctgcttacacatccataaaatggggatattagaaatcatatctgaggctgggcacgtggctcttgcccgtaatcccagcactttgggaggctgagacgggcagattgcttgaggccaggagttcaagatcagcctggccaacatggtgaaaccccacctctactaaaaatgcaaaaaatcagctgggtgtggtggcgcacgcctgtagtcccagctactagggaggctgtggcatgagaattgcctgaatccaggaggcagaggttgcagtgagccaagatcgtgccactgcactccagcctgggtgacagagcaagactctgtctcaaaaaaaaaaaaaaaaaaagaaatcatatctgatagggctatgaggattcaatcaatcagtccatcaatcagtaatcagaaagtgcttagagcagtgctgtcatgtgtcagataagtgtttgttatgtatgaaatatgtggatcagtgattggggcccagttcctgagtacccgggtgctgacccctgggcctgtgggccacctagatcttaccactctctagatcccagtttctcctgtactgaacagcaccatcatttatgtacctctgagaagcactgggatgtggtgaacagagcactggactgggagttagcaatcccagccctgccactcagttgctgtgtttccttgggaaagttactttccctctctgggcctcagtttcactgactgtaaatgggaaacaacagtgaaagatctccaagggccctctggcttagaaagcctggctgccagtgactcccctatcctgccctaggctatacactgggaggccccccagccctgttgatttgtgtctggagctatgggaggcagagggcagtggctgccccagggctcctccagccatgggatgctctcctatcctggcctggcaggctctgggccttggggcactgagctgctctaccctttcctcaccatgctatggtccagagcattgatgaatgtattctggactcgttctggactcagcacactgggttggcagagctgctttgcccatcacagcatagggcgtaattttggagtcattagtctcactccatggctaatgtctgcctccctcactggactgtcagctttgtgaatgcagggccctgcctattggttctctgccaatccccagggcctaacacagagcctggcacagagtctatgctctgtaactgtttgttgattgaaagaaggtgacaactcagctgaagctcgagggcacctctgacgtgaaggaatcctatattcaggctccccaccctaagaaatcttatcccacacaccagaaattccatcctagaaaccagccagcctcattggtgattgtttagctccatcagaattggccatctcttgagactcacctccttagcttcccaggccaagggtgaatcctgcttttcaggagccagcaggatgacagccttccagtctagaaggttcctaggccctgcaaggactgccttggttctgcccccagggacaagatgaaacactggttggagtttgtaagtgaccaactcagaggagggctattctgagtcgacccgataaagaatgttttcttgtagcagtgtgcatgtatatgcttgtgtatgtgagagagtcaggaatacagagtcagagatagacaggggcagggatacaggcagaaacatcccgagaccctggggggtctctaccatagggagagaaagagacagagacaccgtgcttcagcctaggtggccaaggtgggtggggtgggcatgggaaaatagaggctccttctgtccattttttctgtgccatcatcccaggatgcctgctgctctggtgggagccagccacaagttgggcattcccaacttgggcctcagggacagcccagggtgcatttgtcaacatcatgacaaactgcagcaccagagaacagctctgtgctggcacagcagcatcttgcagttgtctggctgtatggtggttaagagcgggcatggtgagtaggagcaactagttttcagtcctggctatacagacaactggctatgtgactgtgggcaacttcctttgccattctgtactttggactcttcatctgtaactggggtaatcatagtcctcccctcctcacaagctgctggtgaggattcagtgaattaatgcaggcagagctctgggaacagggcctggcacggagttcatgctcaagaaagggtagccaagagccagctcagagaatcctctattcatcccacaggtgggcaggttaaggttagcagcctccttttacagatgaagaaaccgaggctcagagaggggaaggaacttgctcagtgacacccaattaaccagtgctggagctggaactggagctggggaccctctcctcccagtccagggcttgttccactgcccccgcagttcctccttggggatgtctctgtcattcagggctgtaactctcattatagccaatattactgtaacaggatgttacagtccaaactgccctcccagctggctgtctccgggggaggaagccccaggttctctttccacataggattctgcagagtttagcattcaaagattcagctgtgtgctgggaagggactgaagctgccaccccccaccctgggggcagtcgcattctggaagtcagcgtgtgctggctgcaggagcctgggttcagttgcagcctcccactgggacaggaacagcgtcggggtgggggtgtgacagggaagcctcggtgcctcggtgattggcttggtcttgcagggagcggctgccagcaggccggctggaggcggctttgcgctgccccagcctgggagccctcaggatgtgtgtggggtggagcctgctagggatcccagtgccagggggtgccgttgtgagggatggacgcctctcccccggagcagcactttggggccagcttgggccctggggatgagccacaggggacccacagcctatgcgtgtgagcatgtaacccgggagccagctgggcccctcgcggggtgggcagaaggacgggctggcccaggaccctcttctttgagacatcccggactccatctcggatgaaagtgctttgagaaaccacagagttttctgtttaatggaagaaagaaatccagcctctctccagagtggcggtggccggctagacagggtgtgtgtttgggaaaggcgctggaggaggaggaagaggaggaggacaagtaggaggaggaggaagaggaggagggacgggtgatgcaagggttttgaaagcgctacctagatgtgggaggtggaacctggtcatttggttctgcttttcctagcaggtatcgctcccctggggaacttgggtaagtccataaatagctctgctgacacaaaggagctctgtctggggaaggcagccgcttgacacggccgccaggagctgccacagccacggccgcccgcctgcgggaggagccgggtggaaacctgggcgggcgagctggcaggagcggcagccaggagtcgcctgggtccctgctggagtatgctgggtaggtaccttggtgacaggactgtgtgtgtggtgggcgggcatccaagccaccctgtgcccctgtttctattgtttcttccccagggcagccattgataggcatgttgcaaccaaaccatttgtgctctgttctgagatagctctgtgtgtgtgtgtgtgtgtgtgtgtgtgtgtgtgtgtgtgtgtgtgtctgtctgtctgtctcaggggctgggagccctgcaagttttgggggatgcttcctctgttggctgctccccacttctaggctggacagccagcttttctttctcagagaaacaagaaatgtttggtggccaaaaagtcgggacactgcatgggaggggagcgctcagccagcagggttggctattgtatcaggggtgctggccgcacaccaggcaccagggatggaagctcgtgtctagtttcactggcaggggaagaggtggtctctggaactagtctcagcgggttgcctttggtccctgagacggcctctgctgaaacgtccactggaagcacaagcaaagatgctttgcctctgacctccaaccccatgggagagggcctgcacctgctcccttggctccagctgagacccatcaggcagggggtggtggtagagacaggctcacaccacagagctggccactgtgagcagacagaggctaattcttttcccagcctggagggtccacatctctattcttgttcccaggtgtccaggaagaacccttgaaccctaggactcagggcaggaggataaatctggacccagaaaggggaggagccttgtccaagtttgagcagcaggtctgtggctgagcagggaccaggatagagaacttctgcctcctagaacagcaagaacaggacatgtgggaaaccatttccctgacctgaactaagtattataattcagcttcaaatctgaccttcctgacctgagaggcttggtacaccaggccccacagcgatgcttgaaaactttccacatcctgctgccctcaggccttctggctgggtggctatctggcgtcctctcccagtgctagagtgggtacatctcctcaagggaaggagccgcagaggctgccctgctggtgcctgtgggatcccagccagggcactgcaggcatagtcaaagtttccaccaaggccccttgagtcctctgtgcccagccaaggggcacctcccctcttccccagccctagcacatggtgtggcttagcctagggcaggcccttcagggagccgagttccacaacagggctcactgcaagcccagactggcttctgagaagcaggcagattgtgaggatgaggcagttgaggcaagtgaccactcctcgtgagaagtctccagggctttgagccagaaattgttgatgggacttctgattataagtatgtggtatcagtgaaatcattgcacttccaggcttccttgcctttgcaaatgctgttccagctgcctggaaacccctcccctcccctcccctcccctccccctccatgtcttattttatccaaacttccacaactagagcaaatactccagccagaatgagtctgtccattggtggtggcacccatggatattgctttgtgtcctatgtatgcagaatctgggccttattcattccttagtcgcaaggacctggccaggggcctggggcatggttggagaggggcgttgcattgtcctggctagggcaggttttctttgaggacaaacagtgacatgcaagtcagctgtgtccgcccatctcctagctctgtgcctggcatagagggcctgtcggggagcccctttaggagaggcctaggctctgaatgtcaaagttgcatccatagggccaagggatggggctgggtttgataggaggtgaggcggggagaattttggcttcatcctggcggagaccatagggagaatccactcaggggtcatgctgggctaggtggaattcacagcatagcctgggccatggagggtggaggggatagccctggcttgttgaaatgcaatgctgaaggacctttgcacagactacaggggattggagctcagctccctggaccctcttgggatggtgccaaccagagtaggtctggggttattgatcctcaagccagtggtctgtgtggctccctcagaagaggcacagctgaagagagagtgcctatccccagctgggtccctgggggccttgagagctgcttcccattggcctcttaaggccctggagatggcagtctctttgccttctattaggttggtgtaaaagcaactgcggtttttgccattaagagtaatgtaaaaccgcaattacttttgcaccaaactatagatagatagatagagaactgaggcaggagaggaaggacacttgcctgaggtgacatgcgactcagcaggaaatcagggacaagaactcaggttcccctgcccaggcctctctgtactgcaccaactggatgtctcagagtatccaggtttcatcttggggctctctttctggactcaccagtgacatgtcccttttggaccttcgggctcactgactagagccctgctatcctctgggaaaagcagcatgtgcaatagacaaagccccttggtcggtgggctggagactgcggcaccttctcgtcccttcttactgatgatttcaggcaaatatgccttgtttctcacctcagtttctcctttgtagcaactagggactggaccaagtactgccaggtgccttccaaatatccagttctctgattctttgcaggccgtctcctcttcctggcttccaaaagtcaatggtcagggccagggcttggtgcagcagagaagcagcccccagcctgttccccaggcgcctctgggcaggagccttcgcatgcaagctgcagcccaagccgaagctgggaggtttgttgttgtttgtggagccaggcagtttccaagatgtcattgcttagggaaaaccatcattcctcccaggaataaacaaggctgcttatggctcagccccctaagcctggagaagctggagccactcacagcagaccagccaggctcagcctcagggagtgctgcctgcccctgcacaaccagctgtaccctggcttccaggattggagtggggatgggggcaggatggtgggaggtgtgctagagccataagcctcttgggagatcagagcttccgggcacagatgagagggaagagggtcccaggacatgctcttccttctggcagtgggcctaagtcatcactcgagatgtgtggatagctgccaggtatgctccagatggcccagggcttctcccctctccctgccctccatgggccagcccgcttgcacctggtaccgtggctcaggctgctgccggagaactgtcagcggctcccaacttagaaaggggggtgtgtatttggaactgggcatgcttttcgccacatagccagggctctctgtggtgtcctcagttacctcttactggggttagccttgggcaaatagcagagctcggggactcagggaagggtggcagagggtaagggaacaaggagagaggcagagaaaggtcttggcagtgcctctggggaccacatggctggcaggaaccttgacagcaggccgaaggcagccaggagaaggactgtggaatgggaggtggcatggctatgccacccctcaagtcaagggttggaagcaatgttcagccaggccatgaaatcttcacttctcagacctcacttcctgcagttcccagttgattcaaatagcagcagctctgtactgtcctctctgcctgtctcccttccgtgtctttccttctttccttccttccttccttccttccttccttccttccttccttccttccttccttccttccttccctccttccttccatgtgtgttaagcacctactgtgtgccatgtacttacaaattactagtggcatagatctaaaaggcccaatctttaatctagtgccaggatgttcaggtaatggacagtaacaacacagctttaatggagaggcatggggtggggaggggggtgctgtgggactccccagggaagcactcagttcagcctgggagcctcagcaaagcttcctacaagaggtgaagctgcatgtgattgtacagatgcttgcccattgaagagcaggtctccatcccagtctatccacccctcagaggtgtagacatgattcccgcctatccatggaaattgcttttgtgtgtccagccacatgctcctccttgtctagggaggttgtataggaatatgggctctggacttgagggaaggatctctcctaccttacagtcttgtgctcttggacaagaatggagcttctcctgccttcatgtcctcaagcagtggtctagcctcctcgagttaaatgagataatagctgtaaagcacttagacatgtttcatgtgaatggattctgtgtcctgatagcagtgggagtgccactagcgcccatctcataggtggctgttattaaatgcagcgatgtaggtgaggtgcttggcgtggatctgacactgagcaggcattcaggaggcagcgcggcagcgttttgctggagggaaacagttggaatgcgcaatcagagatgtgtacaaagcaaggagctcaccgagaagcagtgagcctcagcccagggagcagaagaggagacactgggatgaggggttttatttgtttttaaaataaaccttttaaattgaagtgcagcatacttccagaaaaattagaagaatacagccaatgaattttccacaaagcgtacccccatccaggtcaagaaatagaacattctggtaccctaggaatccccacaaataaccctcttttagttactatgacctcaaaggtaaccccgtcctgacttctttttttttttgaggcagagtctcgctctgttgcccaggctggggtgcagtgcactgcaacctccatctcccaggttcaagtgattctcctgcctcagcctcctgagtagctgggattaccggcgcgtgccaccatgcccggctaatttttgtatttttagtagagacaggtttcactatgttggcctggctggtctcgaactcctgacctcaggtgatccgccctcctcagcctcccaaagtgctgggattacaggcatgagtcactgcacccggcccttgtcctgacttctctcatcgatgagcgtagcctatccttgaattttgtgtaaatggaatcattgggtacatattatttcatgctgacttcttttgatcagcattttgatggcaagattcatcaataatattgtatcaagctttattttgtttattcttgttgctctgtggtatttccttgtatgaatataccgccacagtttatctaatctactgctgatgaacatttgtgttgtttacagtttgaggctataatgaatggtgctgctatgaatattcttgtacttatcttttgatatactatgtttgcttctgttaggtgaatacctaagttttgcaattgctgagtcatagagttgtagagagttagctttagtaaataccatgatattattttccaaagtgtgacaggaatatactccctttaagctgtacatgaaagagcctattattccatgtctgtaccaacattattggtattagatattgtgatatctaattgtggctttaatttgaatttccttgatgtctggtgaggtcgagtccctttttcatgtgttgattagccatttggatgacctcttttgaaaagtgcctgttcaagtctttcccccattttcctattggatttttttttctgattaacttgtaggagcttaaacgatattgtagatatgtgtttattgttggatgtgcacattccaaatatctcttcccactctgggatttgccttttcactctcttaagggtatatttgaagaacacaagttcttaattttaatgcagtccaatttgttaatcttttttcttttatggagagtgtttgttgagtcctgtttctctgcttattacaaggttatggacatatacttttatgtattcttttagatgttttatgtttcatatttagatctaaaatccacttgaaatagatttttatccatgtatgaagtagaggtcaagactcattttctctggataaatattcaatgtattcaaaatccatcctgtctcactatagggcaatgtcacctttgtcagaaattgaggggcaatacgtgggtgggtcacttgaattttgaagaatgagtagagcttcagcaggtggacaggggaggggaaggtgctctaggcaggacgtacagtgtgagcataggtttagaggggcctgagggtagagtgtagcagactggctggagggaaaagaggagaaacggtgtggtggagaggttggcgggggcagaacacacagggttagaggatgggactttatcctagagggatgaaggcattttgagcaggagaccaatataggcaagttggtgcagggccaagggagataagagaaagtctcatgacagagggaggcaggagggtgggtttggagaagactgtaaattcagccaaacctagccctgacatcacccccaagcagagatagggtgtgcctgcctcaggaggcagcggtgaggctgagtgtgcctgaggctcgggagggtgaccttcggccacagggttgtggcttagtctcatgtccacatgtccactccagtgtcctcgagtgaaaaagcctcttttttttactggatgggcaccccaccaccacccagtgcccccagcgctgcaggccctgaaggaggagggcagtggggcagactggggcagacagataaggcaagggtgtgtatctggaaagggggacctttctgttcctcctgcccttgatgcccccacaaggagacctggctatgccttgggccctgaactctgatctttctaggctagctgagattcagaactggacagacatgctgggaagagcaagacccagtgaggggagtgatttggcccaggccatgcagtgagccagactgacccagcctaggggcaggctgagcacagactcatctgccttctcagcttccaagtttccccccctgaaacctgcaactaacaggactcctgtcctaggctgctgtaagggtcagaatacgtcaagtgccctgtcccggaattggatgcaggagagggagctgatgatgtcgatgatcgtcatgagagtaacaattatgattacagaaattgcagatgcttattgagcacttactaggtgccaggccctatgctaagccctccccacagagctgtgatgtgggtactcagtattcacattgccattttacagatgaggaaatcgagcctgaataggttaagcagcctgtgcaggtaccttgacgtaggaggtggcagagccagggtttgaagcttgatttgcctatctccaagccccagttgttcatcagcaataggcttccctccttccacctctggctttcagtcctccctattctcagagctgttgcttggagtaaaaccttagtttttgggttggtccctggtgcccactcatgagagagtcaagctgtggagaggaaggcaaggagcagaggggcaccaccatgggctactgtgtgccaggcactgcctccatatgccccgtagcagccgtgaggaagcggcacactggctgtgagggaggcggcacatggataggaattgggattcacccccaggccctcctgcttccaaaggctgacctcatgactgcagtgctatttgtgtccttccctgaggtcatcctggcatggcagagcttctttgattaacctagcagaaaacatcacagagaagccacacgcttctagctctccccacctggaaggggaccctgggagggagaggatttgggagggtcactgggtgtacagaattctgcactgcccctcccaacaccaggtgtcagtctcctgcccctcagtctccaaccatgtggagtccgagcggggcccctgcgtctggtattgctctccactgcctagcacagagccaggcccaggtttgtcctcaggaagcatcctttgaaggaagggaaggaggaagtgaagacggcaggaaaggagatcacagaggagtagaaagagcagggctttggagtcaggcagaccatggtttcaattctgactcttccactgacttgctttttgatcttgtgtaagttacttaatgtctctaactcctagttttcttattaaaaatgatactgatctcataggattgttggaagtagagcctaaagtataaaacaactgtcacagtgtgtggcatgcagtagatgctcagttaatgatctctctctctcccctatctttgtcatcattatctgttttgaacacctctagcttcaccttccttacctctgcagcgctaagtaaacattgctttcagggtaacgttggaattccttaaaatatccatgctcctgcctcatccaaccacctccacttccttgaatgttccctgctggctctggctcagcctggaatatcctgtcccatcttttcccccctattacctcctcccagagccatcctagttgtccctgctgcctctacttccacagcctcctagcatggtagcaggtgggtgagagatggacctggcatctccaaggcagagaacatggcttgttgctgtttggcagcaatagccaacacaggccctggcgcatggctgcagctctgtaggtatttgctgagtaagtcttgggggaaatggtgtgaataagccagacatgatcctgatgagccaaacaggacctgcccggggccatgacagcagggcaggctgggtcttggcaggggagcagagagccttctagccagggcatccgaggcagattgaaccagtgctcacagggatgggcaggaagtagacttgagggatagagagcttagggaaatgagaggtcccagtacacacacacggagcaggcagaaaagcagggtgccgggtgggaaggggagtgaggatggatcccacaggcagactggttcctcagcagagccccagggggcctggagttccccttctcacaaggcatcagtcaccactagctcaggaagaagctaggaacccccctgctctcaactctcaactccctgcttttcagagaagagagctggaggagtagaaggggtgtttggggtggtgggtggggacaaagactacgagtccacccatgttgaagcagtggtgtcagaaatggaggcgagaggagaagggacctggtgagggggtgacagggcagcaccgtgctgaaacccagaccccgggagccgcctccccgccctgggagaagctgggcatccaggcaggtggtggtgggtctccagcaggctgcaagcggcatgtccttctggcttggtcaggcgatagccaagagtaggaaggttttctgagggggccctcgtgtctcctctttcctcagggattccctttctgtgagtgttggctttgtcctgagagtccctgcgcgggggtgagctaaccttctgtgcctcagtattgctttctgtagagtgggtgcactccctgctgtggtgtgccgccctcctgagcctctgacagaggagcttcagtctgtggtcgaattcttcctttgcccctctctcctcctgcagtggggcctctgtttagggaacgtgaatgggcagctgcctccagggaacttgccacctcccccgtcctgctccaaggtcatgcctcttctgcacaggctccccactatagagagggttctatgtgttggaactggtcctgggcgaggttctgggctggattttagtgctgattctgttgtatgaccttggccttatcacttcccttctctgggcctcacgtaacagacagtcaccttgcctgttacctgacgccactctccagaattgtctcgtcagtcagaaagaagtaaaaaggcctgggccttactcctagggactgtgatgcagtaggtcttagattgggtccagacaggcatttttaagatactcctcaggtgattctaaagtgtacttctccgttaagaaccaatagtctaggtcggtgtttttcaaactttaatgtgcaaatgaatctcctgggatcctattaaaatgcaggttccgatccagtgggtgtgaattgaggtttacgaatgtgtattttatgaggtcaggagatcgagaccatcctggctaacatggtgaaaccccgtctctactaaaaatacaaaaaattagccgggcgtggtggcaggtgcctgtagtcccagctacttggggggctgaggcaggagaatggcgtgaacccgggaggcggagcttgcaatgagctgagatcacgccactgcactccagcctgggcgacagagcgagactccatctcaaaaaaaacaaaaacaaaaacaaaaaaatgagtgtgtattttatataagctcctgggtgatgctgctgctggctcttgggctgcactttgaggctaagagtctagatggtcctgtgaagttcactggattgttctttctttttttttttttgagacagagtcttgctctgtcaccaggctggagtgcagtgacgtgatcttggctcactgcaacctccgcctctggggttcaagccattctcctgcctcagcctcccgagtagctaggattacaggcgcccaccaccacgtccagctaatttttgtatttttggtagagacggggtttcaccatgttggccagtatggtctcgatctcctgaccttgtgatctgcccttcttggcctcccaaagtgctgggattacaggcgtgagccaccgcacccagcgattgttctttcattcatttattcattcaaacacttcaggtggggagtggtcagacgtgaggctacagggagacagagcccagggtcttccagggctacagaatttggactttatctgagaggtattggggagccagccacagcaacgttttaagcagaggagtgacaagttgaggtttgcatggaggcagctcccctgacatagcacagagaatggccagtggggtctgcaccgccactgtgagccccacatcatcctggtgggggatgacagtggtctagagggaagtggcagcagtggacatggagagagtagaaacattctttttaaaaaagattaatcaactttttaattttttgattttttacttttgagacagagtctcactctattgcccaggctggagtgcagtggtgcaatctcggctcactgcaacctccgcttcctggattcaagcaattctcctgcctcagactcccaagtagctgggattacaggtgcgcgccatgttgcctggctaattctcgtatttttagtagagacagggttttaccatattggccaggctggtctcgaactcctgacctgaggtgatccacccgtcttgacctcccaaagtgctgggattacaggcttgagccaccgtgcctggcctcaacttttattttttagaaattagctttagaaattagtgcaaagtacagagagttccaatatactttgtcctacttattgccaacctccctagtaaaaagatccttgaagttgtataagtgatgatcaggatttgaggattgaccatgggggtggtcacgaaggaaaaggagaaaatgatggccaattccctggtttgggcaactggtggtggcttcattgatacagggaccattagaggaggaatgatggacttgcggggagatcacacattcagtgtagggcttgtagagttgggggtactgatgggatatgcagaaggaggtctccatccatgtccctgggatgcagccacacagctgtcctctgtgtcagcagcatgctaaggctcttcctggcccggggctttggcctatgctgcttcctcccctagtgagccccgccctgccccttgagcagatttcggtctccagccattccacagggcggccttcccaacactcccctggactctctcacagcacccgagggttttccttcacactgcagatcttggtttctgtttatcctgtgtttatggcagtgatgacttggtcaatatccctccttcctctctagttcgtaggctccacaaggacaaggatcatgtctttcttattccttcctttatgcacagagcctagaacagtgtctggatgcagaactattccatgaggatttgttgaatacttgcctgtggcatctcaactcaggaaagcggtcagggctggcagagtggactgcgagtcatcagtggccagatggtgcagatagcgattgtggcctggggagtgggtgggttcccaagggagtggacaggactgtgatgagaggggccctgcagcaggtcctgatggacaggcagacaggcccatgagagggtggagaaggggtgaaattcagggagggagatgttaaggccacgctgtgctggagtgaccatggctatcgtttattgagtgctcatgggtgccctcatggtgctgagctctggatactcattagctcatttattcctctaacaacattgtgaggagattctagaaatcctatgttatggctaaggaaactgaggcacagaaaggttaagccaaaggtcacccagcaagtaagtgtgaagttagtatctggagctccccctaatgtaagtaccgcctccatcctcctgaattttgccaaacctgctgtgttggagacagtggaggtagaggggagaggagtatggcctggagggtctctgagctggtggcggaggaaggactgggggtgtcagcctctgggtggtcaagaggccagacctggaggagctgggctgacgctgagccaggagagctaagtgttagctgagccatcaaggttcctggaagctagcattgagtcagggacctgaggctagggatccagagcatgccaagcttgaaggaacagcccatcttgaaagcctgggggtccaaggcagggcaggaattctaacagcctctccctttctcaaaggactttacagttcacagagtgccttcctgccctttctcacttggtccccttaggtctctggcacaggaagcagcaggcatcctcacccactttcatggcagagaaaaccaagcttggagtggggtagcttgggatcacacagctagcaaatgatggagtgaagattccagtccaggtcttctggctgcatgtccagtgctctgtcagtaaaatcctggctgttaagggccaccctgagacagaggcaaaccccagtttacacccccccagtgcaggaagtggttttcgagggcagatgcagagcccggcatccgtggtggctgtgatgaatcatcggagtgagagctgcaggttgtccctgggtcagcaaacctggctgctcagtgagtagctgtgtgatgttggacaagtcactttcagcagcccaccactaccctcaacccaacatccggtgggcatctggggcccaggagccaaagctggtatgagtgtgaactctgggtgtcatagctgccatccctccttagcctattctgagctctggattggatttgggagaggatttgattaggtcctaaacagtgactccatttagagggcctggttcatttcctgtgtgcttacagcagatgagacatgggcagaattaacctggtccagccaagccaaagaagtgatggatgggaaagacacagacccccaccttgggagggtggggcagtggcttccagcactctagacccaaggccctgggtgagcaagctggtcttcctggggcgccctggctggattcttgttacttcagctgttgcaacagctgtctcactgggtccccagctgcctgtacttcctctatcagagcagtccccatgctccttcaaactagttgtctaacctctgttttttctacttaactgagggcagagattgtgtctgacttgttccctgccgtcctcctagtacctacctcagtgcttggagaatgcatgaatgtatgcgtgccccagtcctccctgccatccacacatcctgcccacattccccagagcagctttgacacagcacagctctgcctgtggcatttcgttgctcacagggcaaatcccatgcccaccatgtgttctgcaacctccccctcatctttgcctcccctcctgccctaattttctcctacacttgccaccctcccacccctgggtttctcgggtttcctataattgctccggagctcccgtcaaaccacttcccaccccagctctcccaagaacaggggccttaccaaacctgcacgcagtccctgttcatacagacctgcctgggagcacagaaagaaccatgagctctgggccctgttcgccagcatctgctgatgtgggatgcacccaggtgcggggcctcaggcagcactccaggctgttcctcctccttctacagccctctgaggtccccaaacacttgtgtgtaaggctccaaggaaacagggagagaccctgggcaggagatatgagttctaatcctgcatcagcctctcattcttaggtaattcctttaccctctgggaccccaggtttcttatctctaaaataagaccactgatagctcccattgtatcaaaagcttttccagggccaggcactgtgaggagactcaaatagtcctgtgagtccagtatgatatcactgggctcaattccagatgaggaaacggaggctctgaggtgttgagaggcttggccagagttgcacagctaaaaagtggccccattgggatcaaaatcagcctggctcgggtatctgagcacataaccactgggccctctgagaacccttccatcttggttagtttctcggctgatctctctgggtaggtgccctctgggggcagtacccctgcctgagtggcacttcccctcctggctttgtttggtttggcctcgatttagaacagggttggcagaggcaggctgacttgcatttctggttttgggtttgttgctgcactttccccaaggggtgggcgggctctgactgacagtcaccactgggacaggcctgggccccaccctcaccacccaggaaaggggaaatgcggcccgctccccactcagtgccactctgtgccactccgtgccaggccctgagggcacccggttgctgcttccttccgtctttccccaaggactatcagaggcaggtggctgggccagggggtgggtcggggggaggtctggccatgtggtagggtgataggactgaggggccccagggagctggctgcagggcagtttgtttctcctgatggagaatgctccctggtgggtggggcgatgggctggggactggtttgttcatggggacagagatcagaagtgggcttgagaagaacagggccagaaggcctggactctggccccagcctagcccctaatttgtgcagggtggctttgggcaagtcactaagtcactgtctagactgggccctcagccttcctgtctacccaatggagggtctttctgtccacctgggaacagcctgataggactgaagcacagcccttagtttccagatgagaattctggactggaggccctgacattacaattgccaacactgactctggtgtttggcaaaatttggtgtatgtgggaaacacgtgcctctggttgaggtccttaacttcagaatttccctctagatcaatgctttttaaagcactaactccaacaccaccatcttctgtaggagctttcgagctttccagcttttccagcatacgctcctgatctgttactcaggcatgctggttatcccatttcatacgtggacaccttgaggcctaaaggttggtgactggctctacctgacacctctgtgtgattctaggttgccccttgctcctctctgggcctcagcctttctgtctatgcagtggggatttcggatcgctgttgtttcagagtctgaggctatgaggtctgagagggcccttgtgtggagtcacctctgagctgcaggcaggatttccagggcaagaaggccacagcatcagcaggcacctgtctttggcctgtgagccatagcctaaggcgtgcccttcccgaccttggccagatcacgctagagtcctccaaggcctcccctcccttgcccagccaccttctctgctctgcagggctccactttcactttcacactcccaggctgtggctcttacccgtgccgagctttcacatccgctcacatctgtgctcccagatgccagcgtgacccctgacacgtgtgtgcagcagcctgcagctgccccaagccatggctgaacactgactcccagctgtggggcttcaccattacagactccccagggcttcaaagacttctcagcttcgagcatggcttttggctgtcagggcagctgtacaatagtgggtaagtcaccggcctttgggctcagttttctcatccatcaaatggacattaatgatttctacaatgagagctcttaacccatgttctgggggtacttacccctgaagttttctgccagtgtgcgcgtgtgcccgcaggtgcacacattcccaagcatctgttcagttcccgagtatgggtgaggtctttccctttcattagttctcagcagctatggcttcttgaagacagaacctgggctctaaataaatagttccagctccggcattcctggtccttgactgggaggggcccaccccagacttgagaactgcctccctgtgtggttgtggcaccatggacactcctgactttctcggggccccaatcttctggtgacatagctgctattcagactttcattaagagaaatgtttttctctttgcacatgaaatctactgtcgaaactcagcaaaaccccctaggatcccgagggttgtgtgtgaggcaggagatgctgtgttttttgaggaatccctgagcttcctccaagcagtttaaaaatccctgggtgggtgattcttcagggaggttccgtgtgtctgcgacatctggtgagtccaggtgtggacaatattttaaagttccggtttcattccagtttaatagtttcaaaaagatacttaagcgttcagagcacattcttgtttgaatgactcattaggattttttaaacttgagttcaggtagaagacaccctgggctgggttcagtgactgccctggcttggttctggtccataagcagagactgcctggttctcctttatccccagaggcaactttgaccctgtttccttttctgtaaaatggggacagtgatgcttcttttatagggttgtcgggaaggccacataagagagtggggtcaagctggcctggcacctgccaaagcaggagctagatagatagtggttatctctccctcttctcctataaatgaccagctgtgtttttgatggagcagaaagttcaagcaagaagacagggtgagaattgttacccagctaagtcaaaggggctttgggggttccatctggcacctcagctttcagactgggggcccggggttcaggccactgcctgatttcatgtcagctcatgcatggtgtctggcatcttggagcctcctcttctgaactgttcttgttttctttttgtttcccagatgtttgagacggaggcagatgagaagagggagatggccttggaggaagggaaggggcctggtgccgaggattccccacccagcaaggagccctctcctggccaggagcttcctccaggacaagaccttccacccaacaaggactccccttctgggcaggaacccgctcccagccaagaaccactgtccagcaaagactcagctacctctgaaggatcccctccaggcccagatgctccgcccagcaaggatgtgccaccatgccaggaaccccctccagcccaagacctctcaccctgccaggacctacctgctggtcaagaacccctgcctcaccaggaccctctactcaccaaagacctccctgccatccaggaatcccccacccgggaccttccaccctgtcaagatctgcctcctagccaggtctccctgccagccaaggcccttactgaggacaccatgagctccggggacctactagcagctactggggacccacctgcggcccccaggccagccttcgtgatccctgaggtccggctggatagcacctacagccagaaggcaggggcagagcagggctgctcgggagatgaggaggatgcagaagaggccgaggaggtggaggagggggaggaaggggaggaggacgaggatgaggacaccagcgatgacaactacggagagcgcagtgaggccaagcgcagcagcatgatcgagacgggccagggggctgagggtggcctctcactgcgtgtgcagaactcgctgcggcgccggacgcacagcgagggcagcctgctgcaggagccccgagggccctgctttgcctccgacaccaccttgcactgctcagacggtgagggcgccgcctccacctggggcatgccttcgcccagcaccctcaagaaagagctgggccgcaatggtggctccatgcaccacctttccctcttcttcacaggacacaggaaggtgagaaagctaaagggggagggagaaggatacatgcaatgtggggagggctggcccaggggctgcagggaatgagaagtcaccatgttccacccccactatcctggcagcctcccagcgaactttccacctgttggacagaagataaaactgaggcccaatgggaccaagaaggcagagcatggacttaaacacatgactttaggattccagatgctgtgttcttatagctccactggtccccacagaaagcagagcaggtgtagcttagcccaggccattgtgtatttggatttaaaagatctgagatagtagctggagaaatagagttacagcctagccagactagaaatccatcagccagtcacaatgacaacacacatttattccgtgtccacattatcctaagcagtttacattaactcattaactctcacaacagccctttgaagtagatagtatttttgtgcccattttacagcagaggaaaccgaggcaaagagaggttatctaacttgctccaggttacacagtgtatcagtgtctgaactagaattagaatctggttccagggccagtgctcttaaccaaccaccacaccgtttgcctctcgtgaatatttatatgtagatgaataagtatttatggatttcctgctgtgtaccaggccctgcgctctgcaacatggcaggagccacagaagtgtgtgaggctggtctcaacctgagagaaataagttaactgtgtgagccttgaaagtggcctaacagtgaacagattgcgccatgatcttgaagcctaccagctagtttgggtctgggctctgtttcttactatgtggctttggttgagtcactcaactcctctgagccatagttttcttctctgaaaagtaggggttaatagcactcacatcccagaatggttgaggatgaatggaagaggctggtgcctgataacactagccgcttgagaggcggccctcagggaatgctgggccccactccttctcttgaaatgcaacagccagtgcaaggtgttggtgtgaggctaggtgagtaggggtgctcagtgcccatggagcacaactgactcagagatctagaacttcaggaggacagaccccagggcctaaagccatcagggaaagcttctggaggaagatacctctcagcttggccttgaaggatgaacaggattagaataaacagagaggtagaggcaagcattctttggctagagcagagcattcctaaagggcagatgcctggcacaggtgctgctattcctccctccaacccatggcagacatcattaatggattccagcatacttcctcaccaagttgggacatgtcctcagaagcctgcttagcttcttagccactagcaagaaggcagacttaccttctggggagatgccttctgctgaaagctagtcattctgacagggcaggctggggccctccagaaaagggtcttgaactttggccttggaactaaatctccgtttcctcatctgtaagcgtgtgtggttctcacactgtggtgtgctccggaatcaccaaggggaggtaattaatatgtgattcctagtccccatacccagaactctggaatcagaatctctaggggtggtgcccagaccctatattttaaacatgccccgagggatcatgatcttgccaaagtttgaatatcaccatcttaggccatttcttgatggtttctacaggagagagtccggaacgctgtccttccaaggcaaggcctcaggctcattcagatcaggcctggccactcctctttggagggcggttgaggcccacctgccttgggcttcccaatcctgattcccccactacacccttcccagttctattcccctcaccacacttgctccaataaaactatttatatacagataaattcacacacattcatatgtatgcatttatctaattccccagctcagttgacctcggctcctattttgggacacatactcctgcctgggagtctagcaggcctggaccagctctctcttgtctcagcttcctcctttgggtgcccaaggttcccactggcaccctcccctgtcccaccaacttttagccggtcacttcctttcttgggtttgagtggctgagctggcagagacatcagaggctgcccccagcctggtggtggccacccttccatgtggcttccacacaccagttcctgagccctttgccattcacatcctgccctcttccaccagtagcttcagtaggaaacttgtcaagaggagatgaagccccggatgggacaaacaccgtggtctagctccatctcttactggtactgggccttgggcaagtccctgcccctctgtgagccacagtttcctccttggtgaaatgggtatggtaataatgcctccttcctagggttgctgggaaaattaaatagcttaacacaggtaaaacatttagggcagtacctggcgctcagcacctggtgggtgctgcataaatggtaatcatgttatgtggagggggagggggagaagagcagtaaccagggtagtactggctgtgccgccattcgaagtaccaccagaccccatttctcaccttcctgacactgctgcaaagtggacaggcacttggcttacagtgggaggctgaggctagtgagagatattttgtccccagccacacagcagcaagtgatgatggcactggacgaggcctcaccattgtctagtcagtcctctgtggctctgccctagactctgagacctcatgctgatgaggggccgggggtgggggactggcagagggacagtggcaggttcccccatgacttctatcttcctggctttggcctggctcttctgggagggtcccctgatgctgatgggccactattcctaggcaatgccaggcaagaggtgaagaggggaggggtgaagtgttcaggctgtggagtcagacagacccaggttcaagtctcagctctgcctcctcctccctggctctgagaccttggccaagttgcttctttctctgagcttcggttttctcttattaatggaacacggagtcccccgggagttgtcccaagggttccagggcgcagtacgtagaaagcttgggctggtcatttgtgctgctgtgcggataagctgaggctgcccagagtacatgctgcctgccacagggtgacattcagtctcgacgttgtctccggtccacacccctgttatcctgccctcttatgtgctgagcaatttctactgtgagtaggaatgtcagaacaggcagacctcagagatagtctgctcgaccatggtgatctcacagatgggctgactgagtccagagagggagagccccctgcccccactccccgccatggttctccagctggccatcccctgggtgtggcgccctgtgctgagttgagtggtctcatggtgccccctgccgccagacccctgccttcctggctgctccctggaggccctgcagagcagatcacaggccttcttcctggggagtcaaggaagccccggagaataattgtgtttgggtccaggatgctgccattgaattctagtccagcctatctggctcagcacagagggtcatgggctattctttgacagtgaggagaccacaggctgcagcccttccctggccctgcttccttcctcccctgcaggggactggcctgggcagaggtggtccacagagggtgccagccctgtttcactaagctcccacgtaggtcagagatcagacgagaggaccccaaaaatgccttccagctccaagacgataataccttcaagcctcctatttttaaaaagcctaaagaattatttcggatgtgtaaacaagtaagtatagagtttaaatccactgtttccacgtggttccatggggcctgccaggctgggctggatcggagagggcagccatggatggccagggagccccagaagtccgaccaggaccaatagggaaaccagctgagccctgctcacagacgagcgctcagtcactagtgggctctggacccagaccacagttctctgctacttgttagttcagagagcccaggccagttatcaaactgccctgggcatctgtttcctcagctgcacactgaggggaaatatcagtaactagctcttagaatcgttgccaagattaaatgagataaagtatgttaaaacactttggcccggcacctgacatgtagtgaacgctcaataaataatggcaaaacccatgctagctgagagtacttgctcactgctgtgtgttgggcgctgtgctgagcacgtccccgtgttaacttacataatcctcaccacagccctttgagggaagtccggttattacccgcattttacaaataaggaaactgaggcacagagagggatgtaactgagctaaggtcaatgagctaataaatgattgagctaagcttcaaatccaggcaattaaaaatctacactcttaatcattactataattacagttataattacagtaagaattataattattgttccaagaggtggtgagctcctagtccctggaggtggctggatgaggctgggcagggcccagggattctgcctggagtgaaggaagggctgtatggtcctggactcacctccatctgcttttcagctggacaaggtcacatagtgagacagtggggagaagatggaaaggagaatccctttggagggcctttgcagactaggccctgggcaggcattgatgcagctgtgggaggggagggaagagtctgaggagccactctggccccctccaaggtcagaggccaaagcctccctgcagctatggtgagtccctagggctgggaatcagaacccgattttttcacctcaatttctccttggctcacaggctctttttggtgctggggtttccccagcagcccagggggctgactcctagggccagagctgcccagcccctctgtcaggctgctaggcttgggtcagtccctgctgaagacactctcctccccacagtggaaggaagagcccatttcccagcagcgcagaggctgaggatggcggctgggtgggagtggtccccaggcccattgtgtggagccgataaagtacggaagctgaggttagaatgggaggaagcccagggcccgagggctctttcccacgggtgggggccttgggcatggccttgccaggccagcatgagtgcagcctgtatgtgcactgaagggtgccctgaatggtgacagtggtaacactcactgggcaatgaccactggttactgaggttagcgtgggtgccaggactgggccttggggtccagagtttatcctggtgaaccttccatcagccctgtgaagtggctgtcactatgcctaagccatagctaaaaaaatggaagccgagaggctaggaaacttacccaaagttggtgaaagcaggatttatatccaggtctggttccaaacacttgctctgaaatcacacaccatacggtgtgtgcctctgtgtgcacgtacacacatgtatgtttacaactctggtggggcagcattctcaggaaggaggcagcacttcccgagtctttcacaggaaacattaaaatgtgttctgaccttgcatttttgagtagcagcatcctctggtggagaaacacaggccttgaattgaggcagattccagctctgtcacttacatgctgggtctccttggggaagtgacttaaattctctgagcctctatttactttataggtttattgtgaggtttaatgagatagtatctgaattatgccccatccagggtctggcctatagtatgagctaaatgaaggtgtaattcatccatccatccactcatccactccttcatccatccacccacccacccacccatccatctattcacccatgcattcatctaccatccacccacccacccacccatccatctattcacccatgcattcatatatccatccactcatccatccatccacccatccatccatctatccacccacccacccatatattcatccatccatccatccatccactcatctatccatccacctatccacatatccatccatccatccatccatccatccatccatccatccatccatgcaggtgggagactcacaaaagcatcccccgaggaaggaattgcacatggagatgaagaccttctgttggttggaaggcagagttgaggaggttgctgaagtaggggccaggctggagagataactgaaggaataactgaatggaactttctgccctgatcctaagatggtagatccagtcgtgttacggagtttgaatgttatcccgagggcactagggagccatggaaagctataaggcaagagaggtgcactcaggcctgtgtaatgatttattttatacactgctgaccatctcaggtctcctttgaacttcagaatcctgacttaatcattatgatcctgattttagaaattaaggaatagaggcttagagaggggcagggattggcctagtgacacagcagaagccctgccctctcacctgctcactgcctgcaatgaagcctctgtcctgagtgccagccgtctggcttctccccagtgagctggggacctgactgtcccaggaggagatccctgtggccggagagtctgccaggccgattccacttcatggccaggctgttcccagcagtggggtttccctccctcacctgtgtgccgcgggtgggggctttggggatggaaggggctggtggcagggaatgttgggtctctgagcctctgtttacttaggcaggagttcctgggtgcccagactgcatcgtgtctgtcttctctccgcagatgagcggggctgacaccgttggggatgatgacgaagcctcccggaagagaaagagcaaaaacctgtacgttgggaagatccctggcttctgcgctcctcttcctcccttgccccagggcttgtctctcctctaggggtccaggtggggagaagaggttgtgcctggtcccgcccacaaccccagacagacaccaaggaaaaactggatcttggaactttgcagtgaccccaaagtggggtcacctgggtcctgagcattctctccaagtgaggcaaagtgctgattcagtacccggaagccacagtgaaccagaagcaaccagcccgtttgccctggctttagcccagcttctgagccaagcagggaccaagtgacttcaacaactcctttgctccctctgggcccaagagtgacctgagaaggggtggaactgacagtcattggctcctctttctcttcctgagctcctgaatgctaatagtctcaggcattgccaggagggggcgctgctggcccagctgccgaatcccgcactcgccaagcctttctggccacactcaggccttcttatactatagggtgtttgttagaggtgtcaatgaaaaagatgtgtgtgtgggttctcaggtcttcttctacccccaggcctaagaccctggagactcgggggaggtatagggaggaggcagtggggtgcatgcacagtgacacctccagaggaagcccctccccaccaggtcctgtagcacccaccactaggcaggaattgggctatagggaggagcctcctgcaaccctcttctctggccttgaccgtgggtggggtccactaccctagaaagccttcctcaccccagctgccttgacctctccagctttctgcagcaactgttggcttctcttactccacagccaattgcattttcttagcaaggtgaaatgcataaaccaaaacagtcccttgcaccaaccatcttcacttaaccttttgtaggatgagagaggatccagggggtgccaggactgttgaatgtggtgctggaagtgggaggtgtagggaagcagtgtgtggcgcagagggcaggcatcccgggtgctggagcagccctgtctagcctcctttcaatgtaggtgctgccttttgaattgcctgaagcccacactttttttttttggagacagagtctccttctgtcacccaggctggagtgcgatcttggcttgctgcaacctccgcctcccaagttcaagcagttcttgtccctcagcctcccaagtagctgcgattacaggtgtgtgccatcacacccagcaaattttttttgtacttttagtagagatgggggttttgccatgttggccaggctgttctcaaactcctggcctcaagtgatcttcccgcctcggcctcccaaagtgctgggattacagacatgagccaccatgcctggcctctgaaggtcatactcttaaaagcttagacgaagagtcttagaacatctacggtaataataagaataaccattaatgtttattatgccccgcactgttctgtgtgtatttcatatgtaatctaatttaatctttaccactacttttattttccgttctgttctttcttattgaccttacccttattttacacgtgaataaactactgtgcaaagaggctaagttacatggcaagaaagtggtggggttgggacctggagacctggcctgctggcttctgtttgaggaaacagcttgacagagaaaaaaccttgataggaaacttgagagatcaggaaacgtgtcaaagggcacacagctggtaactgctggagctgggatttgaacccaagactagctccagagcctgggatcagcctcccctgcaggactctccttcattagacagggtgtctaggtcttagtgccattttaagcttgaatagcatcagaagtataaatgcttcaaacttaccaaacccccttgaaagtttaattattaaatttcttttgcacgtctttagttatgtgatttttgaataatcaatttttcattttcatttttggtttgagtcagcattttccatctttgggaggatggagaccaaaacttaaagtgaaacatttattattcgaaaatcacaaaaccatgcacacaacattaaataattaaactttaaaatggtgtttttgtaagtttataggacttgtacttctgaagttattcaggcttaaaactactaagatgttggggtcctgctgtatattcatgactggatgtcgccaatgcaggtgactgaggctgagaggccggctggcaggagccattctctgggaggtgccctgtacagggggtctagggaaaagaggggcgaacatgagcaagaggcatttaactcctttcttgccagcagtttcacccagtgctgaattctgctgcctccttggggaccggcaaggctaaaaatggttcttggctaaaaatagccagtcctgccaccccggtggtgggcagtgcctcccctggctccctccttccctttcagcaatttgctgacttgtcccccaccccccaccactgtctccctgctgccatggtaacgaggaggccagtcacaaatagctgggactggcttcctgccggggcggccccagaggctgtcccttgcagacacatgcccctttcacggctccctctcagggttggccagaaggaatttttttttccgctccccctcctggtccctcccatttcctggctcctcctgtctgagtcccagccccggcttgtgcctgggagtccagtcatcaggccaggattccagagagcgtgtgtggctgcagcctgcaccgttgctgcccgctgcccaggacgcggggtgggggacaggagccagagtggtgcctcctacagaccaatctgcggccccaaggtggggggccctacagagatgctccgaggcatgtacctcactcgcaacgggaacctgcagaggcgacacacgatgaaggagtaggtgccctcgacccagctctcccgactctggatttgcaggggcgagtgggccaggctgagcaaccctcttttctgcttctgtccccagagccaaggacatgaagaacaagctggggatcttcagacggcggaatgagtcccctggagcccctcccgcgggcaaggcagacaaaatgatgaagtcattcaagtaggtcctccctggcaccctgggaccctttggggaactcactggctccccggggagtaggactgagtggtagggttgaggggaaggggcttgccggcttgatccagctctgggggagacaggctttcacagagggagctgggtacctggcaagcagctaccctcacagggagcagctgccctagggggaaggctaggtggggtggagatgggggctggaagggaccctggccccgggaaagagggtgggcctccttcctgggcgccccagctgggctcagctgcagactgggcccagggcagtaaacaaaggccgcctggcccagcttcccccaaggttcccaagcctctcagtgccctcactgtgtttcctccctcacccctcaggcccacctcagaggaagccctcaagtggggcgagtccttggagaagctgctggttcacaaatgtaagttgggcctgcctgcccactccctgtgccctctctccctctccccttcgcccccatccagaccctgtgtagctggtgctagagaggccgccttccctctcctcggccgtcagggtgtccttgctgttgcggaggggctgagcctaagctgaggcccttggtctggccttggagccagcttctgccagcccctccccgtccatgtgagctggcactgcctgccggaggcccgtgggacctgtgtgctcagatccatattcccagaataagaataaacatttctacgtactgagggctttcacggcgccaaatgtgcctgccatctcatgggcagggtcccatcggctcctcccagggctccgggagacagaatcgatagtccccatttcacagatgaagacactgaggcatagagagggggagaccccactgagaccctgaaagaggcagtggcagggctggggccacatcccagggctcctggctgtcggggacgggcattgtactcagctcccagcacgcccatctttaaagtcctgtaggggtaagctgaggcatcttaagggcaggagaggctgagtttgcctcttaccccaggatccgttctcctcacagacgggttagcagtgttccaagccttccttcgcactgagttcagtgaggagaatctggagttctggttggcttgtgaggacttcaagaaggtcaagtcacagtccaagatggcatccaaggccaagaagatctttgctgaatacatcgcgatccaggcatgcaaggaggtaggacctcagggcagaccctccgctcctccaatccccagggcccagtggcccttcagctgcaaggtggcagccagcagcacaggaaggggagaggccagaatgactccatgagcccaggtacccagcagggaagatgcaagctaggatcaggggaagaacagaatcccagttagtaataaaaatggccaccaccaaggcactgccgcatgccaggcatgtgctgagccctttatgtatgcgttctcatgtttaatccacacaacaacctgtgaaacgaagagacaggctgggcacagtggctcatgcctgtaatcccagcactttgggaagccgagccaggcggatcacttgaggtcaggagttcgagaccagcctggccaacagggcgaaaccccatctctactaaaattacaaaattagccaggtgtggtgatgggcgcctgtggtcccagctactcgggaggctgaggcaggataatcgcttgaacccgggaggcggaggttgcagtgagccgagatcgcaccactgcactccagcctgagtgacagagacaaatcataattgctcccatctattgagtgcctactgtgtgccaggcactatgcgcaaagcacattatatggatgatcttgcttggttttcacgctttgaggaatgtactattattcctagctggtagataagacaactgaagctcaccgcacttaagtaatttgcttcaagtcacacacccaggtgtggcactgctaggatttgaacccaggaagcctaaccctcagggtggtattttcagccttataaatgctgccagccctacaggaaatgactgagccaggacttgaatcctctggtctgagggtctctacttcagatgaaccttaagatgtggggcaaaggggcttggaggtgagaggctggatgggtcccttccaggcacatgggccctagggtcagtccccagcaggcagccctgaccatgtccccctctgcctccccaggtcaacctggactcctacacgcgggagcacaccaaggacaacctgcagagcgtcacgcggggctgcttcgacctggcacagaagcgcatcttcgggctcatggaaaaggactcgtaccctcgctttctccgttctgacctctacctggaccttattaaccagaagaagatgagtcccccgctttaggggccactggagtcgagctcagcgttcacaccaggcgggctgggtcccctgcccacctgcctccctgccccctgtgacggagggggcaagcaagcccccagaggccgtgtctctggacagacggatagacatacggaagcgaggcctggaccaagagaggcccaggctactggaggagtagaaggatgggccccgtggggtccccactgccccggtacgagggggcccaagaccctggcaggtcaggggccctggccaagccagatctggagctgctgctccctgctgcggagaccgcggaggcttcgcgttgaccaagttccttaaagaactggctgatggggcaggaggtccaggcctgggctctcgggccctcctagagggccattggagcttgcagctcagacccccactttgagttttatttatttaaatagtagttggatgcttggcacgtcgtcctgtaataggaaacccttgcctcatcagttttcctgatttacaagtgcaatattttagccaatgccttgggagaagctgccatgcaaaggtggacaccattctccagcttcaggggatatgctcgtcccgggcaccggtggcaggcagctggccttctggactaaggcagcctggggggacactgcagtctggctacacacagagatctggcaccccctgggtggagtgtccctcgggggctttgggaaagcatggcaccctcagaccacacagtagccaagttctggagcaaataaaaggcctgtgttatttcttgttcttgaccctttttgtgtgttcctggtcttgagccttcccagggtggctggggctgggagggttggtcgttgggctgttgattcagccactgctctcttgccatcacctgcccccatcctggagcccgatacactgatacactggtgagggctgctctcccatgccttcctctgtgccaggcactgtgccactcatcctagtggtcactgcatctcctccccaagcctgggaggtagggcttatccccattttacagatgaggagatggaagcacagacagggaaggtcacgtagccagcaggtggcaggggttcagcccaagtctgactgtctgcaaagcctgggctctgccggctacaggatggagtccttgcttatcgccagctggccacatgtctttcagcaagttccttcaattctctgcctcgccacaccctgaggtttgaatagaactttcacgtggtgcagggatggctggtgaaggtagacggggccagaatctcaggaagggtggtggtgggcttatggaggcctctgggcagaaggaacagctgtggagacaggagataggactcacagagtctttctgtggccctgggtaaggctttccccactgtgcctttgtttcccctcctacctaacagaagatgcgagtttaggaaaggcccagggcatccttcaagggaggacctgggccacttgcctagaagtgggcagaagaggcccagagtccaggccaagctgaaggcaaagctgaccccacatatataacctcccaggggccagggcatggcccagggtggggtctggctcagcagggctgtcttagattaagctagatggagttgatgcaggaggagctgggccccgtctccttggatcttgttccctgcctggggtcctgcagacttggagctgcagacgacatggggctgtacagctccctcctccctgcctgcccttactcatctccctgggcaaggccagccctgttggcccctctgcacagtgagaggatcagaattgttggtctctggaggccttcagggagttggactgagccctcttcagggttacaggggactagagccagggcctgggtgtggagcagaagctgagcagggcttcatcaggaggaagaggtgggctgtctgactgccgctctgaccacacctgacttttcctgccccgcttgcaaatgggacccctaatgcttgctcacccttgaaacccatttggaagaatcttctgtgcaacaacagtagcctaggtcagcagagaacccccttccctctgctccccggcagccgtggcctctccttgactagcccgtactgagtcaggcatgggtttttctgtctccaaaggctttggaatcaggcaatcctgggtttgagtcttgtctttgctactgacttgctctgtaaccttggcaagtcactgcccatccctgagcctgcaaaaatggggatgattctattgtcttctcagtgctgggatgaacagccagtgagccagttctgcagaaaggtcctaacctggggccaggtataccgtaggtgcttgatacatgttggcaccagagggtgagcccctccaggagtggtgctgggtctttctccaggacctggcaatgagtgtcattgggctttataaactgtgaagagctttcccactgtagagattcagtgtctcacagaggctggaagggcctgggaagagtcgtgcttctaattctgaacaagggcaccttccaggttttttccaggcctgagatttggggacctgacagctgggaaaactggggcccagggaagactataatactactccctactcccccaaaatggtagaggcagtactgggtctgagcccaggacttccctgcctgacctggcctctctcgcatcttctgctgggaggagccactgggtccacaaggagacccacctttccagttctttatattctagggattcagtttagggccaggccttccctcttccaccttcccaacctcctggttcccagagttgccatggaaaccaaagtccgggagaacaaagtcaggcagatggaattcccatttcggaaggccccactgcctggtttccattactcacaccctggttcccttggcctccgagcggctttggctgtgcagagcagctggagggcagactagaaaggcgtctgggtccccctgccctgggccctgcctgggctccctggaggaccttgggtacattctctgcccgcttaggcctcagttgcctcatctgtacagtgtcatttgggctggttcccattttctttcacaggagaggaaggagcagtgctctctagtctctggcaattccaggcggtcaacgtgggatcacagagctgtgatgtcatttcaaccagctcctccccatcccacagatgggaagactgaggggagggaagggaagcagcactcttcactgtagagctgaagggccttggagtcaggctctggggctcagtctctggctccaccatttactaatggctgcaaacctttgaagaagtcatgtaccctctccttccctccgctttctcatctataaattgtgcgcattggcacttaccccagagttgcaatgactaagcgaggtcgtgcatgcaacaagtttagttcagtgcatggcgtggggtaggtgcttcataaccgtgagctgctgttagcgatctcattattcaaggtcacaggtcacattctccacttgcccaggcctgagaagatggggggggcctttggtctcagaccccagatccttgtccttccaggaacagttttgctggaggacaaagccagccaattccagggagtaagtgagaaacagcctgttcccgtactgctgcccagtcttggccctgctgggagcagttggggtcagctggcaaataggttgtggtgggtggagaggcaagagggcacagcagtgccactcagttggatgccagcaggagggggtgccactcagttggatgatagctgccgaggtgccaactgcagccaggctcctggtgggagagtcaagtccctcatgctctcggcctctgccatgtgagtgacgtgctctcttgacctgtcttgggccagctatggcctcccagactctccagcttggaagagaccattgagtctaaactgctgcccagcacttaggaccccagagtttctgcttgattccttccatgatggagctcaggagggcctgggagccccttgggggttccaaagttctctccatctgaagtcgggtcctggggcagggtggggaaggagggataggttagtcctacccctgcaggtctcctgcccaggcagccacctctggacccaccagattctccagcttcactcctccctgctcctctcgcttgcaccaaactctcagctccccaccctacctccctgcctctgcacccccttgtcccttaacctactgtcccctccccaaactcttcccactgacatcccacccctgaaggcctctctgcttcacctcccttcctgcccaaacctcaggctcctggcgactcctccacagccccaccgctccctcagagctctcaggccctcaagcaatggacctgacaggggtctcaaagaagccacctgttggttgttgttttgctaacaactggcaacatttgtggaacatctggctttgcctgtcctctccctagccagggaagggaggaggaaagtggtgcccccttccttgggtgggaggaggcagtgggggattgaggaacagctgtgggactgatcccatctgccgggtacagaagagagtggaggcatggctgggggtggggagggcagtgccaggcggcaggtagatataggagccaggaccacgcagaggcacacaccacgcattccatgcctcattgccatcgatcctcacaaagccctgggaggaagggctgagtattattttcagtttacaaatgagaaaattagggttcagagaaagtggacagcccatcatggctgaacagggatggggacctctatccctgacttccaggcagcctcagccagggctttccaaaagaatccacacctgcagccagtctgtgagacttagtggttcagctggagttgcagatgggggcttttgatgctggttctctttggcttgtgggcagaatttttctaaggaagtccgaggaataggtgagtttatgaatgtgcggatgtccggtcctgcaaggaatctcagttctcagaactgtgtgacaagttgctttacctctccgagcctctgttgttttaactatgaaatgggaataataattccacctcctgggactcgcgtggacttggcaggtttacgaatatgtgtgaaccctcagcacaaggccaggcacagagggagtgtgccctgcggggcagagggagggaggctggtccaggaggcactgtcgggccaagccccaaccagctgtgcaggaggaagctgcccccgcatctgctccaaggcagtgactcaatgacacgacatgggcagggccccaagggggcggggtttgggccctaggttccacatgggctcagcggggtcctgcctgcctgctgtttcaaaggcaaccaaatagcatctgcctcatcaggtagctggcctggcagtcaggagttctgggctttgagctcagatctgtcccaaacctctgtgtgaccctggatgaggcccctctctgctctggtccttggcttcttctcttgacacacaaggagaatccagcttttcctcctgcgtgaggaccttcggaaggggcagatggtgctctgtgggggtgtggggggctgggatccaggccaagctgcctctgtacgcggcggggtgtgtgtgcacgtgcgtgcgtatgcacaagtgtatgtgagctgtgtattcgagttgctagggctctttttagctgcttcccaggggactggaaggcctacttggatggagcagtctgtttatcaaggagctccacagtctacagggttcatgcccctggggacactgccctctgtgtcctccagccaggctggggacctgatctgctggtttttcacaagctcctgccctttaggcaaagtccatccccactttttacccccagcacacacaaacacagcacctgctggagccacccctctcaggggattcagctcagtttgctatccccagggagatataaaaaagaagggcctgaacaaggcacagccgatgcccgcccccagactggaggggaatacagcctccagtctgggaatataagtccagttccactgccgatctgtctgtggcaagtccctttcctcgctgggcctcactttccccatcttaaaaatgggtggggcgtgttcaaagtgctctctaggagccatccgactctgatgcctcaggctgtatagcttttccttctgaggtgctattgcagcaggaactggcttgctctcgagttctgtccattccaaggaaggggagggtggtaactgggggcttgggctttggaggctgacagacctgggcttgagtccaggttcagatgattctttattgcgtgaccttcggcaagtcgcttaacctctctgggccactgtttccacatttataaagagttaaagagattataaccagttaataataggtgttacctagtacagttgttgtgatcaaataaaagcaggggtgaactatttgcattcagccctgctggtctgccttctggtcctcgaatgcaccacgcttccttccatttggggcctttcacgtgcagtcctccctccctggaacactctttcccctgctcccttagttaatgacgatgaggaggaggaggatgaggatgatagctaacatttaatattttccaggcactgtgctaagtacttgactgacattttctttttttatgctccccaaaatcctgggagttaagagctattattattaatcactacagcctagtgccccgaggccaggcctgaggacagattgctcaggggaactcccagctcttccacttagttgtgtaaactcgggcaacttacttcactttctgggtctcagtttacccagtactcagtatcaggctgggcttgctctgaagcctgtgctcttgagtagtaggctgtattcctcccccccttctccagagcttggtttagatgtcactgcctcagggaagccttccctgataaccctgactataagagggcccctgctgactgctcccaaagcctcctgctcctcctctttcatggctcttgtcacaggttgtaattacacacacgcatatgttcattcatcgctgtctcttcctttcaagcttaagccccttggggcaggaaccctgtccgtcttctcactgtatccccaggcttatcaatcacagtgcctggcgcatggtaggtgcttaataaatacttatttattggataaaaggccatatattgcttagcatggtgggttgcacaggacaagcccatgaacaaaaagtctggataagaagccactgcatgagtaaagattgagttctgttgtaagtgacaaaaacacaaggtagaagtttctctctctcccataaaggaaactcagatagaagcagcctagtgctggcatggccttttcgtgatcatcaggaaccctgattttgtctgttactttgccgtcctcaaaatgtagcttccacttcctgtccaagatggctgcttgagctccagccatcacgcaaggctggaggccaagaaagagggggtaaaaggtaaattgcagttatgtcttagagaaggtgctcagaaactgtcacatgacactttcccttacaccccattggccagaactgagcacatggccacacttgtttagaaggaggctgggagcagtggctcacacctgtaatcccaacactttgggaggccgaggtgggaggatcacctgaggccaggagtttgaggccagcctcactaggagcctcactatggataacatagtgagaccctgtctctacaaaaaataaaaaactcagccaggcatggtagtgaactcaggaggttgagacgggagaaacccttgagcccaggagttcaagactgcagtgagctatgatggtgccactgcactcaagcctgggtgacatagtgagaccctgtctctgaaaataaataagtaaataaatgagaagagggaaagctgagaaatgtagtgttaatctagacagccatgtgaccagataaaaatcagaggttctgttactctggggtaatacaaaggctgagcagatgttggggacgactagctgtctccgccactgtcatcaatgacagacatccattctcgtaaggctatggagaggaagtggggcaagtgggcatgtgtcagttaactattgatacaacagtgctgcaaaacaaaccaccccaggccgggcgcagtggctcacgcctgtaatcccaacactttgggaggccgaggagggggcggatcactagaagtcaggagttaaacaccagcctggccaacatggtgaaaccctgtctctactaaaatataaaaattagccaggtgtggtggcacacgcctgtaatcccagctacatgggaggctgaggcttgaacccaggaggtggaggttgcagtgagccaagattgcgccactgcactccagcctgggcgacaaagcaagatttcatctcaaaaataagtaaataagataaataaataaataaataaaacccaccccaaaatacactggcctcaaataacaataacttattctctcttacgcttctgtagtcaaccgacctaggaagagctgggtgggacatgacccctccctgtgggctgggctcagaactactcactgtaacttttcctggaggcagaagggtcagggtctacctggggaaagttctcactgcagtgaaagcacgtgtgtgttttttaaacttttaaagtttaaaataattatatattcacaggaaattgcaaagatagtatagcgaggtctcatgtacccttcacctagtgtgccccaatgaacacatcttacataattatagtacaatatcaaaaattgaaattgacattgggacaatacgtatgtacagttctatgtcattttatcacctgcagatttgtataaacaccaccgcaatcaagacatggaactattccatcaccacaaagacctccctcgatacccttttataggtacacccattccccacccctaacccctcgcaaccactaatctgttctccatctatgtaattttgtcatttcaagaatgtgatataaatggaattgtacagtatgtgaccttttaagattgtcttttttcactcagtataacgtccttgagcttcatccaagatgttgtgggtatcctatttatgttgcgttcaatcctatttattgctgagtaacattctgtggtatggatgtacaaccgttcgtttagccatttgcctcttgagggacattttggtcatttccagtttggggctgttacatataaagctgctgtgaactgttgtggagagagttttgtgtggatgtaacttctcatttcactgggataaatgaccaggagtgcaattgctgggttgtacagtaagtataggtttagtttttaagaaactgccaactatcttccagagtagctgtaccatgagagatccaatgtttctgcattcttgccagcatttaatgttgccccagtgttttattttagctgttctaacagataacgtggtgattttcatccgggtcttaatttgcattttcctaatggctggtgatactgaacatcttttcatgtgctatttgccatctgtatatcctcattggtgaaatgtctttccatgtcttctgcccattttctaattagattgtttgctttttttactgttgagttttgagagcgcatacagtctatgtatgaatgctttgtcagatatacgatttgcgaataatgtgctcagtctgtagcttgtcttttcatccttctaacggtgtcttttgcagagcaaaagttttgactgttgatgaagtacaatttgtcctttttaaaaaatggatcatgctttccttgttgtctaagagctttccactaagccctaggagctgtacaggtagtggggctgttacatataaagctgctatgaagtattgtagagagagttttgtggggacataacttttcatttctctgggataaatgacccaggagcgcaattgctgggttgtacaggaaaatcctgaagattttctcctatgttttcttctgaacgttgtattgtttcacatttaaatctttgatctagtttgagctaattctcatacgatgtgaggtttaggttgaggttctttttttttttttttttgcctaaggatagccaatggcagccgggcgcagtggcacatgtctgtgatcccagcactttgggaggccgaggcaagtggatcacctgacgtcaggagtttgagaccagcctggccaaaatggtgacactctgtctctactaaaaatacaaaaattagccaggcatggtggtgggtgcctgtaatcccagatactcaggaggctgaggcaggagaacagcttgaacctggaaggcggaggttgcagtgagccgagatcacgccattgcactccaacctgggcagcgagagtgaaactctgtctcaaaaaaataaaaaataaaaaaggatagccaatggcttcagcaccatctgctgaaaagactatcattcttttgctgaattgcttttgttaaaaaacagctttaggccgggcgcggtggctcacgcctgtaatcccagcactttgggaggccgaggcgatcaagaccatcctggctaacaaggtgaaaccccgtctctactaaaaatacaaaaaaattagccgggcgcggtggcgggcgcctgtagtcccagctactcgggaggctgaggcaggagaatggtgtgaacccgggaagcgg

SEQ ID NO: 181 - DNA, 2875 bp, Homo sapiens
ttctcggctgatctctctgggtaggtgccctctgggggcagtacccctgcctgagtggcacttcccctcctggctttgtttggtttggcctcgatttagaacagggttggcagaggcaggctgacttgcatttctggttttgggtttgttgctgcactttccccaaggggtgggcgggctctgactgacagtcaccactgggacaggcctgggccccaccctcaccacccaggaaaggggaaatgcggcccgctccccactcagtgccactctgtgccactccgtgccaggccctgagggcacccggttgctgcttccttccgtctttccccaaggactatcagaggcagatgccagcgtgacccctgacacgtgtgtgcagcagcctgcagctgccccaagccatggctgaacactgactcccagctgtggggcttcaccattacagactccccagggcttcaaagacttctcagcttcgagcatggcttttggctgtcagggcagctgtacaatagtggatgtttgagacggaggcagatgagaagagggagatggccttggaggaagggaaggggcctggtgccgaggattccccacccagcaaggagccctctcctggccaggagcttcctccaggacaagaccttccacccaacaaggactccccttctgggcaggaacccgctcccagccaagaaccactgtccagcaaagactcagctacctctgaaggatcccctccaggcccagatgctccgcccagcaaggatgtgccaccatgccaggaaccccctccagcccaagacctctcaccctgccaggacctacctgctggtcaagaacccctgcctcaccaggaccctctactcaccaaagacctccctgccatccaggaatcccccacccgggaccttccaccctgtcaagatctgcctcctagccaggtctccctgccagccaaggcccttactgaggacaccatgagctccggggacctactagcagctactggggacccacctgcggcccccaggccagccttcgtgatccctgaggtccggctggatagcacctacagccagaaggcaggggcagagcagggctgctcgggagatgaggaggatgcagaagaggccgaggaggtggaggagggggaggaaggggaggaggacgaggatgaggacaccagcgatgacaactacggagagcgcagtgaggccaagcgcagcagcatgatcgagacgggccagggggctgagggtggcctctcactgcgtgtgcagaactcgctgcggcgccggacgcacagcgagggcagcctgctgcaggagccccgagggccctgctttgcctccgacaccaccttgcactgctcagacggtgagggcgccgcctccacctggggcatgccttcgcccagcaccctcaagaaagagctgggccgcaatggtggctccatgcaccacctttccctcttcttcacaggacacaggaagatgagcggggctgacaccgttggggatgatgacgaagcctcccggaagagaaagagcaaaaacctagccaaggacatgaagaacaagctggggatcttcagacggcggaatgagtcccctggagcccctcccgcgggcaaggcagacaaaatgatgaagtcattcaagcccacctcagaggaagccctcaagtggggcgagtccttggagaagctgctggttcacaaatacgggttagcagtgttccaagccttccttcgcactgagttcagtgaggagaatctggagttctggttggcttgtgaggacttcaagaaggtcaagtcacagtccaagatggcatccaaggccaagaagatctttgctgaatacatcgcgatccaggcatgcaaggaggtcaacctggactcctacacgcgggagcacaccaaggacaacctgcagagcgtcacgcggggctgcttcgacctggcacagaagcgcatcttcgggctcatggaaaaggactcgtaccctcgctttctccgttctgacctctacctggaccttattaaccagaagaagatgagtcccccgctttaggggccactggagtcgagctcagcgttcacaccaggcgggctgggtcccctgcccacctgcctccctgccccctgtgacggagggggcaagcaagcccccagaggccgtgtctctggacagacggatagacatacggaagcgaggcctggaccaagagaggcccaggctactggaggagtagaaggatgggccccgtggggtccccactgccccggtacgagggggcccaagaccctggcaggtcaggggccctggccaagccagatctggagctgctgctccctgctgcggagaccgcggaggcttcgcgttgaccaagttccttaaagaactggctgatggggcaggaggtccaggcctgggctctcgggccctcctagagggccattggagcttgcagctcagacccccactttgagttttatttatttaaatagtagttggatgcttggcacgtcgtcctgtaataggaaacccttgcctcatcagttttcctgatttacaagtgcaatattttagccaatgccttgggagaagctgccatgcaaaggtggacaccattctccagcttcaggggatatgctcgtcccgggcaccggtggcaggcagctggccttctggactaaggcagcctggggggacactgcagtctggctacacacagagatctggcaccccctgggtggagtgtccctcgggggctttgggaaagcatggcaccctcagaccacacagtagccaagttctggagcaaataaaaggcctgtgttatttcttgttcttgaccctttttg

SEQ ID NO: 182 - protein, 519 aa, Homo sapiens
MFETEADEKREMALEEGKGPGAEDSPPSKEPSPGQELPPGQDLPPNKDSPSGQEPAPSQEPLSSKDSATSEGSPPGPDAPPSKDVPPCQEPPPAQDLSPCQDLPAGQEPLPHQDPLLTKDLPAIQESPTRDLPPCQDLPPSQVSLPAKALTEDTMSSGDLLAATGDPPAAPRPAFVIPEVRLDSTYSQKAGAEQGCSGDEEDAEEAEEVEEGEEGEEDEDEDTSDDNYGERSEAKRSSMIETGQGAEGGLSLRVQNSLRRRTHSEGSLLQEPRGPCFASDTTLHCSDGEGAASTWGMPSPSTLKKELGRNGGSMHHLSLFFTGHRKMSGADTVGDDDEASRKRKSKNLAKDMKNKLGIFRRRNESPGAPPAGKADKMMKSFKPTSEEALKWGESLEKLLVHKYGLAVFQAFLRTEFSEENLEFWLACEDFKKVKSQSKMASKAKKIFAEYIAIQACKEVNLDSYTREHTKDNLQSVTRGCFDLAQKRIFGLMEKDSYPRFLRSDLYLDLINQKKMSPPL

SEQ ID NO: 183 - DNA, 4509 bp, Homo sapiens
cagacgctcctgtccgggtcgcagtgggacgccatggagcgctccctgcaccgcgtctccctcgggagccggcgtgcccacccggacttgtccttctacctcaccacctttggtcagctgaggctgtccattgatgcccaggaccgggttctgctgcttcacattatagaaggtaaaggcctgatcagcaaacagcctggcacctgtgatccgtatgtgaagatttctttgatccctgaagatagtagactacgccaccagaagacgcagaccgttccagactgcagagacccggctttccacgagcacttcttctttcctgtccaagaggaggatgatcagaagcgtctcttggttactgtgtggaacagggccagccagtccagacagagtggactcattggctgcatgagctttggggtgaagtctctcctgactccagacaaggagatcagtggttggtactacctcctaggggagcacctgggccggaccaagcacttgaaggtggccaggcggcgactgcggccgctgagagacccgctgctgagaatgccaggaggtggggacactgagaatgggaagaaactaaagatcaccatcccgaggggaaaggacggctttggcttcaccatctgctgcgactctccagttcgagtccaggccgtggattccgggggtccggcggaacgggcagggctgcagcagctggacacggtgctgcagctgaatgagaggcctgtggagcactggaaatgtgtggagctggcccacgagatccggagctgccccagtgagatcatcctactcgtgtggcgcatggtcccccaggtcaagccaggaccagatggcggggtcctgcggcgggcctcctgcaagtcgacacatgacctccagtcaccccccaacaaacgggagaagaactgcacccatggggtccaggcacggcctgagcagcgccacagctgccacctggtatgtgacagctctgatgggctgctgctcggcggctgggagcgctacaccgaggtggccaagcgcgggggccagcacaccctgcctgcactgtcccgtgccactgcccccaccgaccccaactacatcatcctggccccgctgaatcctgggagccagctgctccggcctgtgtaccaggaggataccatccccgaagaatcagggagtcccagtaaagggaagtcctacacaggcctggggaagaagtcccggctgatgaagacagtgcagaccatgaagggccacgggaactaccaaaactgcccggttgtgaggccgcatgccacgcactcaagctatggcacctacgtcaccctggcccccaaagtcctggtgttccctgtctttgttcagcctctagatctctgtaatcctgcccggaccctcctgctgtcagaggagctgctgctgtatgaagggaggaacaaggctgccgaggtgacactgtttgcctattcggacctgctgctcttcaccaaggaggacgagcctggccgctgcgacgtcctgaggaaccccctctacctccagagtgtgaagctgcaggaaggttcttcagaagacctgaaattctgcgtgctctatctagcagagaaggcagagtgcttattcactttggaagcgcactcgcaggagcagaagaagagagtgtgctggtgcctgtcggagaacatcgccaagcagcaacagctggcagcatcacccccggacagcaagaaactccaccctttcggctctctccagcaggagatggggccggtcaactcaaccaatgccacccaggatagaagctttacctcaccaggacagactctgattggctgagcaaacccaagggcgggactctgcttctggcaacttaaccctttcttgggcatcccctaccacacagtaacctcacctcaactggacctgaaacagaggaccaagatggtgggtctagggtcatctgaagggagtggtcccaagggtgcatgtggatgtcaacagaaggaccacaatggtgtgagaggccttgtgggcatgcagagactggcagcagaaagtcccaagaggagaggactcagaggcttcttccttccaaggaggaggaggaggaggacattccacatctgggcttccagtggtggctcccggacctgccttgggggcagcaggagaggttgggagaggtcaccctgatgaagaacaatgccatgatctgctgctgccagaggacatctccgcccatccactcattttccacctgtacacattggctcattcattcgatggatatttcgggtgcatctactttatgccaggctctatgctaggagctggggatactgtggagaaaaagtcggatatggtctcgctctcatcaagatttcagtctagctgggagtgagcgttaaataagtcaataccaacacacacacgtgcacacacgtgatggcaagctgtgatcatctatgaaagaaaaaacacagatttctttaagagggaattgtacttagagtgctgtgtgtgggggtggggatggggaaggacataacttttaaaccgagacttgtgggctggagaggaaggagccagtcctggacttggggaagagtgttcgcggtggatggaatagcacgtggagagtccctgagatgggaaggagctcagtgggctggaggaatggcgagcaggccagtgtggctggagcttagtgaggtgcaagacacagtgggtgaggtagttgatgtcttgttgatttcattctagatacactggagagccattgaaggcttttgaggaagggagttgcaagtacatttttacaagatccgtttacacataggaggggcccaagtgggtgtgagatcagttagggggctcgttcagttctctaggtgaggactgtcctggtggcttgtcctggatggtggctggggaagtggatgcctgaatgccaggctctggagaagagatgactccctgccccatccccctgcctaccctcctcctcaatggcccctctctcagtggatgtgagtgaggattaggaccttccccacagagccaccttttggccaggcctcgtgggggatagtgggggcagtgctgagttctaggagtgttcctggaagttgggggcagtgagtgctcagcctggcccaggtgggagagttcactgctgcccaggccttagcaggggctgctgtgctgtctttctgtcccatgctgagcattgtgataggaagctgccacacagtgccctggaaactgacttcgcatgctttccatggggcttccgagggccagggactgggctgggggtggcctagcagctctagtggagactgtgctgccgcagggctgaaggaagaccaaccaaggggacagccgtttgagcccagcccactcactgcctgctgcacctccagctggagcccagggttgggcagctctcatactcttatctaactgccagacctagagggagggaagcccaaggctgcaggtctgagggacacggctcatgggcaaaagggtatcaagaggattagagtcacttgcataggaaaagagggtcagagaggctgagggctggctgaggccagagaggttccctgaccttggacattctttgtgttgtgtaagacctcggcatctttagagaaaggttcttgtgcccctgtgagcttgctcagctgctatggccacttgaaccccaaaaatggtggcctagaagagaatacaccccttacttcccacttatcctcctctcaacctaggaaagatcagacatattgactcaacagtctaacaggggatgggctggatctgcccgtgaccagaccaatgccccccacccagcaagggagtaaacgctgcctgaagtgggaccagtgatacacagcatctctgtctgccagggctcagcccgcgggggggatttgtgagaggctgagcagctgggtctgcacagacagcaagctgcactttgatttcatttgattcccttacaaaatgacattaaggggaatgtgaggcacaggagactcgcctgtctgggaaggcagcaagctcatctctcctggacctggtgacctacctctgtctaccagacaggtgcagaggacaggagctctggccacaaagaaatggacagtctgaatgcagcacacagccctggggacaggacttttcacccagcctgtcctgacaagctgctgagtcgagcagatgctcacatcagggtcccaggtccggctgttagggaagtggacatcagttcctggtgggccctgggcagtgactgtggtgagccacagcaccattgctgctctgcctctcaaatcgatcgaacaattaatttggctccacaggctcgagaagatgaaacatgacctgatggccactgctgtccagcatcccagtccatcctagctgtccaggatgatgaacaagctatggaaattgcacttgagagctataatcacgggaagcattgccgagccc

SEQ ID NO: 184 - protein, 600 aa, Homo sapiens
MERSLHRVSLGSRRAHPDLSFYLTTFGQLRLSIDAQDRVLLLHIIEGKGLISKQPGTCDPYVKISLIPEDSRLRHQKTQTVPDCRDPAFHEHFFFPVQEEDDQKRLLVTVWNRASQSRQSGLIGCMSFGVKSLLTPDKEISGWYYLLGEHLGRTKHLKVARRRLRPLRDPLLRMPGGGDTENGKKLKITIPRGKDGFGFTICCDSPVRVQAVDSGGPAERAGLQQLDTVLQLNERPVEHWKCVELAHEIRSCPSEIILLVWRMVPQVKPGPDGGVLRRASCKSTHDLQSPPNKREKNCTHGVQARPEQRHSCHLVCDSSDGLLLGGWERYTEVAKRGGQHTLPALSRATAPTDPNYIILAPLNPGSQLLRPVYQEDTIPEESGSPSKGKSYTGLGKKSRLMKTVQTMKGHGNYQNCPVVRPHATHSSYGTYVTLAPKVLVFPVFVQPLDLCNPARTLLLSEELLLYEGRNKAAEVTLFAYSDLLLFTKEDEPGRCDVLRNPLYLQSVKLQEGSSEDLKFCVLYLAEKAECLFTLEAHSQEQKKRVCWCLSENIAKQQQLADPDSKKLHPFGSLQQEMGPVNSTNATQDRSFTSPGQTLIG

SEQ ID NO: 185 - DNA, 975 bp, Homo sapiens
ggacgcctctcccccggagcagcactttggggccagcttgggccctggggatgagccacaggggacccacagcctatgcgtgtgagcatgtaacccgggagccagctgggcccctcgcggggtgggcagaaggacgggctggcccaggaccctcttctttgagacatcccggactccatctcggatgaaagtgctttgagaaaccacagagttttctgtttaatggaagaaagaaatccagcctctctccagagtggcggtggccggctagacagggtagccaaggacatgaagaacaagctggggatcttcagacggcggaatgagtcccctggagcccctcccgcgggcaaggcagacaaaatgatgaagtcattcaagcccacctcagaggaagccctcaagtggggcgagtccttggagaagctgctggttcacaaatacgggttagcagtgttccaagccttccttcgcactgagttcagtgaggagaatctggagttctggttggcttgtgaggacttcaagaaggtcaagtcacagtccaagatggcatccaaggccaagaagatctttgctgaatacatcgcgatccaggcatgcaaggaggtcaacctggactcctacacgcgggagcacaccaaggacaacctgcagagcgtcacgcggggctgcttcgacctggcacagaagcgcatcttcgggctcatggaaaaggactcgtaccctcgctttctccgttctgacctctacctggaccttattaaccagaagaagatgagtcccccgctttaggggccactggagtcgagctcagcgttcacaccaggcgggctgggaggccgtgtctctggacagacggatagacatacggaagcgaggcctggaccaagagaggcccaggctactggaggagtagaaggatgggccccgtggggtccccactgccccggtacgagggggcccaagaccctg

SEQ ID NO: 186 - protein, 190 aa, Homo sapiens
MEERNPASLQSGGGRLDRVAKDMKNKLGIFRRRNESPGAPPAGKADKMMKSFKPTSEEALKWGESLEKLLVHKYGLAVFQAFLRTEFSEENLEFWLACEDFKKVKSQSKMASKAKKIFAEYIAIQACKEVNLDSYTREHTKDNLQSVTRGCFDLAQKRIFGLMEKDSYPRFLRSDLYLDLINQKKMSPPL

SEQ ID NO: 187 - DNA, 3698 bp, Homo sapiens
ttggggaggtgagaggtgatttcctgccattcttctgtggggcgggcttcccagggtgctcatgccaggctgacgggtccagtgcgggctcccgctgctgggggagagctgggttttcatggggcggcagccgaggcaggacccgcagccatgaaccgcttcaatgggctctgcaaggtgtgctcggagcgccgctaccgccagatcaccatcccgaggggaaaggacggctttggcttcaccatctgctgcgactctccagttcgagtccaggccgtggattccgggggtccggcggaacgggcagggctgcagcagctggacacggtgctgcagctgaatgagaggcctgtggagcactggaaatgtgtggagctggcccacgagatccggagctgccccagtgagatcatcctactcgtgtggcgcatggtcccccaggtcaagccaggaccagatggcggggtcctgcggcgggcctcctgcaagtcgacacatgacctccagtcaccccccaacaaacgggagaagaactgcacccatggggtccaggcacggcctgagcagcgccacagctgccacctggtatgtgacagctctgatgggctgctgctcggcggctgggagcgctacaccgaggtggccaagcgcgggggccagcacaccctgcctgcactgtcccgtgccactgcccccaccgaccccaactacatcatcctggccccgctgaatcctgggagccagctgctccggcctgtgtaccaggaggataccatccccgaagaatcagggagtcccagtaaagggaagtcctacacaggcctggggaagaagtcccggctgatgaagacagtgcagaccatgaagggccacgggaactaccaaaactgcccggttgtgaggccgcatgccacgcactcaagctatggcacctacgtcaccctggcccccaaagtcctggtgttccctgtctttgttcagcctctagatctctgtaatcctgcccggaccctcctgctgtcagaggagctgctgctgtatgaagggaggaacaaggctgccgaggtgacactgtttgcctattcggacctgctgctcttcaccaaggaggacgagcctggccgctgcgacgtcctgaggaaccccctctacctccagagtgtgaagctgcaggaaggttcttcagaagacctgaaattctgcgtgctctatctagcagagaaggcagagtgcttattcactttggaagcgcactcgcaggagcagaagaagagagtgtgctggtgcctgtcggagaacatcgccaagcagcaacagctggcagcatcacccccggacagcaagatgtttgagacggaggcagatgagaagagggagatggccttggaggaagggaaggggcctggtgccgaggattccccacccagcaaggagccctctcctggccaggagcttcctccaggacaagaccttccacccaacaaggactccccttctgggcaggaacccgctcccagccaagaaccactgtccagcaaagactcagctacctctgaaggatcccctccaggcccagatgctccgcccagcaaggatgtgccaccatgccaggaaccccctccagcccaagacctctcaccctgccaggacctacctgctggtcaagaacccctgcctcaccaggaccctctactcaccaaagacctccctgccatccaggaatcccccacccgggaccttccaccctgtcaagatctgcctcctagccaggtctccctgccagccaaggcccttactgaggacaccatgagctccggggacctactagcagctactggggacccacctgcggcccccaggccagccttcgtgatccctgaggtccggctggatagcacctacagccagaaggcaggggcagagcagggctgctcgggagatgaggaggatgcagaagaggccgaggaggtggaggagggggaggaaggggaggaggacgaggatgaggacaccagcgatgacaactacggagagcgcagtgaggccaagcgcagcagcatgatcgagacgggccagggggctgagggtggcctctcactgcgtgtgcagaactcgctgcggcgccggacgcacagcgagggcagcctgctgcaggagccccgagggccctgctttgcctccgacaccaccttgcactgctcagacggtgagggcgccgcctccacctggggcatgccttcgcccagcaccctcaagaaagagctgggccgcaatggtggctccatgcaccacctttccctcttcttcacaggacacaggaagatgagcggggctgacaccgttggggatgatgacgaagcctcccggaagagaaagagcaaaaacctagccaaggacatgaagaacaagctggggatcttcagacggcggaatgagtcccctggagcccctcccgcgggcaaggcagacaaaatgatgaagtcattcaagcccacctcagaggaagccctcaagtggggcgagtccttggagaagctgctggttcacaaatacgggttagcagtgttccaagccttccttcgcactgagttcagtgaggagaatctggagttctggttggcttgtgaggacttcaagaaggtcaagtcacagtccaagatggcatccaaggccaagaagatctttgctgaatacatcgcgatccaggcatgcaaggaggtcaacctggactcctacacgcgggagcacaccaaggacaacctgcagagcgtcacgcggggctgcttcgacctggcacagaagcgcatcttcgggctcatggaaaaggactcgtaccctcgctttctccgttctgacctctacctggaccttattaaccagaagaagatgagtcccccgctttaggggccactggagtcgagctcagcgttcacaccaggcgggctgggtcccctgcccacctgcctccctgccccctgtgacggagggggcaagcaagcccccagaggccgtgtctctggacagacggatagacatacggaagcgaggcctggaccaagagaggcccaggctactggaggagtagaaggatgggccccgtggggtccccactgccccggtacgagggggcccaagaccctggcaggtcaggggccctggccaagccagatctggagctgctgctccctgctgcggagaccgcggaggcttcgcgttgaccaagttccttaaagaactggctgatggggcaggaggtccaggcctgggctctcgggccctcctagagggccattggagcttgcagctcagacccccactttgagttttatttatttaaatagtagttggatgcttggcacgtcgtcctgtaataggaaacccttgcctcatcagttttcctgatttacaagtgcaatattttagccaatgccttgggagaagctgccatgcaaaggtggacaccattctccagcttcaggggatatgctcgtcccgggcaccggtggcaggcagctggccttctggactaaggcagcctggggggacactgcagtctggctacacacagagatctggcaccccctgggtggagtgtccctcgggggctttgggaaagcatggcaccctcagaccacacagtagccaagttctggagcaaataaaaggcctgtgttatttcttgttcttgaccctttttg

SEQ ID NO: 188 - protein, 913 aa, Homo sapiens
MNRFNGLCKVCSRYRQITIPRGKDGFGFTICCDSPVRVQAVDSGGPAERAGLQQLDTVLQLNERPVEHWKCVELAHEIRSCPSEIILLVWRMVPQVKPGPDGGVLRRASCKSTHDLQSPPNKREKNCTHGVQARPEQRHSCHLVCDSSDGLLLGGWERYTEVAKRGGQHTLPALSRATAPTDPNYIILAPLNPGSQLLRPVYQEDTIPEESGSPSKGKSYTGLGKKSRLMKTVQTMKGHGNYQNCPVVRPHATHSSYGTYVTLAPKVLVFPVFVQPLDLCNPARTLLLSEELLLYEGRNKAAEVTLFAYSDLLLFTKEDEPGRCDVLRNPLYLQSVKLQEGSSEDLKFCVLYLAEKAECLFTLEAHSQEQKKRVCWCLSENIAKQQQLADPDSKMFETEADEKREMALEEGKGPGAEDSPPSKEPSPGQELPPGQDLPPNKDSPSGQEPAPSQEPLSSKDSATSEGSPPGPDAPPSKDVPPCQEPPPAQDLSPCQDLPAGQEPLPHQDPLLTKDLPAIQESPTRDLPPCQDLPPSQVSLPAKALTEDTMSSGDLLAATGDPPAAPRPAFVIPEVRLDSTYSQKAGAEQGCSGDEEDAEEAEEVEEGEEGEEDEDEDTSDDNYGERSEAKRSSMIETGQGAEGGLSLRVQNSLRRRTHSEGSLLQEPRGPCFASDTTLHCSDGEGAASTWGMPSPSTLKKELGRNGGSMHHLSLFFTGHRKMSGADTVGDDDEASRKRKSKNLAKDMKNKLGIFRRRNESPGAPPAGKADKMMKSFKPTSEEALKWGESLEKLLVHKYGLAVFQAFLRTEFSEENLEFWLACEDFKKVKSQSKMASKAKKIFAEYIAIQACKEVNLDSYTREHTKDNLQSVTRGCFDLAQKRIFGLMEKDSYPRFLRSDLYLDLINQKKMSPPL

SEQ ID NO: 189 - DNA, 4119 bp, Homo sapiens
ttggggaggtgagaggtgatttcctgccattcttctgtggggcgggcttcccagggtgctcatgccaggctgacgggtccagtgcgggctcccgctgctgggggagagctgggttttcatggggcggcagccgaggcaggacccgcagccatgaaccgcttcaatgggctctgcaaggtgtgctcggagcgccgctaccgccagatcaccatcccgaggggaaaggacggctttggcttcaccatctgctgcgactctccagttcgagtccaggccgtggattccgggggtccggcggaacgggcagggctgcagcagctggacacggtgctgcagctgaatgagaggcctgtggagcactggaaatgtgtggagctggcccacgagatccggagctgccccagtgagatcatcctactcgtgtggcgcatggtcccccaggtcaagccaggaccagatggcggggtcctgcggcgggcctcctgcaagtcgacacatgacctccagtcaccccccaacaaacgggagaagaactgcacccatggggtccaggcacggcctgagcagcgccacagctgccacctggtatgtgacagctctgatgggctgctgctcggcggctgggagcgctacaccgaggtggccaagcgcgggggccagcacaccctgcctgcactgtcccgtgccactgcccccaccgaccccaactacatcatcctggccccgctgaatcctgggagccagctgctccggcctgtgtaccaggaggataccatccccgaagaatcagggagtcccagtaaagggaagtcctacacaggcctggggaagaagtcccggctgatgaagacagtgcagaccatgaagggccacgggaactaccaaaactgcccggttgtgaggccgcatgccacgcactcaagctatggcacctacgtcaccctggcccccaaagtcctggtgttccctgtctttgttcagcctctagatctctgtaatcctgcccggaccctcctgctgtcagaggagctgctgctgtatgaagggaggaacaaggctgccgaggtgacactgtttgcctattcggacctgctgctcttcaccaaggaggacgagcctggccgctgcgacgtcctgaggaaccccctctacctccagagtgtgaagctgcaggaaggttcttcagaagacctgaaattctgcgtgctctatctagcagagaaggcagagtgcttattcactttggaagcgcactcgcaggagcagaagaagagagtgtgctggtgcctgtcggagaacatcgccaagcagcaacagctggcagcatcacccccggacagcaagaaactccaccctttcggctctctccagcaggagatggggccggtcaactcaaccaatgccacccaggatagaagctttacctcaccaggacagactctgattggctgagcaaacccaagggcgggactctgcttctggcaacttaaccctttcttgggcatcccctaccacacagtaacctcacctcaactggacctgaaacagaggaccaagatggtgggtctagggtcatctgaagggagtggtcccaagggtgcatgtggatgtcaacagaaggaccacaatggtgtgagaggccttgtgggcatgcagagactggcagcagaaagtcccaagaggagaggactcagaggcttcttccttccaaggaggaggaggaggaggacattccacatctgggcttccagtggtggctcccggacctgccttgggggcagcaggagaggttgggagaggtcaccctgatgaagaacaatgccatgatctgctgctgccagaggacatctccgcccatccactcattttccacctgtacacattggctcattcattcgatggatatttcgggtgcatctactttatgccaggctctatgctaggagctggggatactgtggagaaaaagtcggatatggtctcgctctcatcaagatttcagtctagctgggagtgagcgttaaataagtcaataccaacacacacacgtgcacacacgtgatggcaagctgtgatcatctatgaaagaaaaaacacagatttctttaagagggaattgtacttagagtgctgtgtgtgggggtggggatggggaaggacataacttttaaaccgagacttgtgggctggagaggaaggagccagtcctggacttggggaagagtgttcgcggtggatggaatagcacgtggagagtccctgagatgggaaggagctcagtgggctggaggaatggcgagcaggccagtgtggctggagcttagtgaggtgcaagacacagtgggtgaggtagttgatgtcttgttgatttcattctagatacactggagagccattgaaggcttttgaggaagggagttgcaagtacatttttacaagatccgtttacacataggaggggcccaagtgggtgtgagatcagttagggggctcgttcagttctctaggtgaggactgtcctggtggcttgtcctggatggtggctggggaagtggatgcctgaatgccaggctctggagaagagatgactccctgccccatccccctgcctaccctcctcctcaatggcccctctctcagtggatgtgagtgaggattaggaccttccccacagagccaccttttggccaggcctcgtgggggatagtgggggcagtgctgagttctaggagtgttcctggaagttgggggcagtgagtgctcagcctggcccaggtgggagagttcactgctgcccaggccttagcaggggctgctgtgctgtctttctgtcccatgctgagcattgtgataggaagctgccacacagtgccctggaaactgacttcgcatgctttccatggggcttccgagggccagggactgggctgggggtggcctagcagctctagtggagactgtgctgccgcagggctgaaggaagaccaaccaaggggacagccgtttgagcccagcccactcactgcctgctgcacctccagctggagcccagggttgggcagctctcatactcttatctaactgccagacctagagggagggaagcccaaggctgcaggtctgagggacacggctcatgggcaaaagggtatcaagaggattagagtcacttgcataggaaaagagggtcagagaggctgagggctggctgaggccagagaggttccctgaccttggacattctttgtgttgtgtaagacctcggcatctttagagaaaggttcttgtgcccctgtgagcttgctcagctgctatggccacttgaaccccaaaaatggtggcctagaagagaatacaccccttacttcccacttatcctcctctcaacctaggaaagatcagacatattgactcaacagtctaacaggggatgggctggatctgcccgtgaccagaccaatgccccccacccagcaagggagtaaacgctgcctgaagtgggaccagtgatacacagcatctctgtctgccagggctcagcccgcgggggggatttgtgagaggctgagcagctgggtctgcacagacagcaagctgcactttgatttcatttgattcccttacaaaatgacattaaggggaatgtgaggcacaggagactcgcctgtctgggaaggcagcaagctcatctctcctggacctggtgacctacctctgtctaccagacaggtgcagaggacaggagctctggccacaaagaaatggacagtctgaatgcagcacacagccctggggacaggacttttcacccagcctgtcctgacaagctgctgagtcgagcagatgctcacatcagggtcccaggtccggctgttagggaagtggacatcagttcctggtgggccctgggcagtgactgtggtgagccacagcaccattgctgctctgcctctcaaatcgatcgaacaattaatttggctccacaggctcgagaagatgaaacatgacctgatggccactgctgtccagcatcccagtccatcctagctgtccaggatgatgaacaagctatggaaattgcacttgagagctataatcacgggaagcattgccgagccc

SEQ ID NO: 190 - protein, 429 aa, Homo sapiens
MNRFNGLCKVCSRYRQITIPRGKDGFGFTICCDSPVRVQAVDSGGPAERAGLQQLDTVLQLNERPVEHWKCVELAHEIRSCPSEIILLVWRMVPQVKPGPDGGVLRRASCKSTHDLQSPPNKREKNCTHGVQARPEQRHSCHLVCDSSDGLLLGGWERYTEVAKRGGQHTLPALSRATAPTDPNYIILAPLNPGSQLLRPVYQEDTIPEESGSPSKGKSYTGLGKKSRLMKTVQTMKGHGNYQNCPVVRPHATHSSYGTYVTLAPKVLVFPVFVQPLDLCNPARTLLLSEELLLYEGRNKAAEVTLFAYSDLLLFTKEDEPGRCDVLRNPLYLQSVKLQEGSSEDLKFCVLYLAEKAECLFTLEAHSQEQKKRVCWCLSENIAKQQQLADPDSKKLHPFGSLQQEMGPVNSTNATQDRSFTSPGQTLIG

SEQ ID NO: 191 - DNA, 4088 bp, Homo sapiens
cagacgctcctgtccgggtcgcagtgggacgccatggagcgctccctgcaccgcgtctccctcgggagccggcgtgcccacccggacttgtccttctacctcaccacctttggtcagctgaggctgtccattgatgcccaggaccgggttctgctgcttcacattatagaaggtaaaggcctgatcagcaaacagcctggcacctgtgatccgtatgtgaagatttctttgatccctgaagatagtagactacgccaccagaagacgcagaccgttccagactgcagagacccggctttccacgagcacttcttctttcctgtccaagaggaggatgatcagaagcgtctcttggttactgtgtggaacagggccagccagtccagacagagtggactcattggctgcatgagctttggggtgaagtctctcctgactccagacaaggagatcagtggttggtactacctcctaggggagcacctgggccggaccaagcacttgaaggtggccaggcggcgactgcggccgctgagagacccgctgctgagaatgccaggaggtggggacactgagaatgggaagaaactaaagatcaccatcccgaggggaaaggacggctttggcttcaccatctgctgcgactctccagttcgagtccaggccgtggattccgggggtccggcggaacgggcagggctgcagcagctggacacggtgctgcagctgaatgagaggcctgtggagcactggaaatgtgtggagctggcccacgagatccggagctgccccagtgagatcatcctactcgtgtggcgcatggtcccccaggtcaagccaggaccagatggcggggtcctgcggcgggcctcctgcaagtcgacacatgacctccagtcaccccccaacaaacgggagaagaactgcacccatggggtccaggcacggcctgagcagcgccacagctgccacctggtatgtgacagctctgatgggctgctgctcggcggctgggagcgctacaccgaggtggccaagcgcgggggccagcacaccctgcctgcactgtcccgtgccactgcccccaccgaccccaactacatcatcctggccccgctgaatcctgggagccagctgctccggcctgtgtaccaggaggataccatccccgaagaatcagggagtcccagtaaagggaagtcctacacaggcctggggaagaagtcccggctgatgaagacagtgcagaccatgaagggccacgggaactaccaaaactgcccggttgtgaggccgcatgccacgcactcaagctatggcacctacgtcaccctggcccccaaagtcctggtgttccctgtctttgttcagcctctagatctctgtaatcctgcccggaccctcctgctgtcagaggagctgctgctgtatgaagggaggaacaaggctgccgaggtgacactgtttgcctattcggacctgctgctcttcaccaaggaggacgagcctggccgctgcgacgtcctgaggaaccccctctacctccagagtgtgaagctgcaggaaggttcttcagaagacctgaaattctgcgtgctctatctagcagagaaggcagagtgcttattcactttggaagcgcactcgcaggagcagaagaagagagtgtgctggtgcctgtcggagaacatcgccaagcagcaacagctggcagcatcacccccggacagcaagatgtttgagacggaggcagatgagaagagggagatggccttggaggaagggaaggggcctggtgccgaggattccccacccagcaaggagccctctcctggccaggagcttcctccaggacaagaccttccacccaacaaggactccccttctgggcaggaacccgctcccagccaagaaccactgtccagcaaagactcagctacctctgaaggatcccctccaggcccagatgctccgcccagcaaggatgtgccaccatgccaggaaccccctccagcccaagacctctcaccctgccaggacctacctgctggtcaagaacccctgcctcaccaggaccctctactcaccaaagacctccctgccatccaggaatcccccacccgggaccttccaccctgtcaagatctgcctcctagccaggtctccctgccagccaaggcccttactgaggacaccatgagctccggggacctactagcagctactggggacccacctgcggcccccaggccagccttcgtgatccctgaggtccggctggatagcacctacagccagaaggcaggggcagagcagggctgctcgggagatgaggaggatgcagaagaggccgaggaggtggaggagggggaggaaggggaggaggacgaggatgaggacaccagcgatgacaactacggagagcgcagtgaggccaagcgcagcagcatgatcgagacgggccagggggctgagggtggcctctcactgcgtgtgcagaactcgctgcggcgccggacgcacagcgagggcagcctgctgcaggagccccgagggccctgctttgcctccgacaccaccttgcactgctcagacggtgagggcgccgcctccacctggggcatgccttcgcccagcaccctcaagaaagagctgggccgcaatggtggctccatgcaccacctttccctcttcttcacaggacacaggaagatgagcggggctgacaccgttggggatgatgacgaagcctcccggaagagaaagagcaaaaacctagccaaggacatgaagaacaagctggggatcttcagacggcggaatgagtcccctggagcccctcccgcgggcaaggcagacaaaatgatgaagtcattcaagcccacctcagaggaagccctcaagtggggcgagtccttggagaagctgctggttcacaaatacgggttagcagtgttccaagccttccttcgcactgagttcagtgaggagaatctggagttctggttggcttgtgaggacttcaagaaggtcaagtcacagtccaagatggcatccaaggccaagaagatctttgctgaatacatcgcgatccaggcatgcaaggaggtcaacctggactcctacacgcgggagcacaccaaggacaacctgcagagcgtcacgcggggctgcttcgacctggcacagaagcgcatcttcgggctcatggaaaaggactcgtaccctcgctttctccgttctgacctctacctggaccttattaaccagaagaagatgagtcccccgctttaggggccactggagtcgagctcagcgttcacaccaggcgggctgggtcccctgcccacctgcctccctgccccctgtgacggagggggcaagcaagcccccagaggccgtgtctctggacagacggatagacatacggaagcgaggcctggaccaagagaggcccaggctactggaggagtagaaggatgggccccgtggggtccccactgccccggtacgagggggcccaagaccctggcaggtcaggggccctggccaagccagatctggagctgctgctccctgctgcggagaccgcggaggcttcgcgttgaccaagttccttaaagaactggctgatggggcaggaggtccaggcctgggctctcgggccctcctagagggccattggagcttgcagctcagacccccactttgagttttatttatttaaatagtagttggatgcttggcacgtcgtcctgtaataggaaacccttgcctcatcagttttcctgatttacaagtgcaatattttagccaatgccttgggagaagctgccatgcaaaggtggacaccattctccagcttcaggggatatgctcgtcccgggcaccggtggcaggcagctggccttctggactaaggcagcctggggggacactgcagtctggctacacacagagatctggcaccccctgggtggagtgtccctcgggggctttgggaaagcatggcaccctcagaccacacagtagccaagttctggagcaaataaaaggcctgtgttatttcttgttcttgaccctttttg

SEQ ID NO: 192 - protein, 1084 aa, Homo sapiens
MERSLHRVSLGSRRAHPDLSFYLTTFGQLRLSIDAQDRVLLLHIIEGKGLISKQPGTCDPYVKISLIPEDSRLRHQKTQTVPDCRDPAFHEHFFFPVQEEDDQKRLLVTVWNRASQSRQSGLIGCMSFGVKSLLTPDKEISGWYYLLGEHLGRTKHLKVARRRLRPLRDPLLRMPGGGDTENGKKLKITIPRGKDGFGFTICCDSPVRVQAVDSGGPAERAGLQQLDTVLQLNERPVEHWKCVELAHEIRSCPSEIILLVWRMVPQVKPGPDGGVLRRASCKSTHDLQSPPNKREKNCTHGVQARPEQRHSCHLVCDSSDGLLLGGWERYTEVAKRGGQHTLPALSRATAPTDPNYIILAPLNPGSQLLRPVYQEDTIPEESGSPSKGKSYTGLGKKSRLMKTVQTMKGHGNYQNCPVVRPHATHSSYGTYVTLAPKVLVFPVFVQPLDLCNPARTLLLSEELLLYEGRNKAAEVTLFAYSDLLLFTKEDEPGRCDVLRNPLYLQSVKLQEGSSEDLKFCVLYLAEKAECLFTLEAHSQEQKKRVCWCLSENIAKQQQLADPDSKMFETEADEKREMALEEGKGPGAEDSPPSKEPSPGQELPPGQDLPPNKDSPSGQEPAPSQEPLSSKDSATSEGSPPGPDAPPSKDVPPCQEPPPAQDLSPCQDLPAGQEPLPHQDPLLTKDLPAIQESPTRDLPPCQDLPPSQVSLPAKALTEDTMSSGDLLAATGDPPAAPRPAFVIPEVRLDSTYSQKAGAEQGCSGDEEDAEEAEEVEEGEEGEEDEDEDTSDDNYGERSEAKRSSMIETGQGAEGGLSLRVQNSLRRRTHSEGSLLQEPRGPCFASDTTLHCSDGEGAASTWGMPSPSTLKKELGRNGGSMHHLSLFFTGHRKMSGADTVGDDDEASRKRKSKNLAKDMKNKLGIFRRRNESPGAPPAGKADKMMKSFKPTSEEALKWGESLEKLLVHKYGLAVFQAFLRTEFSEENLEFWLACEDFKKVKSQSKMASKAKKIFAEYIAIQACKEVNLDSYTREHTKDNLQSVTRGCFDLAQKRIFGLMEKDSYPRFLRSDLYLDLINQKKMSPPL

SEQ ID NO: 193 - DNA, 2871 bp, Homo sapiens
ttctcggctgatctctctgggtaggtgccctctgggggcagtacccctgcctgagtggcacttcccctcctggctttgtttggtttggcctcgatttagaacagggttggcagaggcaggctgacttgcatttctggttttgggtttgttgctgcactttccccaaggggtgggcgggctctgactgacagtcaccactgggacaggcctgggccccaccctcaccacccaggaaaggggaaatgcggcccgctccccactcagtgccactctgtgccactccgtgccaggccctgagggcacccggttgctgcttccttccgtctttccccaaggactatcagagatgccagcgtgacccctgacacgtgtgtgcagcagcctgcagctgccccaagccatggctgaacactgactcccagctgtggggcttcaccattacagactccccagggcttcaaagacttctcagcttcgagcatggcttttggctgtcagggcagctgtacaatagtggatgtttgagacggaggcagatgagaagagggagatggccttggaggaagggaaggggcctggtgccgaggattccccacccagcaaggagccctctcctggccaggagcttcctccaggacaagaccttccacccaacaaggactccccttctgggcaggaacccgctcccagccaagaaccactgtccagcaaagactcagctacctctgaaggatcccctccaggcccagatgctccgcccagcaaggatgtgccaccatgccaggaaccccctccagcccaagacctctcaccctgccaggacctacctgctggtcaagaacccctgcctcaccaggaccctctactcaccaaagacctccctgccatccaggaatcccccacccgggaccttccaccctgtcaagatctgcctcctagccaggtctccctgccagccaaggcccttactgaggacaccatgagctccggggacctactagcagctactggggacccacctgcggcccccaggccagccttcgtgatccctgaggtccggctggatagcacctacagccagaaggcaggggcagagcagggctgctcgggagatgaggaggatgcagaagaggccgaggaggtggaggagggggaggaaggggaggaggacgaggatgaggacaccagcgatgacaactacggagagcgcagtgaggccaagcgcagcagcatgatcgagacgggccagggggctgagggtggcctctcactgcgtgtgcagaactcgctgcggcgccggacgcacagcgagggcagcctgctgcaggagccccgagggccctgctttgcctccgacaccaccttgcactgctcagacggtgagggcgccgcctccacctggggcatgccttcgcccagcaccctcaagaaagagctgggccgcaatggtggctccatgcaccacctttccctcttcttcacaggacacaggaagatgagcggggctgacaccgttggggatgatgacgaagcctcccggaagagaaagagcaaaaacctagccaaggacatgaagaacaagctggggatcttcagacggcggaatgagtcccctggagcccctcccgcgggcaaggcagacaaaatgatgaagtcattcaagcccacctcagaggaagccctcaagtggggcgagtccttggagaagctgctggttcacaaatacgggttagcagtgttccaagccttccttcgcactgagttcagtgaggagaatctggagttctggttggcttgtgaggacttcaagaaggtcaagtcacagtccaagatggcatccaaggccaagaagatctttgctgaatacatcgcgatccaggcatgcaaggaggtcaacctggactcctacacgcgggagcacaccaaggacaacctgcagagcgtcacgcggggctgcttcgacctggcacagaagcgcatcttcgggctcatggaaaaggactcgtaccctcgctttctccgttctgacctctacctggaccttattaaccagaagaagatgagtcccccgctttaggggccactggagtcgagctcagcgttcacaccaggcgggctgggtcccctgcccacctgcctccctgccccctgtgacggagggggcaagcaagcccccagaggccgtgtctctggacagacggatagacatacggaagcgaggcctggaccaagagaggcccaggctactggaggagtagaaggatgggccccgtggggtccccactgccccggtacgagggggcccaagaccctggcaggtcaggggccctggccaagccagatctggagctgctgctccctgctgcggagaccgcggaggcttcgcgttgaccaagttccttaaagaactggctgatggggcaggaggtccaggcctgggctctcgggccctcctagagggccattggagcttgcagctcagacccccactttgagttttatttatttaaatagtagttggatgcttggcacgtcgtcctgtaataggaaacccttgcctcatcagttttcctgatttacaagtgcaatattttagccaatgccttgggagaagctgccatgcaaaggtggacaccattctccagcttcaggggatatgctcgtcccgggcaccggtggcaggcagctggccttctggactaaggcagcctggggggacactgcagtctggctacacacagagatctggcaccccctgggtggagtgtccctcgggggctttgggaaagcatggcaccctcagaccacacagtagccaagttctggagcaaataaaaggcctgtgttatttcttgttcttgaccctttttg

SEQ ID NO: 194 - protein, 519 aa, Homo sapiens; identical to SEQ ID NO: 182

SEQ ID NO: 195 - DNA, 1602 bp, Homo sapiens
gccgttgtgagggatggacgcctctcccccggagcagcactttggggccagcttgggccctggggatgagccacaggggacccacagcctatgcgtgtgagcatgtaacccgggagccagctgggcccctcgcggggtgggcagaaggacgggctggcccaggaccctcttctttgagacatcccggactccatctcggatgaaagtgctttgagaaaccacagagttttctgtttaatggaagaaagaaatccagcctctctccagagtggcggtggccggctagacaggagccaaggacatgaagaacaagctggggatcttcagacggcggaatgagtcccctggagcccctcccgcgggcaaggcagacaaaatgatgaagtcattcaagcccacctcagaggaagccctcaagtggggcgagtccttggagaagctgctggttcacaaatacgggttagcagtgttccaagccttccttcgcactgagttcagtgaggagaatctggagttctggttggcttgtgaggacttcaagaaggtcaagtcacagtccaagatggcatccaaggccaagaagatctttgctgaatacatcgcgatccaggcatgcaaggaggtcaacctggactcctacacgcgggagcacaccaaggacaacctgcagagcgtcacgcggggctgcttcgacctggcacagaagcgcatcttcgggctcatggaaaaggactcgtaccctcgctttctccgttctgacctctacctggaccttattaaccagaagaagatgagtcccccgctttaggggccactggagtcgagctcagcgttcacaccaggcgggctgggtcccctgcccacctgcctccctgccccctgtgacggagggggcaagcaagcccccagaggccgtgtctctggacagacggatagacatacggaagcgaggcctggaccaagagaggcccaggctactggaggagtagaaggatgggccccgtggggtccccactgccccggtacgagggggcccaagaccctggcaggtcaggggccctggccaagccagatctggagctgctgctccctgctgcggagaccgcggaggcttcgcgttgaccaagttccttaaagaactggctgatggggcaggaggtccaggcctgggctctcgggccctcctagagggccattggagcttgcagctcagacccccactttgagttttatttatttaaatagtagttggatgcttggcacgtcgtcctgtaataggaaacccttgcctcatcagttttcctgatttacaagtgcaatattttagccaatgccttgggagaagctgccatgcaaaggtggacaccattctccagcttcaggggatatgctcgtcccgggcaccggtggcaggcagctggccttctggactaaggcagcctggggggacactgcagtctggctacacacagagatctggcaccccctgggtggagtgtccctcgggggctttgggaaagcatggcaccctcagaccacacagtagccaagttctggagcaaataaaaggcctgtgttatttcttgttcttgaccctttttg

SEQ ID NO: 196 - protein, 168 aa, Homo sapiens
MKNKLGIFRRRNESPGAPPAGKADKMMKSFKPTSEEALKWGESLEKLLVHKYGLAVFQAFLRTEFSEENLEFWLACEDFKKVKSQSKMASKAKKIFAEYIAIQACKEVNLDSYTREHTKDNLQSVTRGCFDLAQKRIFGLMEKDSYPRFLRSDLYLDLINQKKMSPPL

SEQ ID NO: 197 - DNA, 1123 bp, Homo sapiens
tgctgccatggtaacgaggaggccagtcacaaatagctgggactggcttcctgccggggcggccccagaggctgtcccttgcagacacatgcccctttcacggctccctctcagggttggccagaaggaatttttttttccgctccccctcctggtccctcccatttcctggctcctcctgtctgagtcccagccccggcttgtgcctgggagtccagtcatcaggccaggattccagagagcgtgtgtggctgcagcctgcaccgttgctgcccgctgcccaggacgcggggtgggggacaggagccagagtggtgcctcctacagaccaatctgcggccccaaggtggggggccctacagagatgctccgaggcatgtacctcactcgcaacgggaacctgcagaggcgacacacgatgaaggaagccaaggacatgaagaacaagctggggatcttcagacggcggaatgagtcccctggagcccctcccgcgggcaaggcagacaaaatgatgaagtcattcaagcccacctcagaggaagccctcaagtggggcgagtccttggagaagctgctggttcacaaatacgggttagcagtgttccaagccttccttcgcactgagttcagtgaggagaatctggagttctggttggcttgtgaggacttcaagaaggtcaagtcacagtccaagatggcatccaaggccaagaagatctttgctgaatacatcgcgatccaggcatgcaaggaggtcaacctggactcctacacgcgggagcacaccaaggacaacctgcagagcgtcacgcggggctgcttcgacctggcacagaagcgcatcttcgggctcatggaaaaggactcgtaccctcgctttctccgttctgacctctacctggaccttattaaccagaagaagatgagtcccccgctttaggggccactggagtcgagctcagcgttcacaccaggcgggctgggaggccgtgtctctggacagacggatagacatacggaagcgaggcctggaccaagagaggcccaggctactggaggagtagaaggatgggccccgtggggtccccactgccccggtacgagggggcccaagaccctg

SEQ ID NO: 198 - protein, 311 aa, Homo sapiens
MVTRRPVTNSWDWLPAGAAPEAVPCRHMPLSRLPLRVGQKEFFFPLPLLVPPISWLLLSESQPRLVPGSPVIRPGFQRACVAAACTVAARCPGRGVGDRSQSGASYRPICGPKVGGPTEMLRGMYLTRNGNLQRRHTMKEAKDMKNKLGIFRRRNESPGAPPAGKADKMMKSFKPTSEEALKWGESLEKLLVHKYGLAVFQAFLRTEFSEENLEFWLACEDFKKVKSQSKMASKAKKIFAEYIAIQACKEVNLDSYTREHTKDNLQSVTRGCFDLAQKRIFGLMEKDSYPRFLRSDLYLDLINQKKMSPPL

SEQ ID NO: 199 - DNA, 1737 bp, Homo sapiens
tgctgccatggtaacgaggaggccagtcacaaatagctgggactggcttcctgccggggcggccccagaggctgtcccttgcagacacatgcccctttcacggctccctctcagggttggccagaaggaatttttttttccgctccccctcctggtccctcccatttcctggctcctcctgtctgagtcccagccccggcttgtgcctgggagtccagtcatcaggccaggattccagagagcgtgtgtggctgcagcctgcaccgttgctgcccgctgcccaggacgcggggtgggggacaggagccagagtggtgcctcctacagaccaatctgcggccccaaggtggggggccctacagagatgctccgaggcatgtacctcactcgcaacgggaacctgcagaggcgacacacgatgaaggaagccaaggacatgaagaacaagctggggatcttcagacggcggaatgagtcccctggagcccctcccgcgggcaaggcagacaaaatgatgaagtcattcaagcccacctcagaggaagccctcaagtggggcgagtccttggagaagctgctggttcacaaatacgggttagcagtgttccaagccttccttcgcactgagttcagtgaggagaatctggagttctggttggcttgtgaggacttcaagaaggtcaagtcacagtccaagatggcatccaaggccaagaagatctttgctgaatacatcgcgatccaggcatgcaaggaggtcaacctggactcctacacgcgggagcacaccaaggacaacctgcagagcgtcacgcggggctgcttcgacctggcacagaagcgcatcttcgggctcatggaaaaggactcgtaccctcgctttctccgttctgacctctacctggaccttattaaccagaagaagatgagtcccccgctttaggggccactggagtcgagctcagcgttcacaccaggcgggctgggtcccctgcccacctgcctccctgccccctgtgacggagggggcaagcaagcccccagaggccgtgtctctggacagacggatagacatacggaagcgaggcctggaccaagagaggcccaggctactggaggagtagaaggatgggccccgtggggtccccactgccccggtacgagggggcccaagaccctggcaggtcaggggccctggccaagccagatctggagctgctgctccctgctgcggagaccgcggaggcttcgcgttgaccaagttccttaaagaactggctgatggggcaggaggtccaggcctgggctctcgggccctcctagagggccattggagcttgcagctcagacccccactttgagttttatttatttaaatagtagttggatgcttggcacgtcgtcctgtaataggaaacccttgcctcatcagttttcctgatttacaagtgcaatattttagccaatgccttgggagaagctgccatgcaaaggtggacaccattctccagcttcaggggatatgctcgtcccgggcaccggtggcaggcagctggccttctggactaaggcagcctggggggacactgcagtctggctacacacagagatctggcaccccctgggtggagtgtccctcgggggctttgggaaagcatggcaccctcagaccacacagtagccaagttctggagcaaataaaaggcctgtgttatttcttgttcttgaccctttttg

SEQ ID NO: 200 - protein, 311 aa, Homo sapiens; identical to SEQ ID NO: 198

SEQ ID NO: 201 - DNA, 3084 bp, Homo sapiens
ttggggaggtgagaggtgatttcctgccattcttctgtggggcgggcttcccagggtgctcatgccaggctgacgggtccagtgcgggctcccgctgctgggggagagctgggttttcatggggcggcagccgaggcaggacccgcagccatgaaccgcttcaatgggctctgcaaggtgtgctcggagcgccgctaccgccagatcaccatcccgaggggaaaggacggctttggcttcaccatctgctgcgactctccagttcgagtccaggccgtggattccgggggtccggcggaacgggcagggctgcagcagctggacacggtgctgcagctgaatgagaggcctgtggagcactggaaatgtgtggagctggcccacgagatccggagctgccccagtgagatcatcctactcgtgtggcgcatggtcccccaggtcaagccaggaccagatggcggggtcctgcggcgggcctcctgcaagtcgacacatgacctccagtcaccccccaacaaacgggagaagaactgcacccatggggtccaggcacggcctgagcagcgccacagctgccacctggtatgtgacagctctgatgggctgctgctcggcggctgggagcgctacaccgaggtggccaagcgcgggggccagcacaccctgcctgcactgtcccgtgccactgcccccaccgaccccaactacatcatcctggccccgctgaatcctgggagccagctgctccggcctgtgtaccaggaggataccatccccgaagaatcagggagtcccagtaaagggaagtcctacacaggcctggggaagaagtcccggctgatgaagacagtgcagaccatgaagggccacgggaactaccaaaactgcccggttgtgaggccgcatgccacgcactcaagctatggcacctacgtcaccctggcccccaaagtcctggtgttccctgtctttgttcagcctctagatctctgtaatcctgcccggaccctcctgctgtcagaggagctgctgctgtatgaagggaggaacaaggctgccgaggtgacactgtttgcctattcggacctgctgctcttcaccaaggaggacgagcctggccgctgcgacgtcctgaggaaccccctctacctccagagtgtgaagctgcaggaaggttcttcagaagacctgaaattctgcgtgctctatctagcagagaaggcagagtgcttattcactttggaagcgcactcgcaggagcagaagaagagagtgtgctggtgcctgtcggagaacatcgccaagcagcaacagctggcagcatcacccccggacagcaagatgtttgagacggaggcagatgagaagagggagatggccttggaggaagggaaggggcctggtgccgaggattccccacccagcaaggagccctctcctggccaggagcttcctccaggacaagaccttccacccaacaaggactccccttctgggcaggaacccgctcccagccaagaaccactgtccagcaaagactcagctacctctgaaggatcccctccaggcccagatgctccgcccagcaaggatgtgccaccatgccaggaaccccctccagcccaagacctctcaccctgccaggacctacctgctggtcaagaacccctgcctcaccaggaccctctactcaccaaagacctccctgccatccaggaatcccccacccgggaccttccaccctgtcaagatctgcctcctagccaggtctccctgccagccaaggcccttactgaggacaccatgagctccggggacctactagcagctactggggacccacctgcggcccccaggccagccttcgtgatccctgaggtccggctggatagcacctacagccagaaggcaggggcagagcagggctgctcgggagatgaggaggatgcagaagaggccgaggaggtggaggagggggaggaaggggaggaggacgaggatgaggacaccagcgatgacaactacggagagcgcagtgaggccaagcgcagcagcatgatcgagacgggccagggggctgagggtggcctctcactgcgtgtgcagaactcgctgcggcgccggacgcacagcgagggcagcctgctgcaggagccccgagggccctgctttgcctccgacaccaccttgcactgctcagacggtgagggcgccgcctccacctggggcatgccttcgcccagcaccctcaagaaagagctgggccgcaatggtggctccatgcaccacctttccctcttcttcacaggacacaggaagatgagcggggctgacaccgttggggatgatgacgaagcctcccggaagagaaagagcaaaaacctagccaaggacatgaagaacaagctggggatcttcagacggcggaatgagtcccctggagcccctcccgcgggcaaggcagacaaaatgatgaagtcattcaagcccacctcagaggaagccctcaagtggggcgagtccttggagaagctgctggttcacaaatacgggttagcagtgttccaagccttccttcgcactgagttcagtgaggagaatctggagttctggttggcttgtgaggacttcaagaaggtcaagtcacagtccaagatggcatccaaggccaagaagatctttgctgaatacatcgcgatccaggcatgcaaggaggtcaacctggactcctacacgcgggagcacaccaaggacaacctgcagagcgtcacgcggggctgcttcgacctggcacagaagcgcatcttcgggctcatggaaaaggactcgtaccctcgctttctccgttctgacctctacctggaccttattaaccagaagaagatgagtcccccgctttaggggccactggagtcgagctcagcgttcacaccaggcgggctgggaggccgtgtctctggacagacggatagacatacggaagcgaggcctggaccaagagaggcccaggctactggaggagtagaaggatgggccccgtggggtccccactgccccggtacgagggggcccaagaccctg

SEQ ID NO: 202 - protein, 913 aa, Homo sapiens; identical to SEQ ID NO: 188

SEQ ID NO: 203 - DNA, 354335 bp, Mus musculus
  misc_feature (1)...(354335): n = A, C, G or T/U
aaaggaagtggtggcagcttagacaccaaggaacgtgtgcaaaagctttattcctgaattgtccctgttgatcaaactccttgaaaactactgtcagagatgcctctccattgctttctgttctctgagccattgtgttagctttggctgtgaccaaaataccagcgagggcaacttttaaacatgctttattttgattcatggttcctcagctatcaccctgtaggccttggttctgccatcacctggggtggcagatggttggggtaagggatgagagggatgggaacagggggaaccaggaagaggctgcacatttcatggtgcgagggcacaaagaaagagaagcctaggataagacatatccacaagggcagccttccagtgatttccctaaatctaggccgcatcctcttccagaaccttccaaactagcaccactagctaggagaatgtagcagatcatcccatacccaaacctaacctcatcatctactaagtctccttctcctggtttgcagctgagctacagcttaggtccttacctcctccaacctcagcttccctgccttctttacaagggtgagcttcgtaattaacatgttttattcttatttctttaactaaatagctatgactatgacttcccagtctttcaaatgaaagctttcaatgctcataggcctttccttgatcttgccttaacctgacattcctacctgtcctctagttacgataaagcgataaagcgagtcaatacaaactaatctgccaccgtcagtcagacacttctatatgttacctggagaggaatgacctgttcttcccctgtctgacaaatgcatattcttggttcattgcaaaatgccatttggccttttccagccttcatgactctattgtcataaccacacagacttcgtcagtgctgtcacatgttagtatctatatatgtgtacacatacatccatgtgcatatgcatatgagtgttcagctttatatcttcttccacctttggactaaagcttcttaaactaaggcagcgatcacatcatattcttctctagccctagctcttagcatgttaaagtgtttagagcagggctcaatatgatggagacaatttatgcatattgcatgaatgtttctcatcttctaagtgaggaagttaatgcttgcagagactaaataatttgtgtaaagtcacatggtatgaccaacattaaaacccaagttggactctgaaatgcatggtgtgttgttgactatatagacatataaaagatcagttttgtaatggcagcaacctctgtcattagatcaggataataaattagagacagtgcataacaaacagttactgaatacttacaaggcctgatttgcttagcagtttgggttaatcagaccacggcagtgtggtggcaacctcttggacttatctgaaattctttttttaaaaaacattttttattgatcctttgtgagtttcacatcatgtacactcatctccctgtcacctcatatctgcccttcacccttgcaacctcctcaaataaaatatacacacataaataaacaaacaacaacaataaaaacaaagcatagaaaatatcatggaaactgtagtatgtcacagtgtgtcctctgtccctctgtccacctatcttcacttgtaagtgttcattgcaacaggtcagtggtctggtttgagatttctggctttcatgagaccattaatattggatcctcatcaggcctccttctggttatattgttgttgtcctgtgtcatggagatactgtagctttgggatagcatgagtggctcttatatatgtcccattcattcacagcttatatagatgttggggtggaccagttcagagccatggatctgagcctgggtggtagctgagctggtcattctgccatttcaccaaggctagttatccagcacttctctggctagaccacccaatgcagccactagcaggaggcagggtcacctttcctgctgtcatgcccccagcaggctggttcatctgaacctacatctctacagccagcttcagtgctgctctacagttaaggtgtgctcactctcccaactgatgtagcctgagaggggcttggccagctcttctgctcttgtaccctcagggctagctcaccagtgcctttgccatcagggacagctccactgtgttggccaagcaaaggcctacacagggcctactctcctgattgcttcagccactgagggttgggggcagggctagctctcttggctactactgctggtggtaaggcaagggagaggaagggcatacacacacacacacacacacacatacacacacacacgagagagagagagagagagagagagagagagagagagagagagagagagcgagctctacagccctgtggggcgggggttgggggaggagtagctggttcagctacacaccttccactagggctagctctactatgctgcccagatgaggtgcagggcccactctcctgagtggtggtggggtcagctcacccagtctcataaccctaggggtcagcttttctgattgcttccccaaggccacttcttatctgaagttcttaaaatttatttatttatttatttaattgcaacagtagtttttgtttgtttgtctatatgtatgtctgtgtgagggtgtggaattccctgaaactggagttacaggcagttgtgagctgccaggtgggtgctgggaattgaacctgggtcatctgaagaacagccagtgctcttaactgctgagccaactctccagcccccttatctgaagttcttagcccttgacaaaatggagtttcattcttacaacaggtcagtgtcctattttataagtgttattactggctggtggcaacagagcctggtaccagttgaactaggcccagaacattaaacttaaaccttttatttaagtattaaacaatttttgactcatcaccaacatcaaagccatcatcacctaatccattttatttagtttacttctagttgagagcaccatgccaggtggaaatgggtactgggtcgacaaggcctggattaaacaccacaggctgtgtagagtaaaagcttatcctagtctatgaaaagtaaactagaacataaacttgtctaataccaaggacagcctcagaaagattcctcccagcagtgctgtgtcagctgactagctgctaagtgaacacgtgaagccaaaatcataattcaaattaagatgtgagactcctctagcctttaactgtggaggctcttactaattggttagatcttttcatcaaggagagttatagaaaccaagatatttcttagactttttggctggataggatagttttgttttgttttgtttgtttgtttgtttgtttttaatcaggtaagctaagtatacaatttccagtaattcatttataatacaaaatatcctaatttacttaagggacacaaagcaaacacattaaacaacaacacaaaaagtgttaagtctagttgtgtgctttccatttaaagagatactccctttaagaccattggtccaaactctgcaccaaagaatattctgataattaaaacaaactcttaaaacaagtttgaaggtgaaatgtccaaatgacatggtcgtaaagagtctgggttagtgaaataagagggtcagtcaatgggaggaaggaggacttcacagaccagttactaacatgcccctcccaccaaccctgtcaacaaactttcagttcatttcttgggggtaagaggggaggggggttgctttagactttgtaccatccaggttttgccggaatattgataaattaggagcagggcgatcgacttcgaatgttaaaatatcaattctttaaaaggagctgtattctctctgtagcccacctagccatttagtcctctacagagaaccgggccaccctcttctcttctaaacccaggacggacaaaggcttatctcattgaagtctctgtgacgtttttgctccgtcttgatttaatgcaccaaagaggacctttaactctcggtctacatcagtgcaaataaaggttaaatctctcaccaaccatcatgaactagtctaataactcacaagaggctcggaaaaagaaaccgacgaagcaggtgtgcgaacgtgattcaaacatgcaaaaccggcgtgaactgcgggcaaaggaactataatcttcccatctcttacgagcctgctgcaacctctgcaagcagggaaacttcccctgcgccaaaacccggatcccgggagcggggcctatcaactcagaggcggttctgcagccgggagtcccgacccgagcttgcgctgaaggccggggctcccattggccacaagccgtgggggaggaggagacagcgcggagagggaggaggggacgcctgagactgtccctgccccctccggccccttcgcctcgggcgtggttactatgcaaattgcagcgattgcggaaataaacaagggggtagggagaggaaagaggggctgctgaaaggatcgcaacttctgcaaagtctctttcaagcacaccaggcaaatccagagagaatctgagaagcagccagctcgggttagattggatcgctttcaaagaggagagagagaaagagagagagaccgcgagagagggaaagggagggagagagaaagacaggggagagagagagagagagagagagagagagagagagagagagagagagagagagagagagagagagagagagagagagagagagagagagagagagagctctgccatccttggtagaagccttttgatttggagtttaaaaaaaaaatatccaagaagcctgcaattggccagcagcttaaaaaaatctcttccgggttttcaacggttccaagtttatttagctattttttttaatgcaaaaaaacagggacaagcgatgaagcaattcgtctgagcattttaaagtttctcacgtactctttttacattgcaatggtacgtggtacatcttaaactttctattttacatttatacgatatgtgttatataaacaacggtagaatgtttatgcttaatggttaagactttaaaatttttctagctcgaatatgcactttagtgattgctgggtaaatgtctattgcgatggttttcttttaaagatgcagctttgtggatcgtgtttttgttatgtgcagcagagagatcgggtttctctttctttctttctttcttttttttttccaggatttgaaaaaattgctgagcttaacagattttttttcctcctagcgcttgctccgttccagaaaagggggggagggggagggggatcctgtacgtgctctgctctgttaaagacgtctggcctctgcagtcaacctaacccgaaaagaaatgtctggacccgagaataattgacgattcgatcctctaatcaatgggacaacctgcgagattgacagaagttctatccaatcatgagaaagcttgggcatacagtggttcgtaatagccatagggggcggggcaaatgagatctgaagttctctgcagttctgaaggggatggtgtatagttcaagctgtcaaagataccagcgcttccggatttagcaattacaataggaaagaggggtgtttttttggttgttgttgttagtttaaaggagaaaagaggctgttggggggttgcatggctcctatgtgacttttaactttgctcctttggaaaattctgctagagtaatatttaaccttgcattagttattctcagaactcagggaagttgggaactcgtaggagaggtttagcttctttgagaaagatgcctcaagttggtactgcactaagtgcttcagaacttctcgctgattcttttagagtctttgatgtatccatgaaagagaacgcactataggtagatggacaactgttctatagatttgaaaaggagaagggaggggctggatgttcctgaattctactgtttcagattatggtcagtagcatggagcatatcacatttctttgtgttaccacaacaaccctactggcgggtacataagtgggagagaactgactcctgttagctggagtctagcctcttgttcaatcctggccatctgcatggtggaaactaactgccttagtttgtcttggagatataacttgcagcctctggttcaaatctatcaacccccacccccaattctgtaggtaatacatggaaaataatatggattctttactttttaatgtggatttagttctcatccaactatttcctgaggctttgggccttccagacaaaccttgttcggaaacttgatgtgaaaaactcacttgtgtgctcaatgcatcaacatgattcaatttgggattatatgcaagtaagagaaatctgcacacaagtgaccagtaagtaaaaaagtgaagaaaaatgctggaaaatactagttaagagttagtcttggtgataactatagagcaaatggtatttattgtcacttaggaatcctggtcccattttcactactttgggcattaaaatctaaatcacattaatacaatttcccaactaaatagaaaggagaggtatttcagatatatgtagaagtgaaactttattgacgtaatttatacatctaagaggatttcactaaagctggcaaggtaacgtttctgcaaataaaacagtaaatgcaaggctgggctctgtgccagggagaatatggatagcagagagcatggcaggaacctcctttttgcaaagacaatccggtttcaaggcagcctcctaccacttgcaaaataaacgactggagtaatgtttccaataaggatttacccttcctaacaatgggtcatttatatgattgcaataaactagttttcatacatcacctgtgtttcctacactcttctcccttcttttgctcccccttcccttccccctctttctcagatcttcctttctctccctctcttagtatctctgtgaactctagacaaggatttacttttgcaacctagaagacaggagaaagttagaaatgttttttatcccgggtctgtcctctgaggaacatctgtttctttgtgtgtttaaatttatgcctgttggagagaaagttaccagaagccattctgtaactgtaactcttctacggtatttttctcagtctagtttgcaaaggctgtagttggaactgggctttgtagtgttcccccgccttccaccctcctccggagcgggggagggagcgggagctggcacagataggagagaaagcaggagcggatgtggagggctttggtgctgaacttggatccagcccttgcctagagggcgcaaacaatcgtcccatatccaaaagtcttacgaagggcgccaaaagttacttaagataatattgctaaccgcagaatgctggaaatcgcgggcacatccactgctgcaacaaaagaagtttctaaagtggaaatatcagcattcaattactttttcccatttaaaaaaagaagacatggcaacaggcagttatttaaaaaaatccccttgagaatcaaaagtaaaattctttgctgttttgaaaagaggcagatgtgaagtgtatctatacaccaaaaaaaaaaaaaaaaaatccactttggaagagagcttccccagagcgcgcgcgcgcgcgcgcgcacacacacacacacacacacacacacacacacacacacacacgggacaataacttgtcactgtgcctcagttacatgttggttccctcagccagaaacttctgtcgaggaaacttggagagtcttgaagttatagatcccagcaaagggtttcgtggccaggaatgtttctctaactcctcttagcttggagggcatttcttccttcctgaaagccacaaggaaccaaggaaaagcagttgcttagtttgggaaaatggacgttctaactaaaggttgaagctattactttccttcaatccttaatatgtaatcggaataatatggattccaagaatattcaagagcagggggtgggaatcagggggagaagaatggattcttgagcattagccctaaacggactagagaacaaacaaactttagactgccggctgtctcagcagaacattatatttggccttttctagtagcaggcttacccacctagaaaaaaaaatctgaatgaaagtgatcataccccctcactttcttctgtcgggtgggcatgcctgcagactctagtcctgtcatctccaccagggagcggattcccagtctgtgtgccagcgtcggaatctggggagttttaaagaagggtaggtaaatacagaaggctgcaaaacttcaggagggagaggaggaggagaaaatgagagtttggaggagacaggtatactttttccccctctagaagaaaagagagtctagagagaaagtgttgagtttttttttttttaaggaagaaagaaagaaagaaagaaagagagaaagaaagaaagagagaaagaaagaaaagaaagagggaaggaaagagggaaggacagaagaaaaagaaagctggaagagcaggcttgttggcaatgtgccaaaccctaaaaccacccccccccccttctgccaaaacaatactttagcaaacctaaaataattgcaggaagctcttttccatcttgagaactattacctggggaagggaaaagttgggatccacaaagacgcacccttgaagagtgtgtctggggaacagggactcagatgttagtcctgggctcccatttggggatacaaacatatctctttcctaagggggcaaccctttcacagttttccttctcagtatacagaaaaatgtcccagctaaaccactgttgtttctgacgtgacagaacttttttgggcgtttgtgtttaaacccaccagctcctgggttctgggagagaagagcgttcgctcatgactctcctccttgctttctccagacacctcctcccccgcaatctggggaatctttggggtgatcttcctatcccccccacccccagattctgactgctatagagtcgtagctgaaaagttagcaggcttttgtgcatattacctctcccgacgatactattcccatagaaagcttcgcaggagagattacaatgcttttgagctttaccgcatttcagaggaagggaggaaaagttacctagaaggtctgattttttacaagaaatctgcatacatgcaaatgtaacgcgcgcccttctctggggttcctagggagcccaacccgcggcccacgggggtgcggggcgccccgacaaagttgccccaatcctctcccgacgtccgcggagggctgcggcgcgggtgggnnnnnnnnnnnnnnnnnnnnnnnnnnnnnnnnnnnnnnnnnnnnnnnnnnnnnnnnnnnnnnnnnnnnnnnnnnnnnnnnnnnnnnnnnnnnnnnnnnnnnnnnnnnnnnnnnnnnnnnnnnnnnnnnnnnnnnnnnnnnnnnnnnnnnnnnnnnnnnnnnnnnnnnnnnnnnnnnnnnnnnnnnnnnnnnnnnnnnnnnnnnnnnnnnnnnnnnnnnnnnnnnnnnnnnnnnnnnnnnnnnnnnnnnnnnnnnnnnnnnnnnnnnnnnnnnnnnnnnnnnnnnnnnnnnnnnnnnnnnnnnnnnnnnnnnnnnnnnnnnnnnnnnnnnnnnnnnnnnnnnnnnnnnnnnnnnnnnnnnnnnnnnnnnnnnnnnnnnnnnnnnnnnnnnnnnnnnnnnnnnnnnnnnnnnnnnnnnnnnnnnnnnnnnnnnnnnnnnnnnnnnnnnnnnnnnnnnnnnnnnnnnnnnnnnnnnnnnnnnnnnnnnnnncggtgcagaacgcggcgcaggcgggcgcgcgggcagctcacgggcacccggccggccggcgcgggagcgggaaagggtgcgctatgcctttaacgcccgcgtacagtagacagtatagtggagtgtagggaaactctaggcggggttaaagttcagcgcgtggagcggcaagagcgctggctgctgcagttgagccgagttggaaatgtgaacgcaagaagcaggcttgattttttattcctccccccctcctagctctctcctcctctctctccctctcgcacccacactcacgcacacctccagcccgcacacagacgtgcacgcaccccccgccgcccggcagttatgtattctccgctctgtctcacccaggtaagcagctgcgggggcgcggggcggccgtgtgcctcggcgggagccgtgtctgcgcgtgtttctgtgtgtgcgcgcgcgtgtgcgggggggggggctgcagctttaagaaagtaactttgtttccatgcgggtgcattcctcctgctcggccatttgtgtgggcacatggctaatggcgccctcttattaatgcgttaattaatatcggggcgccggactgcggagctccgccggggcttgcgggcgccccgcacgtgtgtccgcggctgcagcccctgacacgctgcaatctggactctggcggctgcggcgcggagcgcggtgcccgcgattcctccgctccagggaggggcggctgagccccgcaagccccgcacgccggctgcacccggggcgccctggctgccggggtcctcccgcgccgccgcgccccccgccgacgccccgaactcttacttttgttttgtgccagctttgcgggccggcccgggnnnnnnnnnnnnnnnnnnnnnnnnnnnnnnnnnnnnnnnnnnnnnnnnnnnnnnnnnnnnnnnnnnnnnnnnnnnnnnnnnnnnnnnnnnnnnnnnnnnnnnnnnnnnnngcaagccccgggcggctcagccagcaggacccggcaactttccctgcagccccactcgcggcgtggggcctggtgcccctccgcctgcccctcctgcccgagcctcccagcccatccctcccggtcgagtctgcaccagcagcaaggaaacactgctattttgcggctccggatctggtcccgtttgaatatattatttattttctctgactaaaaggcataaagtcagagtgatttgcgctaatttttctctttaagtacgagtctttatatggctttaaaacattgcaccctggccagtaatcacctacatgaagttatatgcttccagcacaaggtttcttcacgactccctcaaaaccctgctaccactgtgccttcaatgagttggagctaacggtttaccgggaatactttggaaggctggacgtatcagtagcttttcctctccgctgtagagtctggatttatttcccatatgacttcctttcttactgcagtatctaacagtaataacactggctatttgatctcagaagactcttaaatgcatcttttatgtggagatggtctgtttgggatttaggcctcacattaataatggattgcagttgttttagttattgtaaaagtaccccccccccccccgcaacttccaaagttactattttagtaacttgtggaagtatggagtgaaaacttctccaactacttctggcagggttcacaattgcatatggataagatgcaaagtgtaagataatttgaatgaattatagtctgcagtgaaagtgctgagattcgaaggctgaaattctagctggcaaaagtttgcaacacatagaacttgtagataagaccagcctgctgcaatgtcgagaaagaccctcatggacacagccttgtcttccgagcgagatttgaaaagataaaagttctggtctggggttgtgtatttcaggagcatacctgcgaatccatgcaggcctcgggcagagtcaggtatttaacaaagttagcttctcttgagttattatcacgttaagaaagttttttttttttcttttcttccccgttccccctcctacacacttggcagctttgattgacgcattcactgggccttcacaccactaagagaaacgcttatttggtgtagcagtttgtgaagaaaatgtacaataagcaggggataaaggctcatttgttttatgagagggtctttaaaagttgatttacaatttatttaactttctggaatatttataatacgttagagccagtttcagaaagaaaaacttgggccgtttattgctcatttaaaaaataaaaagatccagtgagcatggtgataaacgtgctctaaccgaaagagtaggctcagcctgcttgtgtgcactttgaagggctttgccttgagactggcaggcctcttcttttgattgaggatgcgcctatcacaaccaactcatggacctgcctaaatactgacagttcagcagaaatttatgagtaaacctttcaaaggaaaaaaaaagtggtttccagcactaccactattctgtggctcttaaacttggcctgttttcaaacagatccacattttagatgctggttcagagtaatgcggcgttgaagcaggtccacaggtttatttttttactggtggtctgtaacattctcaccagctatttatgtaaaatattacttttttctcttcaataattttaaaatatgacacagtttatggtgttttgttcagcaatatgatatatgaggacatactccccacccccctgaatcatttatgctttccttggacatttcctgtaatttttttcttttttaaaaagtttggattttgggggagatatttctgttaataagttgtctaagtataattgtcatgtgagtaaacttacataaaatgctgtgttcttttatttgcatcctaggaaccttttgggcataatatattgtaaatgcctctgatgcaaaactggggacatagactgcccatgatgaccagctgaccttattctcagattttttttttttttttatgaagagatgttatgggcatttggttggcaggtgaacgcaatgcttctgagcgtgagctggtacagtttgcagtttttaagaagtattttgggagtatctttgggctaatagccacaaatgtttatttaacgtgtttattatcgttaataaggtaaagccttaacacatatctgtgctgtattattgggagctatttgcattataaaatggagctgagtcttcaaaatgaaagcctccttttggagaaggctcactgtgtagtttaaggtcgacttgaggaattctttccatattgccagagtcatggtctctagtatatcctgtatacatctggatgtcagtcaatatgaaatacataaagtttatgtgttttagaacatttcaaggatgagctcagaatttagtaatgtttaaagctttgtggtttggcatgcaccttagcggataaactgcgacttttcttccaaaggaagaaagattctcaaacatcacacagtttagaaatgctaatggtttatggtaaagaataatataattcttgtattttgttctttttttcccaacctgaagaatgcacacatgttaaacaaagctcactactactactttttttttttcatccttattttgaaaaagaccaagtttcaaaaatgaacttgagccatggagcctaaaatgtgtgcagaaagaaggaaaaggccaattattataacaattaaatattcattatattattacacacttactttaaagaaccctgctatgtgtaatgtttacagacttggttaaaatttgtaaaaataattaacaggttaaactatgaaaatatattacctacagcttatatttgaatgtttaaaattttagtaattttttttaggagtagtactgctcctggtattacagtttcttgtatctcaatgatgtatatatgcagattgctataacaaacataaaaaatatattttatatttgtccaccttaactctttttaagaagtcaccaaatgttcctctagtttccttatcttcatttatttgaaagtaaataaattatctcgaggggcatttgtggcagaaagctgttatttaaaattgctgtgttctggtcagtcaagagttgggtgttctctctgagcatctgtgaacgttactgttgtaacttttttttttcatttttatacttgaattttccagccagcatcaatataaaagtcgtgtatttttaaagaaaatcatgtagcaaaatattcaaatgttttaaattcaattttctcttcaaactatctgattttttaaagaactctgtaaaggttttccttgagtctactctttggtgatgggaaaaaaactgaaatattatcttttaaaaaatgaggcgatgtgttttgtagggctggttgcttctgagggcttcccacagtcctatcagcacactaaatgtgctcagttgcgagagtactgtcatggtgaggcaccctgtttactcccgagcatggagatttgctttgtttggtgcccccccccctttttgttctcttcccatatttagtgatgatctcttgagcatgggtcttttattttagccaaatgaatgaatactagatcttcccttcttttctgtagagacctgacatattttttttctaatttttttgtaaattatctgtaactgtaatattcagaaacataattaagatattactaaaatacgtgagctgcagatcagagcctacatggactcttcagaggggaagcctttgttttcattgacggtagggatgggtcttactcctagatgaccataaacgttgactggcacccgagcatttaggatttgccaatctggcggccaggccctggctgtactacaaatggtgaggtcaaggctgggacaaaattagatatggcctccttgaaatagggctaaaagtatatatttttataaaggtttagatgcactgtgcttgctgtggaaaggatctgggaagtaggccgcacaacagaatgcacccaaatgtttaaaaaggcttagtaactttcttctttcagattataggcaatggtgccgatagtagattccccttcccctggttgccctgagggattttaagtatggttttaaaggtaatgtaatacttggaccacatttcatctgaaatgaggtatttctttagggcaagtcccagaggcgacttgtctcattttgtgttggtcgtattcgtatttttgtctctattctcttccataggatgagtttcatcctttcattgaagcacttctgccccatgtccgcgccttcgcctacacatggttcaacctgcaggcccgaaagcggaaatacttcaaaaaacatgagaagcgcatgtcgaaagaagaggagagggccgtgaaggatgaactgctaagcgagaagcccgaggtcaagcagaagtgggcttcccgacttctggccaagttacggaaagatatccgacccgagtaccgagaggattttgttcttacagttacagggaaaaaacctccatgctgtgttctttccaaccctgatcagaaaggcaagatgcggagaattgactgcctccgccaggcagataaagtatggaggttggacctcgtcatggtgatcttgttcaaaggtattccgctggaaagtactgatggcgagcgccttgtaaagagtccacagtgctctaatccagggctctgtgtccagccccatcacataggggtttctgtaaaggaactcgatttatatttggcatactttgtacatgcagcaggtaagtgtgctgggaagaactccttccgctttcttgtgtgtgtctcttctgatggcctctgtgaccgctgaaccattcccgacctccgcatatcacaaacctagggcatctggccagtgaggtgtcagaggtaaaccagagtttaaaacagcttgaataacctgctgcccctgtctgaggtgccaccctcattcaggtataaaagcaaagctctcagaattcccactcaggtcacatatggtaagtaaggctgtcagaggtcttgggaatcaatggatgaaacattgtggtcacattttttttcaagtcatgataagagactcatgatgaccctcgtaatcaagagtaggttttaaactggattgtgatcttattaaaatacatttaggttgttgttagctgcttttctgttgggactgttttcaaccttctgaggcctcttgcaacccctgccaagtaagaagttggaggtaaggttactatcaaaatgctggtcgcttatgaaagaaggctaatcacattaatatacaggcttagcagcttcgtatgttggaactctcagtgttctttcaaatggctgagggaaaccaatcaactcaattctaagcaagtgacagaggggttaatattaaatgtgaccagctggcatagcctgtctgaatgccttgagaaatcgctatcggtaattgatccatcgatctatgttgatttgtacgagattcacttattgattttgagacatgtcttttccggagcatgcttcagaatttggaagagcgtttcaggagtcaactgttgcgagctgggcgaaatggtgcagcttcactttgttcttttcgtcttgttttagacaaaggctcattgtgttacgtgaaggctcaggtcttgtgtaacttgttgactttttatatgtacatatcagtcttgctagattgccttcatggcagttgcttaagccagatgggagaaagaaagttgtggaatccaatcagtgattcattttaggggcgctctttgtctctctgtctctgtctctctctgtgggtctctgcccctgtttttctctctttatcgtgactacacatacacacccagacacacactcccccccctccccataatgaaaagaaaaagctaccacctgcaaagtcagcactattttgcaaaagattctgaaaattgtaaaaaaataaattaactttcaaggaaatcggctaacattccactctctctctctctttttttccaatgtatgatttagaaagagaactttcgttacccatctgtccttacttaagaaactggagaaattgactttgcaagcatgtcacatcatcatttgtgttgtgttggcagggtctagatgtgtatttcagaggatgtgctcggaaaacgtttcaaatatttgggcttttgaaaatgtatgcttgttcataaggcatgcctgttgctttagccagttctaggcagcagaacttctaaacaggaacaagtggcctttccttaaccctccttaaccttgctgctcatttttcttgtctatataaaagcaaaggtaaaggtttttggtcttttttccccattatttgtatgtgctaagtgcctgagggtgcaaaggttacagatgttcccagcgctttcttagcatattctttacattgggtgtttagctttacctgcttaagaaaagactggattaataatagtgaatgttctaattgggcaacttaggaacttgatgccaacaatttatgtagcatgtgtgtgtgtgtgtgtgtgtgcttcctacagaaaagaactaaatggaaatgtctgtgaagtttctgtcagtgtgagtaagacccactctgggcttttaagttaagcatttctctgagaatcgcagggaaactatctttaaagacatttaagagtctcgctcttgccattctccagttcgcctttctctgttggtgggtcattactgtgccgatacttccctaagctaacccagttgcttagctggtacaatgcctgaagggaggatgctgctgtaatgccatttgggaggttgcttaggaaggttcgcattcttacagcttatgaaagatttattgacagctacatggatcagacttccttcggtttggtgctcctcacgtatcccagaatccctcctgaataccagccaaatgcctggccattggtttccagagcaccacagtaatggctgcccatgtgccggcaacaggggccttgcaaaaagaaactagtaaaggcctttcatcagaatatatttcaaatctgacttaagacattctgagatctcttatttgtagaagagaagctgccaatgaggtagattggtcaacctatgtacagctgccttgacgggcatctgttacaatgctgaagatttgtaaacactaaacaatgtttttaacctccttaaaagttttgagaacttgccagtactggcaagaagcagagactctgaagcgcactgcccaatctatgccaaaaccattgtggcctttgtacctgtaatgcatttttattttcatttctttgaaaatgttctttttcccttccagaatgcctcctctcctctacatagccaccaaattgagatttttttttccttttaaaatatgcacattgattataacttcatgccctggctgtttttttttttttaattttttaaaatgttggtgaaaacattaaaatgtgaatactggaagcaaatgcataaccaaatatttgttaaaagcggaggtgattttttttttcttaaggcttagagatgataaaagccaacacgttgactaaatccctaaatctggtggtattagaactgtgtgacttttgtggcagatatacagtaagaagtcgagtgaaagcaagtgatttcatgagcccgagactttcatcttgttcagtctataaaataacaaaaccattttatgtctttaatttggtctctgtttgcattgtctttcccatgtatcgtatgacgacttggtggtattatggcatcatggcaagtggttttctttgtgggcgtgtaacagtaaagctaatttatgaccagcctttaccagatgatctgtatcagaatctacaatatacccggcacgtggcaaggtcacaatttaagttgttaaggtcataaccttagccaccaggcatttgaccttttagataaagttaacctttgttcattagtaggcactcaaccgagaactttctggagagttttttctttctttccttccttccttcctttctctctctctttcttttcgtttttgaagctgttcctatataactctggaaatgtaatcgtattctgttgagttagttaaattttgcttagaggttagagttttaaacggatttctttcgccgacagaggcagatcactttatttatgacataaagaggtaaccactgtttatgtctgatgctacctgatgtggggtagagaagcagctctgagctagtctttacagtcaaacaaatggaattatgtttactttgacagacgcccttactaattggtgggcggcagtgacccaaagctgaagcccacagagccactgtcactttctaaaggtggggacgtttctaagattgcaagtatattttagctctcttgaaaatccacttggaaagattaagtgtccgaaattgtcagcaaattccttcaactgctaattagccaacgacaaagggaccaatggtggtggaggtacgtgtgagttttaaggtggaaagtgaacatttctgcggtagaacctttcagtacagtggctactggttggttgttatgtttccgccttcacaggaagagctctttgaatgtcccagcagcttggtacccatcctgtaacctgcaggacaggattactcatcacctcaacccctgtacagaattgttcctctgcttctgctctcagtaacactcattttaagttggaactatgctagtcggcctgtgatgagccatgtgcttccatgtcagccaaaagaggagctattcccattcaggtgcgtgttggttttagtttggcctcgtgactgccattccttcatctagtactagagaaaaccatgctatgcagatagaccagatggttatgttgacagactgagaattcacttcctactgcttgagagcaggtgtaagatggggagtgcctgtgagtgtgtgctttgtgtgcatgtgtgcacacccaggctgtacccagagtgctccttaagcagtagcaatgatttcagtagtattcaaaagatgctattttaagtgtggaataattacacataaggttatagtgcatagaaaataattttaaacattaaaaacaagtcatattattttgttatattttatgattctatgtcagattaatttttacaatgcactgtcttttaggtgacttagcacatttgctagagggggtctgcatttctaacatattcagcatgttctgctggcaagtatatgtgtatatgtgatgtgaatatgtgtttatatccaagactaaggctgtacatatataattaaacttcttaagaagcttaactccctgcagaaacttgtgcacatagtttctgtgatttgtgatgatagagtatgtttgaaaatgaagggataagactaattaatatatggtgatacttaaaattaagagagacttgtcttgtatcccaaagtccaatcctgaccttaagccaaattcgtggcaattttttttatgaatacattgtaaattattgatacatgtgtacagttttatctcttaattacataaaggtagttttagcaactagcaaacttgagattaaatatgacttttagagctttaagtgggctctgcagtaacctgagaatagtaacaatatccttttccttgaatgtagtaacaaaatccaatgcttaggacatagtaaaaaagatggaagttcaaaggcagcgcttgcacaggaacagggagcaaagttggttgggaggaagcctttgaatggaggtcagcttgtttatggctaagaggtttgactgtgttggttagaaagtttcccaatgctattggcatggtttgcttgtcttccttcccaccctgtgatgaatagcattaatttaaacctatttaaggctagtgtgggagaaaccacagcttttgttgtggtcagtgctgtacacagtaggactgggttagggcctggagctgcttccagaggatacagaacagcctgtcgggtttttacatctctcacagaagcaaccgctcccaagtgtcaatatagcttgtggaaacaacactgaggatgacgagggaagggaaaaaatgcaaatatgctaaactctaattttgtaccattccttcagtaatttctctatcattatttagaggtgagaacttacatttaaaaatattttaaattgtaaacccttgtgggatgggggagaagaaaaggaaggcaggtggaggaggagaagtacgataaacaggcatgcattgttgagggaaatgtgaaaccatagactgaattgcaagtgcatgcactctgaaggagttttggcctatgcagccatggtaaaggatctcaggcaggggatgtcaagtggagaagtctatcatgcataacgctacttttttttcttttgtataattaatttgagacaaaactgctacttgtagcttcagaaggttcagttcaaaacttcagaaagcaatgttttcaaagacttcttctggagtttaagcttccagttagggtctctaggagtcagaacgtggcaaggatnnnnnnnnnnnnnnnnnnnnctctctctctctctctctctctctctctctctctctctctctctctctctgatgtaatggcagcccacacattatagatccagactctgatgtctcggagctcgacaggattttctcacttctacttaaatagaagtgacgtttccccttttgtcccccacaccccatattggagaatgcattcattttttgttatggttactgcagtgttttagttaatggcattagtcctcccaacactgttctagttaaataaacatgggtttggaggcagagtgataagtccggcaaatggtaaaggcagcaactctacagcagaaaacatgcttgctgttctgtttgcaaaagaaactacagaagacacacacacaaaggaaagaagccctctggtctatgtgccttgccactttttggtcttctttgaactgtgtaacacgttgctaacccagcaatgattaggaaggccatggtgactatgcattggagtaaaattacttgaacatctttgagaagtttacattgacttttacatctttttatatctttcaaacacctaacctggtgatagatctttgcaacccacatcaactgggagtacaggtacggagcccaaaggaaagggacagcttggcatgtctgagccacagccgacactgtaccgagttcactatactcagcttgctcttttgaacttcattttatttttccagtgctgcgcatccccacattgctaggctagcggcctacctcagactattcccgacactccacttgctctttcttttcttttccttccctccttctttcaccctttaactctttcctcacactggtatcctaagtaacaaaactcacaagagcagcctgcagagtgacatccaggcaggcctgctgagtcaaaaattattgttttaaaagccatctaaacccaccttagaccatctcatagcttgtgtttttgcaacaggctccatttaagcagtgtcacacagcaggaccgtcaaaagctaaaccttttcgtggggataatttcctcaacagttcaagtcttagccatagaagagacgaagttggttaggagaaaaatggtctcctgtcagagttagggtcaaaattctggagtgacttattaagaaataagtctcttttagaatggtgatgtgaatacatgtatttttaaacaggtttaaaataattttttaaaagatacatttagattaatgagttctagatactttcagatgacattgaatattaaaccaaatattacctaaaaattaaatttaacacatatatgaaaatttgacatgcttatatatgtacaggggaataatattttaaacctctaatgatttaattttaaaattaaaaaaattgttttgctttgaaatttgcctctggttttatgtcaataatataaaagaaagcaaaaatcatgttccataagaggaactttattactttaatttttaaaaattaaaatagaaaaatacaaaaacagatgattgattttaatgcccttattttaatttttgaaatttatacaagtttttttttttttcaggctcagagaacactttttttttttttgagacaggtttctctgtgtagccctggctatcctggaactcattctgtagacccagggattaaaggcatgtaatgccatgcccagccaagattagctcttaatggctgtagtgtaaaacctaaaacccacacaatgcgaattttaccactgtaaatagaataaaaagaccaaccactacaatttaaaacacattggggtttttttgaacgtattaattcttctaaggtgtatttaaatcagctactgacttgaacttttattaaataaaacagaaatatcacttatttacctatgagacagggtctcactgtgtagccccgactgccctaggatttattgatttaggcaaggctgaaggcacagagatctgcctgcctctgactcccaagtggtgggattaaaagtatgtgtcatcatgcctatcttgaaatactctataaattaaaaagataattactaggctgggtatggaaaaatcactcctgttatctctgcattctttaggctgaggcaggaggtttgctagcttgggcaatagaactaggtcctctcttaaaaggtcaagaaagagaggagggggttattttaaaaattctgtgaaactgaagcacttgccatgctaggctgctgttcttgatgctgttgtctgggcgactttattctgttcttgctagcccaggactgggtagcatattacatcatgctattgtagaaagtatctacagtaagtcacacagcttgttctggatgggaatattcacatattcccagggaaatggtatttgctggcaaataacaaggacagtagaattacagtgtcagcatttactgtcttttcaaaatcagagacaaatttcttaatatcataaatttgtagccatctcacctatgttgatgtgtgggtgtcttttcctgctggaggcatttataattatgtatattttaatcttaaagggattacttacctaagtttaagctcctgcacagagtgattattgtacatgcaggattctatagtgtcactctcagatcttctattgacatgcaaagaagctgacataaaagccttagggtgacaaactctcaccaagttttaggaaagtgtttattgcagaagaagccagtttaaaagagggacatagacaggacagatgagctgaagtgacctggtgcccttctctatgccactgtggaacattctaaatgagtgtggggtaggatcccatcaaagcttgctatagaatataaggtatggtgtgtctgcatgttatctctgcagctccctattgcaccattgtgagggttctgttatactagcacatcagcattaaacatcacagatatcctttatgctgatgcttttgtttgtttgtgttttgtttctttttatttatttgttttgtttttggtttggggggtttggttttgttttaattttttaaatttatatttatttatttatttatttatttatttatttatttatttatttatttgagacaaggtttccttgtgctgtcctggaactggctgtatagactaggctagcctggaactggctgtatagactaggctagcctggaactggctgtatagactaggttagcctggaactggctgtgtagactaggctagcctggaactggctgtatagactaggctagcctggaactggctgtatagactaggctagcctggaactggctgtgtagactaggctagtctggaactggctgtgtagactaggctagcctggaactcagatcagcctgtctcagcctcctgaatactaggactgagcacttggtcatcatgtctgtcatatgctaatgggtttcatttctaatagtatgtttttaagatttttgaaatgatggactcaagagtatgtttgcaatattatcttatttaagattaaagtgtgtgccaagaaggactctaggtgagaatctggccgccaagtcgcttgcatgaacaatgcttgtgtctttgtaggactgtgacaaggacttttggtgggtgtgtatcctataagattagtgagttcctgaaattgctgctggattcatttagtcagtggtctcccttctctttttgtaaatggtaaagaggtttctgttttctatcgtagttcccatgctgtgccatgtgtgtctgtaagcaaaaacagtcattgtggggcttttatgacctatcaataagtgacaaggattttttgttagaatttattcttaatgtacctttgaaaataactaccatcacccttctgaatcaaaagtatagcactctgggctggcgagttagctcaaagtctggtgacatgtgtttgattcctgaaacattcatggagaacttaactccacaaagttgtcccctgacctccacacctccacacctgtaccacagcaatgtgctcccccatgtcatgcttgctctctctctctctctctctctctctctttctctctctctctctcacacacacacacaaatagcatattgaaaacaattaccatgtttacatttttaatgaatttttttgatgttttaaaatttttatctctctagagcttcaataaaatgaggtaggggtaaaaattttaaaagtataacatcttgccaagttcagaatacatattatgtgtaaggttatatataatatatatacacacatatgttttttgtgagaaatttttttggctgaaatgttacagtgaaagacataattgttctaaagatgtgtgtctcacagaaaagacgaaaaccacccaaagtggataaatggcatgctttgtccttatgccacctacatttttaaactactgtgactgatttctctagaaaggtcagaggtttcaaacaaaagctttgtgattcttcaaagggagacattttgagtttttctctgtggagactggctgtgcctagctttggcttcatttccagttgtgcttgggaggtgactgggtacagagtgacaagggagtaccgcaggtccttagccagctgacttgtggggcaggcagagggtagagggccggatgactccacctgggcgctcttacgcggtcccttagtttacaggcgagctcacaggctttctcttgttttgctgtagagccttcctttacagactcaaaacacgggacagccagagaggtttgtgtatttgggtaccatggcgtggtgaagtttcagccatcgtggatacgggtttctttgatttttacatgaacttgtttgtctttactttgtttcgtttctgacttccagtctgggtgagttgttcttgttgtgtgtttgttggaggatagatgtgctcaggagactgtgactgcccttgtcaggcaacagggacagaacacactcaagtctgatgattaggaaagaagagagccggcatttaagccaagtctctcagatcccatgcttgtgttccttagatgcggtatctacctagtattttcatatgtattatcttactggcgctccacttaaccttaacatctgagttgaagagttcttataagtgcctgtatatagtaggaagcaggttgaggaactaggccccggtatgatggttagtcgattgctcttctggatcttctttttatctcagagatatcgacaacacatcaagttctaagctctgcttctgaatttatcgtagtacaaacaaacaaacaaacaaacaaaaacaagaaatgttctccaggactctcaagataatcttgaaatccattgtttatttaaaagcttaaaaatgtagtaagaaaccacccagaatgttgtctgtgtttgtattaattttgttttcttatcttgaagaaagttcggaggcctgggcctttatttcataggcagaaaaccgaagctcttgcttcccagaagctgtgtgatggaagattctgtatgagtcacacagcagctgcatcccagggatgctctggctgatactggctagtgaggtcagtttggctgcctctcttgacagattttaccatggcgctggccattgagtcatcaaacatcagttcttacggtctctgcatggtactaggttcccaagatagaagaacataccatgcaacaactttcttaggtataatttcttcagatattaagatttcaaatattttgataattttacactagggtcttcctaattaatagactgtgtggagtctttaaacatttgtagaaccagttgttttaatttttaaaaaaaaattgtgtgtacatgtctatgtttgcatgatggggatgtagggggagggtgcatgctatggtatgtttgtgtatatacctgtgtgtgtgtatgtgtgtgtgtgtatatgtgcatgtgtgtgtgtggagagagagagcgcgcgagaaggagagagaaagggagggagagggagagagagaagtagagagaggggaagagaaagagagagagggagagagagaaggagagatagagggggaagagagagagagggagggagagagagggagagagagaaaaaaactttgtggaatcactttgctctttccacctttatgtgtgttccaggcgaggagctccgctcccctggtttgcctgcttagcaccattaggaacggagctgtctcactggcccctgtgttgtttttttttaaaaataaaataaatgctgcacattgagatttgtaacatttgactgtatttctattatgtgttcaagaatcttttgtgtcagaaatgtctgtgtaaatgttccgaaagagggcccaagctttctgtttcttagaagctgaccgctatgatgttttctctagagcaagccactgaacagtgagacatagacagacagacagacttcctccccccccccctctctctgacatcttccttgtaatgatgaagtgtgaaacaagtagagttacagaaaaacaaaacaccgggagaactagagtggaaaacagaaaggaagggaagccttggagagcaagctgtggggaattcatttggcagttggtggaggtccctaacacacagccagatttcagtggtgccgcctcctacaatccgaattctgctccctctctgaaagtcagcaatggcaggacttgcacactgatgagggtctgaggttgccaggggtctggatctgctttgcctttcctttccgataaaagatggcaggtgcaggttgcattgcgtttgcatagagagcacccagggctgctgtgaccagtgtggtaatggggtggctggagggtctataggagcatgtgtagacagtggtcagaaataggagaaaggttccaggtctcatatatgaggtaacaaaagaagagcataaatctgctggtcccaatagcatatgctggggtttgtttttctctattttatttgcttgttgtttaatctgaaagtgaaatctgtttctaccaccaccccggtgtgcgcgtctttctgtaccaatcatagaacaaataatttgtcctacaattaagctcaaaactcagaaaatgcagcgcatacagttacagaatggcacgggattgtcatagaaacttgtcccgagcactgtaaataaaaatgggtggggattagtctcaggagcatgtgggacgtcatgaaactcaagacgaagctctttgtttaacagtcagcaagagaagtgaagcaaacttgatacagtccatgggatgttagcagttcagatcctccagggaaaagaaaaccacatcgccttcggattagataacctgtatatacaaataacagagtatgcctgatggttttagaaatattttgtatatcctttacttaagagttatcttattcccaaataatgaaagtttttaaaatttcaaaatctgtctttgcccttaatctttagaatcttactctttgtctctcaccccacttgtttttgtttgtttattttgtttgtaatgctggaaagtattacagtttcattgcttgtctcctatctcatctcacataataccagtaacagtggatagtgatagacaatctttcctaatgtcctaacattatgtatttctaaatatgtatagtcaagttggaactgagtttgtaataatgccattaacaccatttctggttttagagtctttacgaaggacattgtttcagagtattattctctttcaaaagctccgcccaacatctggaaaaagcatagcttgtcttagaaattggagttaatccccatctgcatattcccaccaggatgatatttcagtaaccaaaggatctttgattctttgaacttcaggagggaggagttggggttggagagcattttaggacttaaggaactcagtgttgaggactggcttggacatgagacaagaccccctttaacgatgctgttactatgtagttcatttgtaagcaggataacagatacagcatttaaaatctgctaactggaatttgaccaattcagctgagtaaggtgggtaaaatgacctttcagagttaactattgaacccagctctccttgaaatcagagaagtcatatggggaaacaggaataaagattctgtgtatggagcacccagggcctccctgccttccttcctgcctgctgcaggcttctacccatgaaatttcaattgcaacgtatgcatgcatgttttgtttcttatgtcctagcccactttttacttggctaacgttattaatactcggctgtattcttatctcctcaaggaagcgttcttttcatccccacttgagctgaggatcctttgcagtgtatccctgacatccacaagcactatgttaatactccaggatcacatcccgtgtcatgataaaactgtcttccaaactgggctgtgcgttctttctgggcagggccaggcttgtgtcgttttggatttccccatgtaggacagcagaggacctggcactgagtgtgtataccacagcatctttcttcacctggttgaattatgaccaagaggagaatttgggtggagcagcatgaaattgagatatttattatcagaattttaaaagtggtagtgagggttggggatgcagctcagtgcttgctcagcaaactcggggttagaaagtactgtagaaataaataaataaaccgggcggtggtggcgcacgcctttaatcccagcactcgggaggcagaggcaggcggatttctgagttcgaggccagcctggtctacaaagtgagttccaggacagccagggctacacagagaaaccctgtctcgaaaaaacaaaacaaaacaaaacaaaaaaccaacaaaataaataaataagtaaatagatagattagatagatagataaataaataaataaataaaagtatttggtatctggatgagaattgtttttctcttctcatccatgtaaatcaatagctgttccttcacctaaacctagtttcataatagcccaaaggagttactgatgtgtgaataattatgattctgaatttaaagatcagaattctttattaaaaattattcaggcaattaaaaaaaattctcatgatcctgttctcaacttcgatttgagccttttgactttgaaaagatactgtgtcgtgggatggagtcatgtatgttgtagcagctcagctgtgaggagagcccctcttcagcatcaggtgtttactcacaacccactgtgtgtgaagtgcacttgagaggcagggggtgagataaagactctaggctacagaatgtctagggtgtatatttattaaaaatggagcatttccccttaaactgctcagtcaacaggttcttgttggtgttgattcatattttgccttggtgtgtaggaaaaggtgtgtggatctctcctgatctctagtgagcatttgcaggttcctgcattttgggagggtatatttagttatccaaagttgggagatgccacaggcagcaatacacaagttaagggtcacaatcaagctgttaggtcatatgcatagggctgagctcttacatttcccgtctgaaatctaaagcttttctctcattaaaactattaaaacaatttcattaactccaaaatgcacagatgtgtgtgtatcctcttggtttaattgagggcctgttgattatcggtaacataaacttctagaagggaaacagtaaccaacccaagattctctgacacacacattcatgatttcactccatagcaactcatattaaacccactgcagaatagacttccccaggaagtgtttctgtcttacctgctttttattcaaaagctcctcctggtttcagcacaggacaatggaaatattttgtcagaatactgcctttttcgttttgaagatagagccttaaaaataatgagaagcaaagtttggtatatgaaagttaaagttattttacgactttgagagatatttgctctcagaaaattctaagaccaggttctaagaattgaacctccttccttggtggtcagtcacacacagtgtggtaacaaagaaagaagggagcgggcgtttcctcttagattttaatttctcctcagaggtgcgtggaagggcttattcctgtgagtatacaccattcaaagtgtatcttttaattccatgtttttctgtgaagtgtgcaattctggggaaggggataatccacttgcttacaaggtaataatcttgagaaaaacaattatttgtttaggtacagattttcataagacaattttaaaactatcttgaaatgtcaggaaaaagagcgcctaatcagtcatcgaaggaaacttttagttcttaaaatttagtcaaaattatgttttacacttagactttgaattaggagacatgctaacttgttcttattccttcaagtgtattggttggtggcatattacgtactggaatcgcaccactggggaaaatggttccttgtctcttggtgtggctgacagaggcttggccttccttgtctcgtcagcccttttgtttgcagttgctggcaggctgtctcaggtgtgaggaggatgcttaggggaacaggcatcctccctggtagacagtgactctctattggcccctgtaatgcttatcagtgtaatgctacctcgcctcctcattccttcattctccagtctgagacactaggatccccttcgtcctggtcaagtgtggatttgcacactgcactacttctgcttctccataaatgattgttggcgaatgtagatctttgaaaggaagcccatccctatgcccacgcagagcctctgcgctgaagggctgactgggtttgtggtgacaaaggagacacctcacgagcaggattcgtttgaccaccacatgctattcatgtcctgttaagcagaaacatttttgaacatgtttagagagtctcacttctataactagatttttttcctttgagattatatctctgtgcttcccaggctgccctgggaatcctgggctcaagggatctctctgttgcagcctggaggacagctgagagtgtggacacaggatatcccactgttgttatttatacagattactgttgggctattacttcatccctcttctgtcagaccacaaaactttgttgatttcttcctacccttcatacatataggaagatataacatgtataatgtgttttatgtatatatatacatgaatatagacacacatgtaacaaataaacatagactgcccaacgttttctgcaggccttgttcatcttttcttgccccccttcataaagatacaagtttatttggaactaaacctgagagtgtaaagtgggctatttaaagacggggtggattacctgtttctctctgacctggctgaggttaccacttccatctctgtacccttgttggcacggggagctttgattggatttgacatataattatttcaagtcaggcacggaggaatgaatgaactctttttttttctaacctgactcttactacatttctttgagcataaaaggatagaattacttaaaacactcaaaaatagaaatctgaatctcagtgcgctttctttaggccttgtttctgggaagttccaggcacaccattatgacaaatattttcattttaatacacattactaattttagttattacttatttggggatatgtaggtcacagtagagtgaagtcctgtggatctgcccctcccaagataggatcagaacctgtgccttctattcattcacttccccatcgtcttgtctcagaactctgaaaaacccacccattgatctgaattttgcatttgtaattgccttcctctaaaaatagatgttttgttacctatctatatgctaaatatattgtttaagtttacctgttttaagttttataaattagatagatagaaagtatacacaaacagttataccaaagcgcctttcttctcctcaaaattgtttttagtgttgctgcctatgctgtagtacattgctgtataatattccattgtgtaatggaattataaattctttccacttacttaggatccatgccaattgtgcctaggagtagaactggttggtcacaaggcaggtaaatgttaagactttttttaaaagagtgatatatatcataactagttgtacacatttgtactcttcaacaggagtcggacatcaaaggctgtgctgatctctgcattttctctcgtatccatcatcattagattttgcttttttcctgactagaggctgtgcaacattcctctctgtgattgcctgcatttctaatttgattaacgataagactgagttcttgtatttgtgggaacatgttcccttccttatctgtgaagtatgtgttcttaccctttgatcatgttctgctttgctgtctgtttttctgctgtgcagaagcccactagccctgggttctaactaactagccctgagttgcaaagacttcctcacaatgtgtgccttgccttctgctttcttcaaattacctttgctgagcaaaataccaaaattttaatcaagggaagcttttgaatcatttgtatcttgttaaagacgatcttggttccacattgagtcatgtgtggtattttctatatacacttgtgttcatcatattcaaatgtatattgcactggagtttattttgtagcttgtgtgaggtaggacctgttctcatcgccaccccccaatgaataagcagttcataatgcaccatttatgagatagtgtttctgatgctcagatgccctttgatgccacgcttggaactcacatagcttcaacatgcatgcggcatgtctcccaaattatctactctgtcctgattcatctgttctgttttattgccacagtgcttcagttatgaggcacttgcatcaagtcttgcctggcaataaggcaaatccacatttctgcttttaacacatgcctctcactgtcctcaaccctctatggctctattataggatcatctgggcaggtttcaagaaagatcctattgggactctgctcagatgtagtttaactttataggtgagggaaactgatattaaaacacacacacacacacacacacacacacacacacacacacacacacacatacacacaccaccaccaccaccacaaccaccaccaccaccagcaccaccaccaccaacaacaactatcagatcctatctatgaatatggtatgcctttcttgtatcttggtcttgtcttacattgaattgttttcatctaggcctagaaactttcagggatgtgatatgtgtcacctgtattttcagattatattctactttggtttctggtatagaacaacagttaagttttgtgtgatgatctagctctggttacacattttagccagtgttacaccttgtcactctttggtgttttctctgtggatagctctacctcatgacgtaagttgccattttcgtgtctacccttcagtgtctgtctatgttgactcctctctcatgcacacatgcaatgcagccttcccagggtggggctatggtttctactggtaagggtgaggacctttgattatttttcttggcataccatttatttattttttaagccatgaataagacaaatgaattctttacaatttaaatattaccgacaatattttgaattagaaacgcagcacagccttacctgcttaattgactacactcttatttctgaggatggcaatgtagagtctatgtgaccagtagtaaaattttgttttccatcacagtgtattatgtggaatgtctatggtttgtatttattaatggggagtgatgtctttaagaagatagtcttcttacatttcatagtaaggttcatttcttatagtaatcatcttagggagtcagcagagagagacttgctatgcatctcctagatgctttgatactctgttgtatgcaccagtctctgaagtttttttttaaatgctttacaacttaaatttatttagctattgtatatgcaggtgtgtgggcacaaatgtggaagtcgggacagtgtgagggagtcactttatttctttcaccgtgtagattttggctcaagccatgaagcttggaggcaagcccctttacctactgtgccatcttgtaggccacagtctctcaagttttgctttgaggtgtagtaccacttttcacagttgaaatgtctggtttggatggatcttctttctcccctctgtcatggaatttttgttaagacttaaatagataatccccgtcttgcaaactgattgcaggaagatgcccgttagaggtagaaagtaattaagcagctagggctttatcatgctttagcattgcatttaagtctgttcctaattgggtgattaatgcacaagaagttccttaccccctccatctctacagatggcaaatggtaggtcccaactgtcattgttcacaaaaaaggttatggttcaaagtcaaagattcagagatagcacgctaatcaatcataggaagttgtgtcagagtgcccagccaggcaaaaggcaggcagggtgctagtattgacccagaatccctcaggaacatttgttaaaagaaaaaaaagtttgttcttgaatttgtttagaagagattatttgcttatttgaaatgtctctttgaatttagtgtcagacagacatttaagtaagtctgaaaataacagcaaataggtttcctgtggatgggtgcatccagcattggtgggatttagttttaaggtggcatacgactgaaagtaccatgttaatatattgggatttaaagggagtgccttttaaccattttcacatgaagataatttacgctggataacttccttttctgggaggcagaatagaattatattctgatattgatccacagaagggatttgcattttattcatgctataaaagtgcctttaatggagatattgtggtaattgaatctatactgtgtatcactttcaaagtatcctttaaattatttcatgttatatgacttagtaactaaatttaagtcatggggaagaagatgactactatatctttttaggtatagtatatagcctttaatattcttagagcaaatggcagttgagggcattctatagttgaaagagaaagagaaaaaaaaaagaaaaggaaaaagaccaactagcggagaggattccattactttcagcacagtatgagctaagtcaaaggagttttgttaattaaattcaattgctgtccattagaccagtgcagagagatgcctctgctggcgctgacacagcacaggtatgcaatttggctaaatggccatttctaaaccgtagcacacatttctctaccagttcacttttttaaaagtgggaatttttaaccttaaaaagtcagggtaaaggtgattttttttaaaattcagagtgttaagaactgattagtttgtcgacttagaaatgtatggttcacatgagcattaaatgatttttttaaaatatgcaatatctgcaggtaaatgtatcaataaaatgtatattacatatatcagtagataatgttgtgcttttaaaagttcagttgtcttttaacctaaagttattttatttaagtcataattatcccctccccttttaaaggcattgtataactacaatctttacatgtaattgagggaataattatgggaggtataaaaatgaaatttaggtggtgggtaagtgagtctgcattttggcataaatcactacttttagaggctttatatgtcagtctgataagttccttactgtagtgaaatgacaagaataccactcaggcactggctgaggcatggttttgacagccagcaagctcgcagccttgctgagtgcatggattcccacttcctgccaagatcaaaattggcaaaccccacaaaggatattagggattgtcactttaagaaggaataacagggtaatgttcttgctatgaaacgtaaaggagattccttcctgtatagtgggtggagatctggaggtgtttgaccctcagtagagtttgatcagagtgaacctgaacaatgaaatcagcaagagtcccaccgatgttagtgacaatactcagtgcagtttcacttaataggacataactgttaactgttgtcctttgatatgagaaggatttgtacagtagctttaaggtggttcctcagaccccagacagatatttttaacttttcagacttgaagagtggcacttgtcttacttcctgactttttaaaaaaatttttcttgtacaagcagatgggttttttttttctttttatacatttccagatctctcccatgacaacaactcattattgagaacctactgtgcaccaggtctgtatccagcactcaaatgttgacatttcttctgactcaggagtttttatttgaatttaggcattaaaaaaagaagagaaagattacattccatgttgtgaaagagtcagccccgaaacctgcttaccctttgctatttacagtaagtacttttgaaacagctgtaggcgctcaaatgaaagtcgcgatgtggagtgggaatgtgggaacattcacttgagaagacctcgcattctccagctttatagctagcagaaaaggagattgttgtgcattctattaaatactgccagtatgattaatttaaagggttacattttattgaaccctggtgtagatgctctttgtcaacccacattcacagctagttagagtgtgtgtagcatttatcaaaactttctggagccccctcacctcattagcatgtgaatctctattcagcagttaatgtccgttactgcaagagtgctcaattcttgttttcaataagccagttgtaaaatgtcagactgtcacttacaatataaaaaaccaaaaatgatggtatttgtaaaaatgttatcacctcataaaaacaaattgtaaagacatgaaagtgatcttgcgatgctgggctttcagaagtgagttagtgcagctactttaaataccagttgtgtagattcccacactttccttccaaaggagaggtttacacaagcataatttaagttacaattacactaattaacatctcatttgcataaattgttgaagtcaaaacaacaaggaattgtctaagaagcttaatcctatttgtccaaaatagaaagatttttttttttttttaaaaaacatgccctaaaatttggcagcttggttatgtttttagtgtgttgaacattgtcctttaataaatgtctttcgacttacacaaatatatttttcctactttttctactccactctttgtaaaatgaaaaccacaattggttcttaaatcagtgctgacaagatttaaaatcatttatataaagtagagatgctaaattcatgatgaagggtgagcatggtgtgcatggttaggtgaagggctgtgtctgagcgactgaatagcaggtgaagggctgtgtgcatagacacttgaagggctgcatgtatgaatgtgcttatgtgtagatgaaaggctaaggttatgaggctgtgtctaatgtgctcctgtgtgcatgggcctgtgaagaactgtgtgtgagactgtatgcatgggtaggtgaagggtagtgtatatgaggctatgtccacaatcatgtgaatgctgtgtgcatgtgtgtgcgtgcacacacacaagtatctgtgtgcagatgtaggggtttgtgaagtttacctatagttaccagtagctaattaacttttaaaatatttttctgtcccttttagcttaatgaggtgttttgtaattgtctttttgctgttggtaaagattaaagatattcttgacgtagttgctacccagcttacatgtgtatgtgagagctatatctttataacagaaaatttaatttttaggggcttgctatatatccagggaatttatatctatctgtctgtctgtctgtctgtctgtctgttatctatctatctatctatctatctatctatctatctatctatctttcattctaagcctgggttctaccactaagctgtatccccagaactgaaaattttcctttcaatggctactcacctctcacctgtaggcagcttctaagacagtgatttaggaaagtcaatctttttcaagattcatttgaaactgagaaaggtgacacaaatctacattcccaggattgaaaaggtggagacagttatctttgatacatagcaagtttgagaccaccctgagctacctgagcctgtctcaaagacaaaggggaaaggactcatttaaaattagagacatctgggagccgtggaggaagttttcatactcacctatgaaactgctgtgttcactttctacctcgctcattcagagttgctcatcttgcaagacagatgatggctatggagaaataagcactacctgaagcatgcagtggctttaactgttaactctttcagtaattgtggtagaagcatgaacataccttgtcatgtatgtgatctgaaaatgccggtaagagactaaagaaagacttgctcttggataccacattttggatatttgatataattagtttaaaatgaattttgtatgcagacaggaaactgcagtgcattcacactgaagttacagaatccccaatggtttattggcccaaaagtgtgacaaggctggggatgagatcttcccggtaaatttgtgtttctcttgaaagcatttcatttgttaagagtatatggtttacttatcctatgtacaatatatagcttaatacttacttgttagtcttgatataaaatatcttttgtagtttgaccttataggatatatatttttcttttagttttgaaattgtaatatagttatttcataccttccttccttttccttcttcctcattcctcctccttgcttttcaaattcatgccctctttatattaatgggcattacgtgtgtgtgtgtgtgtgtgtgtgtgtgtatttcttgttcagctcacgttaacctgttgccttgaaatagattatttaacctgcaagttcacatgagtggcagtggcaagtgaactattgttctaggtttggttgtgggtaccatcttagatacacactatagttctgactttataaagtctacattcttcttgtggatgtgtacctaccaagtgagaacagattttgatagaaattaggaggattcatgatgaatttgggcagtctaagggcttgctggctaaagctgaatgtgagttcagtttctaggctagggcagtagtagtagctcagtgtagcttaatatgtgccaggctctagacaccaaaacgaaataaatacaagccccccacaacaaagacacatcacaggtctgtctctctctagtgaagctaagattacattgccaaatttgttctttatgggaagctggttttctgtcagttactcaaggaagtcctggacttctcctttaaaggcttatctttgttaaggctgggcatggtgtgcagtgtctgctgtcagtcctcttgcgactgctctgacaaagtcttcaggagactagaaagactgggattcagacatcaatgtgggttgaaattggtcatcacatccaaagacaaagctcggtgcattggcttttgaaactactcagtccaaaacatcaacaaatatatcataataatcactcagcagaagtaaggggccatgttacacactgatgggagaaaagcagagaaagacaagaggctattcttctcttctagatgctcatagctctgctgggaagcaggaaaaacagttaagtgctctgttctatgtaggttatgaaggacccacgaggcccaggagaagtgaacagtattgattcaagttgaggactctatgaagaggatgggagtacagaagagccttgagggctggccagggacatgcaaggatggaacagtgagctgggcattgtagaagtcttgtcggttaaagctgatgttgggttgtggattataggattgttggaaggtagatgtccaggagaggccatgatggggattggcagtgactccctagtggggagcagaagaaaggccagagcataatgtgcaaacagtgaaaatcatgtctgtacacagcacacactgtgaagggtatgtagtgcttgggttttgtccacattcattcagcaagcacccattgtttacctagtgtcagccattgagcaaggctacctgcaagtagctcatgagcttcaagggcaaagttgaaaggatttatccagttgactctttctgaagaagtagaaggctcatgtatggggtgcccttgcagacatggagtttggcacaagtgtacatttaaaggttacattcctttaactcagttgtgaaactttagaagcccaaagaagcgggtgtgggctataattcttcctccagataccttccacataggcagccagaatctgccttgtatgcagcagtagcatgaagaattaaggcctgtcttcttagtcttgttcctgtcgagacttcccctttactcccttaggagtttaaatcagaggttaatttcttctcatcctggggcctcgtcagctattaataaagtttaatgaaataaaaacaaggcccaagttagagattccaaaatagtcctggagttggggaatacttcattatcagaagaattattgtatggatttgaggaagcccctgctgacagtggaaagccagactcttagttaattaacagaatacaaataaccccagtggttagtctctgttactgtggcgctgctatcagctattgcgaaggtaagggcttttcttaactgcaaatatgcaggcagcacagatatcaaactgtgtggagatgacctttaaatgaagaaaggggttggctctggaaccttgcctagagggaatgaggactcatgagcttgataaacactgtcagttgttaaggcatctcctgataggtgagaagcggtttttgatggcccgcatcttctctatggtctattatcttgtgagaatgacattcgttaagttggtatctgtgtgcatcccacccaaataaagaatgtttcatcagcaaagtgaattgccatgtagttgtcagactctggaaataaattatcagtgatgactgcagccagtgaggctgtttgcttatcagatcacttgagagcagagacaagcgagtttcatatattcttgggtcttgaattctcattttcgacatctgttccgaagctttctaagccatggaatattctaaatgaacattttcttaaatggatgaaggaagacttagtttctcctgttaggtgaaacctaattaaaaattaaataatgactttgtgttggcttgtacatttcttattccttgaatgtgtaagtatattttgttagaacattccatttttaaaagcatgcatttttttctttgatttcaagaaattcttaaaactgctatttggtttttagagtacaatagggtgtcaaagctagtctattggtaagaatgggtatgtagcctcatgatctatattttctgtgatattttctgaagtataattagcttaatctttcttcttcaccctctctagttcaactacacccatcagggcagttaactgaggcactgttctttgtattatactaggaattctttataaacgtaataaatgaatgtccattttcttataggccttattctctagtggacctctagtgaatcttggtagcttctttccacgaatgataatagaggtggtatgtatagatccctccatagaaagggagagaggcatgtttgtaatgagtcactgggttatgatatgagatttgctttagccttgtgttgctattttttccttctggaagtttaagactgttccctatcctgatgcattgatgtcaagtctattaagagatcaagaatagaaaaaaaaatcaattcatggggaggcataagtttttatgttaatagatgaatagatgctgtgtttttttacataaatattatgttttatttttaattaactttttggtgagcataacaaatgttttgagattgttttatatttcattgataatgtcttattaatgattaatttttgtccttataagttttagtttattatttaggcattaaactaccaaatacatgtattaagtgcctgttgtgtatgagtctctaatcctagtggtgaaaacacacgacagggtccctagcttcaatgatcttgtttttaatatatatatatatatatatatatatatatatatatatatatatttcaaattatatgtatatttcatactatcaatgatgtacattatatattatgatatatgcacatacatacatatgtatgtatgtatatatatatatcataatatataatgactattttaccttctgcatatctgtgtatctgtgtatcacgtgcatgcctggtgcctgcatatgtcagaagagagggttgggtctcttggaactggaattatgggtggttgtgaacccccacgtgagtgctggaaactgaatctggttccgctgcaagaacaacaaaaactcttaaccagtgaaccatctcttcaaccttcttgttatcttcttaaattttacttttatttatttgaagtgctaagcatagaagctcaggccttatacacagtaggcaaataccttattactgtttctaaaggaaagaaatcatctaagtacatgaactcatggcaggagaaggatgagaccacactcttcttaacttctatgtagagagagacaaagtgcaggagtgagaggttcaggtatatgtgcatatctgtacgcatctcccagggaacgtgtatatgtgcatatctgtacgcatctcccagggaacgtgtatatgtgcatatctgtacgcatctcccagggaacgggtatatgtgcatatctgtacgcatctcccagggaagaaccttatgacaaagcagaaaggccacaccagtgaggggtctgtgtggcaaatggagcatgtgagtctgggtccatataactagaccatttggtgttgaaataacacgtgacatggtgcgtctcagagggaactagaaaacgtaacagcgtcaggtatccaggtaagaggcaaatcacattaatctggaaaaatgagattgtctctcaatttcaagattgtttaatgcagtgtagagaacataaaaggcaccattagtcttttcttctgtaatgcaagcaggaaacatttcagatagatcagtatgacttccagttgaaacaaagactatagttggcatttaatcttaaatatttgtggacatacctagtggcattaaccttaacatggctattctcctccctagtaagacttagaaattctgccttcccagttcctgaaactcatctaccattgacttggatgcctgaccctggaccacacatttctttccttatttatctggtccatataatgaatggcttttccacaggaactaattcagttactgagcacaagtgccacacaccttcagaaagtgacactgcaggtgtttagtgagaggaaatttcgtttgtcttttattcagagacactatctagaaacgtgagcttatgatatattaatcggagaaactggcatgagtcagcacttcattctcatctgggcactcataaaacaatctacatggccaacatagcatcatgtttgtaactgagcttttgtttctgtatactaaggaaactgaacattttgttctttgacaaaaatgattctttaggttagggtcaagaaatggattcgtgatgatatctgcttaattgttgaggatattcagccaaaacttagagacaatgtatcagggttatacttcatgagcagacacttgactttagtctttggatagaaaagctacacatctgtctgcactccttgggccatgttaacttggatattattttaaaaataaaaagtttgagggaaaagcttgcacatagagaaagtttgcagcacatttcctgtgtgttgtagggtatacctgtttctcggagggagcctgatctctagaaacagcatgtttgtgtcctcaaggaggagaagggatcttctgtctccatttgactgtttttatgggtcaaatagcatttctttactttaagttctgtggtatgttctgtggtttgtgttaggctctgtaacatttataattatatgagctgacaagatggaattaacttaattgaggagttttgcatagtgtctgtaccaacatcctaataaaataatatgaaattcaataagtattgccgagtgggccagcactccactcatggaggctcactaaacgggatatattctcgtggcacccttccagaatgtagaagaaacacatttatctaggtgattagtattcttcctgtctgccagatttaagaattgtttggaaatattgttagaatcaaaatcatgtctgttgctacacagggttgagcattccaggcaaaccctggccggtttgttgttctcatgaccactgattttcatgtctgccctgacagtgacagttttcagtgacagcagccagtacaaggcagggcactccttttttagacccacctcaaagccattcccgaaaacactttgaaagacattgtggagacactcggggcctccatagtttggctcttggaagttattagcagcttgtagtccaatccattttaaactgaaagggacgtctctgcacagcacacattcatcacttctccagttctaaactaaagaaagatgaagacactgaaagtaggactttaagaacatttggagcatagagactttttaaactttcagatccccatattaaatttaaagtgaacatagcatgctttgcattggacagtattgggccgggtactgtattttgttagtgataactgctcgacataattccagggacagctttaaaaatctaaaataaatttgtgataactgtattagcaaattctaaggtcttaaattgacctctaggacattaggaaatcaaatttaaagcattgcattgtctgttactcaatggagcgggctgaggacagcgtgtgacttgtgatcgtccagtgatgcaatagctgtgtgctccagtgtgggttagggttgatcagatgaccgcctttaactatgcccttcccggagcagtttgaatggctgttttcaagtaacaacctaggcagttaccttattgattttaagaaagaccctttttagctatgaaagcatatactatcttctttggattctggcttagaaattacctactatggtcagaaatgtttacccaaaactctctcctcaaaaacaagtaaaacttatatggagtaaaatttataaacaagaaaacagaagtattacacacacacacacacacacacacacatgcacacattacacacctttgcacatgcacacatgcacacattatgtacatgcacttccactttctcccctggaattagttttcattgaacatgaagacacttttctactcatttggattctatttttacttcattcacaggaagtgatgactatacactcaacacaaacagagttcacttcatggggtgaagaattttcactctgtaaatagatttcaaaatgaaagaacctttcttgctcagcaccatcacatgcacattaggttccatcatgtgcacagtagataccatgttacacagagcggaccaagttatgttcaatagtgtgtgaccagatcgccagtatcctatcaacgcaaagaggaattcttaatctaacttgtttggaagcatgaatgtactcgatagtatcttggtaagaagaaatgtttaccacctagacctcagaagtcagaggtgacatggaatgagtttggactttgcttccttcacactgtctttcagttttaaagttatagaatttcattttcgtgagtgtgtgtcattgcagtgggttaatatgaaggtggaaagatactctaaagggagaccagcatcaccgcccatcacaggaaagattctaggaaacaaatgggtagccataggcttggaatcatagaatgtcctagttgtgagggaccttaagttccatttaatccaaaatttagatcccacgacctggatgagatatgtgttttgtaattgtgaatggactttactcatgatgtacttctagttgtttatgttaataatgagaataatctgtatgacagtctccctttctttggatgtttgtatgatgcttgttaatctattttcggtaaaaacatgtaagagaaaattgcaatcgagcattgtaatctgaaaaaaaagtaatctgcaattattggattgattgtgcttttggcagtgaagttgttatagtttgaagtttttaaccaacttgaatatgtcccagagtttacacagggttgtttatagtctcactagagacaatctatctgcttctttgtcctgacattttatatggatgtcatgaaccaacatcaagacaacataagtagcaagcactatggatttcattactcactccaaacatgggaattgcaaaatatctttctttaaatattttctcactgtggtgcaactgtggagggccaaattccagcttaaataaagtttcaatctaaccagttggtaggactggtggccctagtagaactctttctaggtttgggctgtgttttggctgctccaagtgaacccctcacttctctgtttggtgtgtgtatatgagacatgggacattctcatgctgccatctcttttttgagccatctctgtgagattctgtactactcagcgctttcctgctgctgataatcttcttatatgatatcctatcagcacaatccctttaaggaattatctttctgttttgttcagtccttccattctggtttctaaatgtttgttcttttctcttaaataattcttctaatggagactgcatgtggttatgaggtcaaagtcagtcagtagtcaaggcaagaagctactgctgtggaactggtcctgacacaagctattccattgtcagcaactcctctgtgggcagcttgatggaacactgcagagggtaggaagacacttgcactgtgatttcttttctttctatagtgcacatagaaatagtagggtttggggggtttcttcgagaaaatttgcagattactcaaatataggtgaaagaatctcaagtttgctcattttggcataattttaagacaaacgtgttagtgttggatctgggcctgtgatgggtgaatgagtgtttcagtgaaatgacataagtctgtgtaatttggagggtaatgatgccttagaacaagaataaatctggagccatggaaagactccatattctagatgaatgcatgcttcctcttgtgactatgaaaaatgaaattaaatctttatttatgtgcatctacttgagcaacactatacgggcttaatttatcatatatttcagaaccagtggtattaaccttaacctctttactcacattgcatatgatatttaatccatcatctttgttttaaacaaacaatacacaagctgttcctggcattggtgttaagcggatggcccatctggagagcaggaatatagatcatgagcataagagaattgaaattgtgtacaaggatggatttgcatgtgtaaaacctttctgttttaccatcctttttttttttaaatcagattatttcatactaggtgaaataactcccttctccttcagtctaacctatgtgttctgttggagagagagagagtcctttcagtgtgacgggaagaacaattgagttttgaaagataattaaataatgggccactacggtttttgttgttattgttgatattaatttttgctgtggtagtccgtgcagcagggcagagacagcacaggcgaggggtttaggtctgagtctgtgcccagtgcgttagagccttggctgtcaggatccttgagctaccattttatgggagcaaatgtgagaatttttgtaggtcatgcatttagctaggccttgtaaggtgagcaagctctgcccagtgctcatgacctcttcgaggtcttgctgggcagaagtatgatcagtgaacactggagtgctgtgtatgagctctggccccacaaaggaaagacaccttgcctgtgttttgaaaagatgggacaacttgtggtgtaaatccttcctaaggattttctattttgacagacagaggaacaggcatcccaagtatttgaatggtgagagattcagaacaaactgtcaacaaaggccttcccagttccacaattgtagcaccatctatgtagaattcttcaaatagctttccactgatgacttattttctgaaacatgtttattgtcatggttgaaagaaaataataatgaaagaaacagtgattatgtctagtgataaaattgggaccggatgggagttttcttctcagtaattgttgctccatttaagcaatcagcttgcttctcaggtggcagaaaaaaaatgtagagggaccactttccctattggctggcggctcccctgcttcttggcctccctccactgtaacagatcaggtagaggcacttgaagaagactatgtgcaagagggcttctggattgacagtagggaccggcaacaaagtctagaagctgggacagtggtgtatacccacggtctgcatgccaccactgcaggagaagtacactgctcatttaatactcttatatttgtagtggaggaatgatggtccctggacagaagggagtttctcttttaagcagttccaactaaagaatctgtatacatccatggtttgcaaattaggcttggatatctccatttatttttattgttgttgtttatgaatggccaataatttattcgaatgtgacatttgagctggcattctttttggaccaagatgacaggagctgctgctgtgctgtgtttggaagaacagtcacagcagcccttagcttttgtcctagttggtagttacaatttgctctcttcgcttctcatttagaccttatggtatttcccaacccttagactattttgaaaggctttgattagaatatgctgataaaagaatttgataaccaagtttggaaccaacaaagctatctgcagaagactgaatggtttggcagcctaacaaattctattcagagcacacaaagagatcctggaacgtgttatagggacttgtgttgagggaatggtatgaactcaggttacctgaagaatatggccgtcatatggaaacatttatgtgattatggaaatttctttgaaatacagtgaaatgagataataagatataatgcccaagaagaaaagaatgagtgctcattttgatttttaagtggttgacagaatgggagatgcctgagaatagatcatgttctgctctacacacacacactcctgaggagataccacttattcattgtcttgctgacccaaacccagactcaaccacatttttttgtgagagcttgtgtaataccctcctggcctagaggaatttgaaggaggtagggagccgggatggaggtggtatcatgttgggtacctgacgtctgccaggcactccattgctgtctcatttgactcatgtgtgtttcctaacctccagttcacagacgagggaactgagttatatgagcacaggagacttgctttggatcgtctttctagctcgaggcaaaactgaaatcgaatcgtagatcctgcttcttggtacactgtgccacctcccaggttgaaggggatctctctccctaacagggcggcttcctttgtcttgattctgctgattgttttgaaatgctgcctgttattgagctgaacattgcctccattatcatctcttggtcaagatttggcctcaggaggctgagggattcgatagactgctcttttcccatgtgggtagtttcccccttttatgtagttgtttttccttaaaagtataaaacaagcatgccgatgacatacatgcaatcaaacataccttcttgactacaactcaccctttaggatatagaatttgatttgaatcttagaggaccggagacagaaaacacaagtgttagacagcccagtatccatcccatccgaatggctctgcagccaattatctgttctctttcatggaggccaccagttaaagcagggaatagggtaaacagaatagattagcttgtgatctacataccagtttctggttttgcattcagtatttagcctacctgtgcaattttatgaaaagagggtcagtgaatattgtcaagttctctcctaaacatttaagaagctctaagtgtaccctccagattcaattaattaacctttctggggaagtcttccaaacagtcattaatccatgtgacttgtccttctctggatcctgttatattgtccataagacatggtaaatggccttgtaagatgcctgactgaaattaaagtttctaattttttttatattcttttgatatccattaaaatggaaagagactcggtatcatcaagggggaagtaagcctttttttaaaaaaaagaatactttttaaaaaaaaacactaaaattacagatataagagagatcgttttcttttactcttggaggattaaataaattctcaaggaggaagtaagcctttttaaaagaacattttaaaaaatagaagctaaaattatagatgtaaaagcgatcactttcttctactttatttttcttggggggttgttaaataataagtccaagttttgtttgtcaaaacctcaccctttcatctgcaggggctttttacaaatggggccttgtacacccagcaatgacctgatctagaaagtcttagcttccttgggcatagccacttctcaagggcaggagccctgacaaggctcaactctctcgccctgagctcagcccctgccaagtcctacactttgaaggtctgttgacttcagttgaatgaagtgatttacaggaaactgcatgttatttagtgtgtcaaccttctctttgcctgcaattggggtgaagggtttaaaaatactgtcatattgagcaattaataaacttagtaggttctggtaaagaggaccaaggaccagtgtgagacatgacccacaggcagaaggaagtgcctcgtcaaagaagatgagctttattgtgtgtgaaatgagccagagtgttctcctgtaccattctcacattgctggggggtggggtgggtgggcactgtccttcacaagatgggaattggtgtattttaaacatacaaagagagaatgtttgaacttgaactgtagagaggtcagtttatgcaaccgtccattctccagggatgaggtgcttatgtgactttcatgaggtcacccaccgggaacagtatgtgcatgtgcccttgccctgcccaataactggcaaggcttaccaattatttatttgttagttagttagttagttctcatttaacagctaagtcacataaagtactcagttgccctgggattatttttgtaaatgtgcaccaaccatccttttacagaataactgatcccaagttacagaacttgactgaatagaacagtttccacacacatgaaactgcacggacagcagtcatggtttctagccagaagttgacagttctttgttattggtctcattagggatatgttaaaaatcgtggattaaaaccagagaccttaggaggcctgtagtgtcttagaaagagttgtaccttcctacagttgccccttggtgagctctcttagagttagaatcctaacttaataagggtgttagcccaatgtggtggctctagcattgacatgaagatatatccttgacttttaaaaaaatagttttttcccccctcaaagtcagtatctttacttcaaatgtgaggatcctgtctcactggtctagacttctacagaacctttctttgctcccagaatgactaatgcagaaaccgcttctactttgcactgagacaactggaagttgtggaggcaggaagaagagaagcgaccacctcctttcccgtctgccttatgcagatgtttaatttcaggctgctgatgaaatcaggaagactcatgttctgacactgtcagaagtggcaagtgaacaatgaagacagatgctatcttgctgtctctgagtgatggacaatatgacatacccatttcactgcaacttcaagatcttctgtaaccttttaaaagaaaatagcagaagttgctacttgtacccaagggatgggaaagttaatgaataggaagacagaatttacttagggaaacagtagaattaagctctggacaaagcatgcatcaatgatgcgtagcatctttcttaattgggtcttaacaggtttctgactcatgtggcaatgagtgtggaagtgggtcatactagaccatgccagaggcatatcctgcagctgtgagaactcttcttacctacttgagcatgggcacctgaatttctggggactggcttctgtagcttaatttaagtttcacatacactttagtggttaaacttgagctagactcagagagtttgtttccattaagaaaatgaatcttttatgtggaccaaggtcaggttagttaatttgtttgcttttattggaataacttttctcattccaattcatcacttaattttaagtgggtctactaaaatacccattaaagtcccttacatttcttacagactaggactgtgacaggttcatgagactttcccctgctaaatctcaagccatgaaaggtaccttttctggtcatcaaattattccttaatatccataatttccctacagtagggaaacttttttttagactaccattttgaattctaattagaaagagacaaaatgaagatttcacaagaaagactaattaaaatataaaactgggggctggagagatcactctgtcattaagaatgttgcctgcttttccagaggacccatgttcagttctcattacccatgtaggatggctcagaaccacctgtaactctagctttagagaacttaacacccatttctggcctctgtgagcaccaagacacacgtagctacacacacacacacacacacacacacacacacacacacacacatatataaataagaatgaaatttaaaatgtatatatttagaaatatatatgttatataagccagataaaatatgtaatatatatatgcatacatgtatgtaattgtatgtgtgtatatgtatgtatctctctctgtgtatgtatttatcacacacatacatacatatatatatgcttgcatgccagatggtagcaaagcatttcattctaaaagcaaacaaaaagcccatgaccttccttcttttctgctcacttcactctcttccttattcaagaatcttgtagcatctaaatgttgatgctgctagtagagtaactgtgatgctattgctctaattagcggtgacaaaagatcaattaatgttataattaaaaacagtgtctagataagtcgtttgtgatgaacaaatgcgacaattactttgttcattgacagggatgtgctgaacttcctccgtaggcttcaagctgatgcatttttatcgttgtacacatttaactgtgggcagtgggagcaaggcaagcatattagggaaggaatagagcccctaatgtctaagctggagccatattttaccatacttgacacctttccttggtctgtgatgctatatcagcaacttgtactcagtgggtctggagcctcaggcttttaatattttatcactaaatgcttaagtgtttatgctgcaaaaagaaaaggaaaaaaatattcccactcagactctcagatcacatgactaggcctgtgtggtaaccacgccattgatgagtttggttccatttatgatgatagtttttaaactgacagcacataatagtatgcggtttctttgcagatctggttgggccctcttctgatgcagagcgagcttgttttcaccccctgaatcttgggaacactctgcaactgttagaggaataaccgaatctctttcctgagtagttgccaagcagatgtagctttgtggagggtgcccagaaactaacttctgcagctgatatcgggtgaccttttcctccatttgactttactagcaagctttaagtagcagaagaacataattttgtgtcggtggatcaccatcttatacactttttaaaaagaaacagataaatttagataagcctattgatagaaatgaagtaaacctaattttctctctcagaatatccatgaagacgtgtccagcattgggtatatgattttagacagaagagaaagaaaggaagcaaggaaggagggaagaaagaaccctggaaagtcctctaagaagtttagtactagatgccaaataaggtccctgctactattaataacagcttacttctctattccatcccataaatggatcatgctgcaggcatccacctgatcagaaattggtttaattttacattattaattcactgtttcaacaacatcatgtttactattctctctgtaatagtaagtttggaaatgaagaaatatcaataatgccaatcccactaatgcctcaccaaaggaacatcttttgtatcaggctggaagtaagggtggtgtggagcaaacctcggatacctggatagcagctgagctcctgtgcctggggaaggtagtgtgtttgtgaatgaggaggaagctctggggaactcactgatttgattgtgtggctacctaaaaagacactagaatgcgttctactctcaggagcagttggaagaagaaaagtaacactgtagacgcaggtgttaaaatcttgcaacaaatgagatactagagaaggattactcaagttcagagctcggcggagtgggggtggggtagatgtcaggttttcctacacagtagtgagtcttttgtttcagagttcatactcttggcaggcaactccttaccagtgcttgatttcctgtggatctttcattcagcaacagaactagaggtgggagcagactttgttccctctctcaggctttcaggactgtcctttgtgtagatggagaagaaagaaaaaaaagttgctttttttccccaagcaagatgcccatgtgcacacgtgaagagccgtgtgtgctgaggtagcccttaccagccctcttctgaactttgaatttgtccttgtagagattttgaagccttctcttctgcctcagcagacgaactcctgtgcaacttgaatggatgtttctcaggtgtttgcctagagtgttttaaaaagctagttcatggaaggatagaaaggaaataatttgggcatagctggtatttatttgttctgagttggccttgtaagtgcaattcttagaatttaataaaagtgtgtatgtcatcttaactttaaaggactctcaaactggtgtcaatgagtgtatgaaaagccatgtatgtaagaaactctccgtatcctaaggatacacacatgtacactagcatgaggaagggacctcactggtcttgtttggttgtttttctaatgtcatgagcagtgcctggcatataacagctactcaataaatatttgcttcttggaaacaatgattataaacagacagcatcatataatggcaagagcattaagctagcattcaggagatccacagtcagcttccatctagcacagctactaataagtatttgagtggccagagtcattctgtttctttaaaaaaaaatgtttttgtttatttatatttttctgcttgtctgtctgtctgtgtgtgtgtctctccctctctctctctgtttttctctctctctctgtgttgccatacaccaccgaatgcatgtactgcttgtagacgtcagaggctaacttgcagaagctaatcatatccttctatcgtgtggatatggtcatagaacccaggcttgttgctaggtgcctttatcctctgacccatcttgctgacccttattttacttcattgcttctcgatttaaaataaatgggggggggcttgcttttgtttttgtgagtttttatagtaattacatgatatctaagtgatacagaagtgccttgggaactacagggtgctgttaaagtgtgtgtgtgtgtgtgtgtgtgtgtgtgtgtgtgtgtgtgtgcagaaaatcctttatctctttgcttctcaatttcttttcttaggaaaatcagattatttaaatcccattatgcacagctctcctctgttcctactaagcctctgtattccatgacctccagcgaatcaggaagaagtggtgagtcaggcctgtgagaaagcctgggcctgctgttctctcaagtccctgctacttcgggtgcctgtgaaaccctgagtgtggagccctgatggttgtttgcctggtggatgtaaatagaactctcagtgtcttaattatgagcattttaaagttctttgataactcaagtcttacttgttagtatagtaaatcgatacgcatgtactgatacagaaacaaatcaaaatcagtgtcctggaattggatatcaacattttaaaagaaagagtatatgtatgaatgtgtgtgtgtgtacatgtgtgtgaggaagtgcatatgagtgtgtgtgtgtgtgtgtgtgagagagagagagagagagagagagagagagacagagagacagagagagacagagagacagagagaagatgtgtgggtgtgtgtgattgtatgtatgttcgaaaacatgttccaaagcttgtctagaagggaacaagcagaaaagggcaggcagatagcatgatgttgaaaaacaacagcaaaaccaagagagttgttttccattttcaaagctcctcaaggtttatgtctattttctctccctgattatattgtgaattaggattcctaacttagtcttgagttgagtggtccctcttgtgaacagtacaccttactgttagaaagagatgtcccgatgaagactgtgggaagcagagacttcctagtctaactactttcatttgatttttgagagaactaagatccaactagcctgcaacagggaccctgtgaaagatcaggccccaacagtcagcattcctccagggtcagctttattaaaatgaaaaacaatattttaaatcaacttcaggaatcttaccaagattttgtttatgttgacctacccagcattacactagccaatggcaggttccagttagtaccaagtgctacccacatactgttcttagctggctatatccatggatcacagctttctaatctgtttataaaaatataatcatactcctctgattaaaatttgaaagaataccacagctaccacccttactgtgcctaggtggcttaggatacaggcttcttgttgagagagttgttcctcttaggcccagagagaacacagcctacaatatgcctccgttgtctctgcattctttctggaaacctgaccttccttctgtctgctctgtacagataggctaggcgaagttatgttaaacatgtactgaggcttgattcactgcactgcagcctggctttctctcttgattagctttaatcaaaccctccacattccatgaccttaataaagctgtttttcctgacaactgaaggcggtcttaacaagcacaggtcctctgtgttgaaaataaggctgagttaagatgggggcttaggtcctcattaaagtccacagcatggagtgcaggggaacgatgaagcggtgttcccgaagcatctcttctttaaatttaattagacaaattatacgcaaactagtagatgccctgggaatgcaatcaacattaaggctaataaaaagcttgaacaggccataaagactgggggaggggaggcaccatgcgacctctgacatgggcagtgagtgacagcatcggtcactaaaccctgacaccggatggatgccagtgtagatgttgtgatacgcttgtgagtgcagaaatatctatcatacttaatgtctcagcctttggcacgttagcacttctgcagggggcatttcatggatcttcctctcagtgataactatggccttgcagtggagttttgagagacctgggttcaaattctagcaagttgcctgttagatgtcttctttagtggtttatttgacccccgtaaaggaaagtttcatcgtctatccacagagagtaaattctcttcttggagagtctttatggaaatgatgtagacgtgtaaaggaagaatgtttggcacagtgttgggtgcttgacagtgctgtgcctgaacatcagaagtagggcctatgaaggaggaactccatctagctaacaaggtgcgtgtgtgtgtgtgtgtgtgtgtgtgtgtgtgtgttttgagttggtggtagcattgttttagttgtggttctgggattgaggtgagagtcttgagcaaaggaggctaaaggctgaactacacccccatcactgaactaaactacatccaggcctaagagctgttttaagtaagctggcttctaattgtgtgagagttgggttataaatgccaacattgtatcttgtagatggatatgactttaagggagaagactagaggactgaattgcaaactgttttgaaaaaaagggtgacttgactagacactacgttattgggagtttccgggtggcaaagtttgaaacatttattgtactctgcattaagcatcttgcctaccttcttgcttcatttaatattgataacagcacttctgtaggtactgttgggccaattttaaagggaaggaaaaagtttaaggagtattaagcaaattgtacttcaaggaatcagacttgcaatgcagggtctgccaggtttgggccaggctgagagaaaactagttcagatatgctcattgcttttccaagtttccaggttggtgtactctgtaaccctccctgctgggtcctttcatccctgaatgaattctaagtaacctttccttgtatcactttcccctatcaccctgctccatcctggctctcagcctcagttgctcatttagagtcagggtgtgtgaggacattagtaagtactgttaaagctccccagtgactgcagctgtgcagccagggcagaaagccctggtgggggagggcgggggagggggggagccagagtcccagcagtgattttgcagggttgattctgatccatttgcttgtttggaggaagaaacattgaaactggaacttttttttttcttttcagttgcggtagatgttttccactcattaattagctataaaaattaaatactttcttcctattagctccactctatgcttcagtttttaaaaatccatgttgaagaagaataaattgatgaaacaagaagggattccagcaacttccgccacagataacacacttttactagctttattgttattattattattaagaaattattttcaagtcggtcgtggtggtgcacgcctttaattccagcactcgggaggcagaggcaggtggatttctgagttcaaggccagcctggtctacaaagtgagttccaggacagccagagctacacagagaaaccctgtctcgaaaaaccaaaaaaaaaaaaaccaaaaaaaaaaaaaaaaaaaaaaaaagaaagaaagaaagaaaggaaggaaggaaaagaaaaaaaagaaattattttcaaaataaaatgtttgtagccgtatcctaaatggtgggatgcatctgtgttctcccaggcttgtgcctgggctctggctctccactcactccttaatgaacacgtggtcattttgaactcttttgagcctcagctacctaatctgtggagctgaagcaatttctaatgcactcgggtgctcaagagataaactgaaggggacaatattcaaagtatagcccagaagtcacctgtgtggtgcctgcagttggagccccgagactggtcaggcggtgagcctgcaatgactctctccgcggggtggtgtctcggagtggagctttgcagggacttctttctcctaagagatctctgggctcttaatgacctaggaggaggaaggggagaagttgggggaactgcactggaggctagtgtgtggtgaagatctcagccctcccttcctgtgagatttcccagtgttctctcctgtcttggtctgcgaagatggtgcctgttaatgaaggcggacagtcattggaaagggagcctgtccgtctttcctcctgccttcaggcacagctacatctaaattcctgtgaacacatgcatttccattcttcttgaaatgcctgtgtctgcatctaactattaagaagttcattctcacttccagttttgataagcatatttcttactcctgccatcttctgtggaggtagaaaattgctttctacagttaggaaattttacagaaaagaaaaaaaaaatcatccttctaatgggtggaattaacaggcctttttttttttttttttttactcagtagctgtttctgcagatccatgatctagtaaaaacctagacattaggttcctgggagctcaaatgatgcccactaagtggtgacaggaatatctgagcaggtaaatgccttgagactactcactactcactccacatctttatgtgactcaggccagcctggcagtgtggctgtgaggccgagataaatactgagaattgcccattgtacattaaaacaaacaaaccagcaagcataagcccctcctgtggacgtctctgcggctctgccctgaaggctctaaagtctgttacatactgatagctaagggaatgcaatcaagattctttactaatgcctacagaaaagaaaaaccaccctaagttgttaactggcctccaggatatatataggtaaatatcgagctgggttttatttgggatgagaggtttggtacaatttaatattctagaacaaacaggagaaaaattcatagtgcacttgaattgttccaagaccagggtgaaatgatgttgttttttacatgtagctcctgacggctttacattgtttccatagaggaaaacactatttaaagtagcctaggctaggggcgcagtgagagttgggtgtattcagattgctacactctttcttctgcagccctgagaaactttaaggcctcacctctggacattctggcacagttggggcaaaactagcaaggtaaacatgggacgaaaacccccactctctgttaagcacagacaggcaagatgcatttagaactagaagcgtcatcacacggtgcagagtagaagaactcttcactcgacagtaggtcatgtgaaaataacccatgtccattgaccgcaagattaataggggccggcagtgtggcattgccatgtcaaaagctaatgctgtgttgggctgtggtctgaccacaactgggatttttttttagtacccagttttgggtataaatgctaagatgaatgccaagagaaggaaaagccagatgcttctggaggaaacccatcttatatgagagtccgttgcagaattgctgaaagtcgcagaggggcgggttccttagtgcgatttcagggccaagggcgtcagggccgatgcacagtctctggttctctgtctttggagccttgagctcccatttaccagaggaaagaaaccacagaatgctgagtgtacccacagcacctaagcagacagcgtaaacttggtttctgacttattttcccaacacatctattcaccctcctaaatttcaaaataagaggctgttctcattcttctggctgtcctccaaatgagaaatggtccgtctttggtccgtttcccttaggggagaaagaaaagacattcgaagttatcacctgtgccctgtcttcagtttatttccaggagctctttacaaataacactcactagaacaacgcaactgtcaaacttgataatttctgaggagttctgagtagttagcattaagaagtgcgagaggcaaagaataccactcttacagcagagggaacacttttacatcctttcttgaggttgaggttaagttctgtgtgactcagcacattgacattctacgggaccctgagtctcttctgtttcctgatctacttgtcttgacctgtttcatttttcacaccaaaatactttcattagcacagcaatcatgcacaggagataatagcaagctgatataattatctggcctgtcagaggccatgggtttatttcatatgcaactgtctttcctggtgggatgatacactttctgctgacacaataggtgtgccaacatgctaaataatctgctgggtgatgttaaggtctctgtggcaaattcacctagagaggcagaatggtgagaccagtttcctgagttctagctcctaactggcaactgaccgaaggtctaactgttaagcggttaaaaccaagaaggaggcggttcactttggaaccctcgcaaggtctgttctggtctgttcttttcttgtgtgtgcttttggcatgcagatacatgggtttagtctttgcaagaaagttccttttgaaaaaggatttaaaaacacgaagtgctcaatccacagctaccgaacaactaaagtgactgcaatttcatttgagaaattatgctgcaaagaagaaaaaagttgtttattatggctcaaaattttaatcacccaagggctgaaaagttaaaaatagacaattctgccttctgtttatggtaaacttggccgagtcccggcaaatttcaaagctgaacatactgtatgttatttttgcttaattttagattccacattttaaaattatttcttacaagaagcatatttcaggatataaacttagactgaagaacagtattcttgatttctgcccatattgaatctcctttgaaaatagtaaactatgggtttaggattttcctgttcccaagagtccacatgggcacctttctaagtcttgtgcattatgaatgaacataggcatatgaattataaaggttattttctgctttctagttcctctctaactgtgagtttcttcaatcggtataacactgcacgtggtgtttgcactaaagtgcattagagaaaggacattcttcaaagtatgggcctgtagttttctggtaaagaggtaggaagacacttaacagacagatagctgtgtggcccataggcatgtctgtgcctgaaccaggacccatagagagatgctggattggtgcctccttgccatagcttgcaaactgtgcagtttctcatctgatacacacataggcagctgcagatccacttgtgggtgactggctcaagagcgagcaaaattcttgactgaaccctcttcattcctcttcagccaggaggaacacctggcattgccttttttataagactcttgttgcttcttgcccctgtgttcttctagaatactttttggggccatttctcagtaatatttttagaacaagacctttgtggtggcaagaaacctagggaggagattttaagaaatctattcgttaataagtgtgactcagaaccaaacatgccctggagaattgccggtgttcacaagtcagtgtagctaagtattcttgtgcgactaactcccaaaggttgagatttctggaatcactttgacaacctatttgtgatcaagttaataataactatatttgtagctcattgtattggtgcttttccaatccagctgactcctccatacatagtatttttgatattactaagaacccattgtgcaactaagaaagctaagccttctgagcttaggaacttttacagaataactggctgtagagcagccatgtccagtctggaggcagtggcagaaagttagcattgacagtattctcccatgttactgtggctggaagaagttgtgtttacagagggggtgctctcatgttgattaggtgctcaaacccatatttcaagagatatgctaccatactatggatagaacgcatttatgcattcaactcaagtacagttccttattttttttcctaatatgaagtgggctaattcactcaataaatattgtgtgaagatctgttatttgccaaagggatccttctagatttggagactatttattagacagtagattgtacatcaggctgtaggttactggttcttacaagtgtggggccagccttactgcacatcagcatccatgtacactctttagaaattcaaatctctggttcccagctcagacttgaaaagtgaagacctgggggaggcctgagtgaagtaagcccttcaatctaagtgattttactgtatgttaaggggtaagaaccactagcttagaagcctttatgcttttgtggcaggtaactctggaagacttagatttattccagggtgtgtgtgtctgtgtgcatgtatgtacacatgcaagcgcacgcacgtgcacacacacacacacacacacacacacgaatccatgggtctatctgctctaaagtctgacctcaggatagtatttagtgattggaagagctcagatgcatacatttgtggggcagagctacttggacatttttgtctgaggatacaggtgttgcagtcacaggaacctaaatttagattcttaacattgctagactctatccagatgaacttgtgacaactgctaaaccttccaagccttactttcttcactgtaaagactagattggtaacaatggaaccctgatttacactttcttctactctatagactctagccttctgcttaggatgcagaggtttgatggggtgtcttctttaagagatggggtagtgtttaattcacagctaggttcatcttcatcagaaactggaatgagaggactcagtatcaaggccctcctgatagcgctggtccctctttacccgctgtctaagtaaagtagtgttcttttcgatctttatctttgggctctttcaaattcccagaaagtttcattcaaccaagatctgtctgcagatattttattcttggaatacttgtggcattagtagtaaatctgagacaggcagatctctgtctgttttgtgccatttcagcactaagtcagggagaaagactctccaggaaattaatgcttccctccagcaccgtatgagctaacactctgccctataacatgatctcactttccccctctgaatttttgttctgctatttttatttcatttccctgagtggcttgaaccatcagtgcacatgcacataggaggtttctgtggggtctggccagtcatccaatcttttggaaagtacattacccactgggtgactagatggtcattcagaaatagattatgcaagtttaatcttcaaacgttcactgattcactaagcatattgcattgagtccttactatgttgccagacattgttctaggttctgaaggtacagagatgaagaaagaagcagcaaatgcatgccttcctaccacatcatccccaggaagctgaacgtgtagtaggtttgaacatcagccttcaaggataaattccttgcactgaaggagaaagctttttatacagtctatgtggatccttaaatgttgtgtatgatgttaagcttggcattgatgaaagctaccacactgcttttcttctctgtcagaccctggttcctagactgggttcgggaggttgtctagtgatttaatgcagctttttttccctctgtgtcattgtgagccatgaattttagtttcctgttgtaagaaattaacacaaacttaaaacaatggaaatgtgttctcttgtacctctggaggtaggaaacctcaaagccatctcactagattgagacctggtgatgtggggctggtgtcagggagcatccttcccaggccccttggtgcatccagatttacccaaccatttctgcaaagttnnnnnnnnnnnnnnnnnnnncaaacggacatcatggggtgtcgttatttagcagaccatacctggttagcatgagttctagtgagtttggactcagctacctaggatcttgtgtgtgcgcgtgtgtgtgtgtgtgtgtgtgggggggggggggctgagtttctcacattccataaagcccagcccagtagagataccttaagatccaactttgcagttcgggttgagactactcatgtagcataactacctgacaatgtccttaaatgattctggtttgtttcccaagactcagctgaaaaccttcctttcccagatttctttctggggcctcatggacttatctgatgcactcaatttttgattctatatttcctgttgtaaatgtcctcatcacctcttttcaagtgataaatctttccagagagaggctgcttctgtgggtgcagggagaatgcttgattcaaggtttcatgctggtgagtggaccctgtgttctctaaatgttgttgttgttgtttttctggatagttgtatgtgttttactccatttccctgaaaacatatttcctggaagttgaaactggagtgtggttcttctggggtccaggcatcctggcatcctggggcttgctcaagttgaatttcacattgtgcagacactgacagagctatgactcggacttactaggaaggctctttacaagtgaacaggagtatcataaatttaccacaaaccaggtaaatcccaaatgtttggagtcaaacagaataccttcacgaaacctaaaattctcaggatttatttgattcatcaaggaagatattctgtggtctgaaaacacttaggggtattgttatgaacagaattcttgtgtggagatattttgcgtgtgtctatgcctagacatgcactcgaaatcttttctgatcagtaatgtaaaatgatcaattttggcttttctgctcccagaataatttaccacctgttgtggaaatgcaccttgagccttcgatattttgtttaaactgctgtgggaacacacgttattttcatttggcttttaagtagttgtgctcttaataatactatgtgagttttcatggtcctagccacactgacatctgtgttctgaaatttcagttggattaagacactgccttggttcgagggttgaaaattggtgaaacgggagaacccagggttgtgtctgtgtatgttgcaattaatattgacaagtaggcagacgtccagcatcgtccgaggaagctgactaatgttcattaagcaccggtgcccgtgagcctgtgaggagcttcagctgcttgattagcaagagcaacacggagttcttgtgcgtttcggttttcattgcatactgaatgaatgaccagctgcacctcggtggcgtgggatagtgacggtagcaggcaccctgagacactgggtgtcctggtgtgcattaggcacttgtaaacccttatgaaatgagtgagggatcactgttgccaagcccttacaatgtctggacctgcatccccaggaacttcatccacatctccaccttttaccgtctaaccacaacaaactgctttttatcttttgatccctcctcaaaacctctgtatttttattcttctgcttcaaaggacactctcctaatatattggatgtggttaattcctactgtttttttttttttttacttagcacctggtgggagagtgttcagggggtgttatggtgggggtcttcttgaaggcctgctgtatgaactttgggaagctacaggaagttactaactgtgatacaaaattgatgtttctagacctttttggagagtgtgggttatcttcatcatttatatatgcatctcataattgtagtgcactttttatttggaaatggaaaaagcacagtttcccagtaacttggaaaagaaagtcagctgcaggttccctctgtgtatagaatacactgagctgaatctcaggtgaaggagctctctgggaaagttaccttccttccgtgtacattatcctacatttcctacttaggcaagaaataaaagggaggccccactgttccctttctaattgagtttaggaaggtatggctagatagtaggatatagtaggaagatgtggtagggtctcaggaaatagtttctgtggatgaaaaaggaggttccttcctctttttgccttctaacaatcacaaatcaacctctagtgtctcactgctgctctcttcctttgtggctggacgtgcttcacctcggtctccacttggcacttggtaaaactagattcatctggtacctggcttcttactggtataagctctgttatccatgggaaatgcttagaaaaatataaggcagaggaagggctagccagccaaattcataggcagcaaacaggttcactccgaaaccaacaaggtggtatggaagacagcaaaaactagccgaacctctgttatccttttcttgaagtaggctggaccaggttttcagtcttctggtgatgacaatttgatgctgggaggttacttaccttcccctctgtagctttcgaatatgtatagttgggggtgggaatgtactattaatttttagggtggtttggcagttagaaattattttacatatgcccagtctctacctgatgtagagtgtatgttagttatcattttatcattgctgcagtgatactgtcatagggtacagcagcttttaggcaaccactgaaggtcaggggcttctctggttcgatttagactcctccatacgtcttcaaaggaaaatttctctttccccttggggagaaattaacctacggtacaaagggagttgagagtctgcgctctgctttctgagtgtttcagagatggccagaagttgataccagtcactggaaagccactaggcaacatgaacgccatggtcagggtgatagaacatggggccttggcctgctcccagggctcagcctctgctccctgagcctctcatttcctaagtccctttctgtcctgagttctgcccctgttccctcgggcccagcacagcagaccaaagggctttcttggccatccagctgctttaggttcagtggaatccttcctgatcagtggggggttagtacagtggccctgcttgggttcagttagtgcaatggccttgtactaactggtcttgttgctccaagaaatgttagcaaagcagtgcctggaccttggactatgcttcatgtttgacctttggtggcatctttttgtgagccagcacacctggctaaatgtctttcaactccgaaattatgccgagtggaagtattttgaataaatgtaaacagagaaggaattttgcctgcaaactttagaattctcatctcacttggctgtagtaactgcttattacagtaggcttctttgtggttgatgataataaacaaggaatggatttccaacagaaatttcccccagtcttccctagggcatctgaagtgccttttttctcctgtgggctccagagtcatgggcagtgttgaacaattagcccagagggaagccctggaaacagttggtccctcaaggcttgggaagtcacaaaggctgtgctggcaagggggaggagggagggatgatgtgggggctgggggggggtactcagaggtagtgagaggggtgggggtgggttgtttcccagatagttttcaaagaacagaggttggtgtgctttgctgtgggccccgagaacagtgcaagtctgcttcaaattcttctttgtctttatctggtactttctctagcacattccttttggcttaacaaagtgtcttcctttcctgtttcatggtcattgataacaagagcttgaaggctttttgcttccaggctctgcatggagtggaaagaggaacacataggagggggacttgccatcttagagatgtttccccatttttatcacacaaggggaaagctgtccagtgtgcagagaggacccaggttttcattttagtctagggggtgattgattgcctttctttcaagggcctgatggaggaggtcagagtcttagaaagggaagaagccagggaaagggaaagaagaaagagtgagatttatggcctcctgcatcacggcttttatgtcgcataactattcccaacactggaagttcatgacacgctcgctgagaaacagctctggagtacagagcagtgatctgcatgcaaagaggaaattacacagtccagcctctgctctgcctgctgcagagagcacactcagcccgtgatggacacaggttccagtggctgctgggcatgagctggaccacccagcaccacttacactgtgcacagggtggctggcgatgctgtttataaagcattgtttcagcaaacagactttgctgttgctccttctgcatctgccctcttcactcccaatgtggaagccttgggcatctcatgccaaagaacactgcactaatagagcctctgcctccacccctacctttgataattgaagatcttttaaaatgtttttgtcttccattttttattccatatgggcccttaggtaacatgacccagtgtggccattaaatggccctgcttacagttggattgctgggtacaaagcaaatttatggttgtttattctctcctcctatcagctattagtgcctaatcatatggtctatcgatcatgagattaatcgcctgcccatagaggcagcgggtcttgtggaatgcttccctgcgccagaatgaacttcaaccttttatacaaactggaagagtcagaaccatcattcactgcctggagccccaggaggtaaatccctgcttctccaagcagtgttctcttcacttccttcccttgtgtaaaacttcaactcattgattcagacacacacagagcctttctgaggcaccctatacacaatgacataagctgcaaatacgtgggctttattacacgaggcccacagtctgcataattaaagatctctctgcactcctattataaattctcattttgcaagatttatagctgggcttttaaatttttctcaagctaagactttctaagagtgttatgatcagaggtctattttctttttttttttttatgaaatgtgtttctttgaagatataaaaagcaaactctagaaaccccgtcatagaggtgtcagcacacagaggttagccatgtaaagagtaggtactctgtaccctagagtggctttgctgacctttgtccctctgcagttatgagggccagaagccctgtggtgtcctgccgtgtctggatgtcctgctctgtctctataactccaaggaggaggaggctgggatcatacgccattgatcttttcccagccttgcttttacttagcctagctttctcagtgtgagtcctgagtttgttcagtgaatgaccctcagcagggactaggagacttgcttctttgtgttgacactgcccttgaaggcaagggtgtacacgtttaggtgacactctgcagtctctgaagacaagttccctgctaacaaaatgactatacattctgggctggtcactggtgttctgtgggttaaatgctactagaatagtgccttcaaatgtttgattggaacatgtcaatggagtttgccatgacctcactgctccctattagtcacagtgtcatcacagagtatcagcagcctgctttatctcacctacgccatcctcaagcacttatgatttcttccggtattttcctataacatgatccttggttactagggtttgaagtctgatatttgggctactaagtgatgcctctggctgttactttaaccctctgttccagtcctgttattctcaagaatctcagctattattattttttgtttcattttgtgttttgtggcccagataaacagcaatggatgattaatttgttttctccctttgaagtaaataagtatgtatagttgaatacactgagccattgtacagaaggtgaaatggttttgtgtgactagttggttgatagtttagcttgtgtgattgcttggtgggtcagtgtggaggtcctgtttgaggttttgatatgctaaaaatagctcccagatctttctgacttttcccacttgtggtgtttgtaggcttagcgtaaagtttactctttcacacgctgttggagtccttgtctgtctacacttgctccttcttatttcgcaacttcctttcactggtgctgtgctgcagcctcccgtacaacctgtctcttgctgtggtaagatgaagggaactctctcatgtgagtttactcagaagcctgatagctgtagtttccttctatagtcaagagcattttgaaggatttgctctaaaacagtggttctaaacctgcaggtcgtggccactttgaaggattgaatgaccctttcacgggggtcacctaagaccatcagagaacacagacatttacattaaaattcaaaatagtaccaaattacagttatgaagtagcaacaagaataattttatggctggggtcaccataacacgaggaactgttttattttaaagggccacagcattaggaaggcagagaagctctgctctaaaggacgggaagtcagtatgatacacgatcctctcttttggctcaactcaaatctattgaactcaggttacttgtgaatattttaacttgcacatttaaatgcatacatttaaacaaagcccattaaagatctgtactgtagaagtagtctgtgtataaactaccttttaattgaagcttgtcctatcatgcttaaataatacaaaagtaaaagcttttgaagatggcaggccagttggtccccatggttgcatgaatagtttgggctctggggttggactggcttacccagtctgtcagttatgaatatgttgagaatacctggcagaacccttgatgtccttgcctataaaatgggataatactttgttccgaggaataaatgaaaatgacttaaacagaggacatacaggccatggaataaataatgaatattcatcatcatttagctagaatttaatgaagctctatttctgagcttggaggcttttctttcctgaccatagccagttcaccataccttgggaaaactggtggtgcactgatgttagcatactgataccaaactaagtctggatcaacatggcacactatagcccagaatccctggactcaagcaatcctcctgcctcagtttatcaattagctgtgattatgagtgtgtcccactatgcccagtgagatttttcatttaaagagcatgaatgtatatctcatgaagacttcccatatttgctgagttacccatgtttccaggaggttctattgtggtactttcttatttgccatcaaaggtcccagatgtattgctttccatgtttctgaaaacatgctaagacctagatctaatataatgacatgactgtttctctaaagttttcttccctcagaccagtctcaaagtttcattgcagaaatctcatggaccatgctgccatcctctgttatttcatgctagtaaaagtatgaatgtgactgttggactggcaagatggatcggcagagataggcacttgctgccaagcctaatgaccctagttcaaccctctggtcctacatggtggaaggaaagaatagattctttaaagttccttaaaatagatttccttaaaatcctccaactgccacacatttgctatggcctgcctgtctgcacatgaagacacataaaacacatacacaataaataaataataagtgaataaattgaataattataactaaaattaaagtaacttcattatgaatcataacattagcaaaaactttaagcccccgaggaaccagagctggaaagattctgagatgtcacctggtccaagtcccattttacaaataaaaaacatgcctttggccagaaaaaaaaaagatcagatttgaatagagctaacctgtaggcttttaaatttcgtgctcaatggaatctctactcagctgctctgttatgattttgctccttttgcaggacttgtatgtatttattagagaccgtcgagatgtagcactgggcattacttttgtggcaaaagctctgaaactataatcattattaatggattccattatttgggagagcgttttagggactacagaggattcattgcattgatctattgtgccacgtttgtattataccaggtagtttaaaatgatattctcttaaccgttaggctaaaacattgtccactgttggcagttatcccatcatgagaccgtcctttttgccactgaaaatacatagttctgctgaaaggagccttttgaccggtccccagtgccttgaatgtgtttaaatccctcactactaaaatggggggattacggctgctatcattgttctaaaacaaacttccctttggacgataacagcagcggtaaatcagatgttgaagaaagtaccagcttaacttcagtttgctttaaaagggtttcctctttaattgacaagtgtcatgtataatagagcacggtagctcacatagaaaaccctgggctgggctgcctgctggggctgcagttcttaatgaacgtacaagtgaatacacggaggcaaaaatttaaagctccccaactggggagcattcaccccgttcaccatggtcagcctggtgatcagccacactgatcccgctgggacttgtcttgggcatgtggcttgtgtggctttcagcgctggtgactggtatctctcctggtggtatttggaaagatagactagattctgatgtcaaaggaataggcaaacgagattgttttggttttctttaaaaaataaaataaatgcactaagctcgttgagactcacatagttgctttgcatcatggtggttttcatgggctctgggcgacttgctaatatccctacgttccctcacattgttgtcctttcttgcctttcctctgcttcccaaaagagaacacaactggattttacaggtgatgtttacagccatccaagacacttgaataagcacttagaatactgccaatagaggcaggggaaagggcatattattatcaaattaagtaatggctgggcagtgatattttatttattaaagcatgtctgagtagaatggactctggttctgaagagcacagatttgagaggaatgttgagtttggaaacgtggcagcccacagccctgtgtatggtttaaattaaacctttttttggaaagcagaatagcttgaggccacatttaaggggaacgctgcagcagagtgggccggctgtggtttttctttcactctgtcagcggcccactttcccttgttttaacacagaaaaaagactttggactccttcagaccaaccacatagcctctctgctgaccacaaaaaggaagcttggtgaagaagccataggattaatacccactgtctcttaacccagccgagggtgaaactctgtaagagatttctctggtcacgctgacactgtggttggactttaaacattttaaatcaagcacaactttgaattacattatgccacagtgctctgtaaattgttctctgagataccatgttaaaagttatttacacgaatccccaggtttcagaggaataaaccgctaacagctttgtgtatcttacagagaaataaaaggaaaattaaagatgtgtctgtgacagattagctcagctgaggcaggggaatcactggccataagagctgatctttcttaagcaatgagactacaggctcatgacagaaaagccttcttgtcttccagagtagtaagattaagagtgtgggttctgctaatcacttaccagctttattaattagccacattattattattattattattattattattattattattattattaattattactgtggtggtggtggtagtagtggtggtggtgtgcccaccacagaattctgggcaagcctactactcctgagcaacacccttaagcccaaccacatttctagttttcaactagaaaaatatggtttttttgttttgttttttaatagaaactcacgtttctttaaaaactgtttgcactgcagagagttctacttaacatactggtctactcagatgtgagaaatagttgcctctgtgtcttgaacattaattttaacgattggaatcttataaccctgattacctaatcatttatttgcacaaagaagttctgaaattgctcaaagaaacaaacaacctaaatccccatgcattggcttttgtatttactacaaactgcctgctttggattaatatattttgaaagaaatacttggaatttatattttgtccagctcaaataatcagcttttcacaagtgtactagatctgcattctggtttctgtttagcaaagaatcttaattcatttgagaagttgtagaaagaaaatccctatacaggtttcaaagcttccagtaaccatagggttaatctctggttgccctgtagtgagggcttcattagagaaatgggtctgtataagacttcgtgtgtatgaagaagtacagttgtcttcctgcctgcacatcccagcactgtttaaatactttgcctgtgagctgcccatttattgtggtttatttgcccaggtgtcttcagagcatcttgttctgtgcctgcctgaacttactagccacccggaagtagttgccttgtgtctgatctttctcatcttgctagaattatactgtaactaattgaatccattgctcactgtcttgtttttcttccccatcttcctctcagaggaatcatgtcaggaccctatatgctctagtcaagaaaatggcaaccgacttaccaagactggcattaaaggtaaccctaacccagaaagatgctttcaaggacaaaacattgtaagcattcttacatgtgagaattaactacttaattgggtcatggtggaagccaaatcaaagtgtgatgttgagcatactttgaaagttgaaacttgcaagttgatggcatcctttccaggctcaccttggaatcaggggtctgccagctgcaggtcgttccctctgtacacttctctctggcttgtaacaccccagcacctcagctttctaatctttgaagtggagaagttgattatctctttgttctgcctatctcaatgggttgttaagggaataaaaccaggcaaggtagatgaaatcctaaaatgctgtgaaagtacatggcagccaggatcttggtagatgacagtatttctcagatgccttcatcaaatcagcatgagctactctggattgggaagtgtcccatgctgggagggagagagagcatctagaatccctcttcctggtagaggatttatatttttgaccaaatcattaggaccctttgtttccctcttgtctcatctctgaggtgacctcaggtagcagttctcaccgtgtcatggcaaaagcagcacagctctggcatttggaaatcttctggagatgcgtgtcccaagccccttcccgggtatggaagggcaatggtagggaggtggctcccagcactgtgctttgtaaagagagtttgtgggattctgaattaagctctatttccagactcaggctgcagtgccatacaacttacaactaggatatttatgccttgtttctgcctgcttcaccagggctgtgcccagttccatgatctggagactcttcccagtgcacaagacctcagagagggcagccaagcattcttttggtgtgtcacaccgggtgtgtggcccagagagctgagtttgcaggggggagcagagacttccttctatgccccagtacaggggaatgccagggccaagaagtgggagtgggtgggttggggagcagggtggggggagggtatagggaacttttgggatagcatttgaaatgtaaataaagaaaatatctaataaaaaaaagacttccttttctgaaccttagggccacactctccttggccaagtatttctggtgtgtctcagctttggggccctgcacaaactctccagatgcgggagcttcgccgccatcttcctcatcaaccccctgtttcctggcggctgcaccagctcacattccttggagttttcaaatgccttcacagactatcaaaatctatttccatctgtggagatgggggctgaggaagtaaaatgcacatatccccttgcaaatacacttcatgagtcacaattttgtttttacattcagaagtatatctaaacacgagtgtgtgtgtgtgtgtatatgtgtatgtgtgtgtgtatgtgtgtatgtgtatatgtatatgtgtgtgtatatatatattgagggccaatttctacttgtctgaataaatttagaaaaagtgcaagcatagtcttcatgcacagggtagacccttgaagtctataatcttttctgttctagatagaactctgaatttttatcccagagtcgcaaatagccagagcagacagttatctcagtctggaaaatagaaagatatgagatgtgtgatctgatagctgacagcagtggcacttgaacacacggtgagagcagctgaggtttgatcatagcttgagaatctatagataggtagttagatcatatatgtgtgtatatttgtatatattttgttcataagtccgatacacttaaattcctcaagagtttgagtgcttactgcactgggacactttgatagtattttgtgttcttagtgatatgacaggaaaaaagattaaattacatttctgcagaccagaatattagtaacaaaattacagatttctctccaaaatgtaaaaaaataagtcattaaagcggtaaatgtaaacagctttgcaaatttataatcatagagttctgcatttgctagagcccttctaaaggattttacctagcattccatatcatctgtaaacaggagtgtcttcttcagaaccatgttcatggaaggctgtatgtgttacaaaggtccagaggccctggatatctgtgagtttggggcttcctgttttttttgttttttgttttttgttttttgttttttttttttctcccagagaaagtcgagtgggaagtctctggaagccttgttttctgcagcctctgatgcactcatgtctggagcctgagactagtttctggagtaaacggaggactccagggttccacgcttcctggaacaagacctggaacagtctgtgaggacagttcagaaatctcccaggagattttgggtggttcaactcttcatggttttcaaatacaaagagttgacctaggtgttctgaaatcttctgtggccactcaggtgagatggctgtatccctagggttctggaaattaatccagcacaggtcccagagtcactgacaatgtcctaaggtagcacaaaagatggtggtggaaaatcattcagttactgtctactgcccactgcaaggaaaaacagctcttacaagcaggcactatttagggtgggccatcttgttagccagtagggctgtattaggtgtctgtagtgtctgctgccacagcagaatatagtagcacttctcattcgcccccctcccctgacacaatccataactctcttaacctttattattttttttgcatgatgtctagtgtttgcaaatggcaaatggctggagaaaaacagagtgaaagtttatataaaatatttataccctaaagatcttttatctagtgtcattcaaaagatagagaagtgaaaaatgtattgcgagtacattatcaagagtacattataaatttaaatctcagattgaataataccagctgctaatgtgtggagctttggaaatgagtcacttttgaatctcaagaatttactgcatcaggtcagttacacttaagaaggaagtgcctttacaaaaaaaaaaatcctataccggaatccagacttacattagtaggcattaaaaatcaaatatttgtcctaatatttatgttaggatgcagttacatagaaatgagatgtaggatctgagatactttatgaaaagtttctcaaaaatatcaggtacttttgctcatatgcaaagaatatatatgtgattaagatttgcgtgtttataatcatagagtcaagttatgtgactattgctatgcagatttagctctgttcttttccccaatagttaattatttatttattggggtgggggaatagaacccaaagtcctttaaatgtcagacaagcattctctactgagctgaaatatattatttttaaaaccaagaactaccagttggtttttaagaggtcatttaagagggtgtcatagtattgataaggcatttatatagcatattgactagatttccagtcacaatgactagtgtttactataattattatctttttgatattatcctacgcccccactatacttatatctttctttggtggcatggtgccttccttctctttgtaggtagggtttggaggcaaaaccagaatcagtgtgccagttgaaaagccaatagtcagagaaaggaaatagatctctatgtgcagacatggctatatttgctggatatttggattcctttgcgcaaaaccaaaaatattttgttggatacagtgatgccttgttttctgtgatgctcagtatgtatttctaaaatacttatttatattttatgtagatgagtgttgtttgcatgtgtgagtgtataccacatgcatgactggtttctgaggatgccaaaggagaagaacaagtttcctggaactagagtttcagggggttgtaagccaccacgtgggtgcttggaaccaaacacggatcctctgtgaggacatgggtatggggagcccttgtcctagtgctgatgctactgttgggtgtttggtgttctctattagtgctgtgtgaaaattctaggcacagtgttcctagtttctttgccctgaagaatctagaaataagaattttatgagaattatacaatgttttaatgctttaagtgattgcagctgtgtcttgagaatactgctggctacaagaaacagaaaaatcttcgtttatcagtagtttaaacaatgaattattttttcttgtgtaacagtgaatctgaaggttagtcattgttgctttatttgctctgctctgtcaggaatccagacaattttctaatttttatgtcctaacattcctttctccttgattaaaagcaccccaaacacttgtgtcattgtatggctgccaccgtaactccatggcaggatggcagagcaatggctgaaccagcttcacttgctccatttatcatgaagtgaagacttctccagaaactacacagtagatgccacttcatcttgggccattctggctagaatgcttttgcagtttctgtaagggaagttggacagtgactatctagcttctagcctctctggtggaggcagtgataaaggtgcaaatggctgttacactgtagttgagcagtgtctggtgacattgcaactaattgaatgcgaaagtcagctccagcacccaaagagcggcagcctccaggacatacccaagcccccctccagattttgttattataaagaaaaatattattggggtgtgaaaggagagaagcaatcggagcattatttttaggctaaattattttgcattatatagaatttgttctttcccaaatgaacaagtttaaaggaaagtcatgtaaatatattccttggaaacttatttacagttttagtagagaaattacggaggaaaaagcatttgatgtcttctgttttgctgttacatctgaatttccttaaacatactttttttttaaaccatggataagcttcatttttctttaactatttcatcctaaaataaatatatatatttagattctaaatggcatgtgattttataacctctattggaaggatttcttgtctgtatttagctgaacatttcactcaaacacggagaagttctcccgagatgctttacaaaagtggccattttaagctgattagaaccgtacttctaggcatggctgtagttggaatgctatgaaacaagtgtatacttagctaattaaactcgacagctatggaatttgaagaactcttaatcacagccaggactgcactaaagggaaaccatacctgtttgactggagtactcctacttgcacgtaatatttctgtttacacctttctgccacttatgttgagttagctgttctttaatgcccttgacaaactcaggaagtcaccaagtgtagataaattgaaagaatatattcctcaaatttgatcttgattacttcttctcagggctataaatttgtgttatcatgacctgaatgttaataaaacttgaactccaggtcacctttagggttggtccccatacaccagcgtgtcaagtgtagagtctgtgagttggctgtttggtgagtgcacttcacaatggacacagtatataatcacatggtaggctcaactagttagtaaaggttctggtgatactgggatgatagaatagtcaaaatagagaggaaaaggcaaacatgtttatcagatccaagcttaggcaatgcttttagaactatataatggggtaaatatgtgaaaagaagcccactataccaagcagtctactcaggataacagtgaagagcaagtacagaaccgtcttcagacctaacttatggtagaattgtaatcacttatttggtgtttggtgaggcataatttatagacaaggaagaaaactaaagtacagggatgtacttgcatgggaaatacttgtttttccatctactctagtatatatactgatcaataaagcactatgcttagtgtatcaacactgtctctagtcttcataatgatatataaactaggccctgatgcccaatttcttgggtctttgtgccaagtgcctttctaaagttgctaattgtacactttagagttgagatttgaatactgccccgtctgtgttccatactcatttcctctccaccagaaggtccacccacactgaacaattgagaagaaaactagcagatggacttacatgtgggtaactgtatgtatgatagtgtacttatcaaaggaacaatgctttaggatatgggcttgtgctgttaattatacctggtgaaagaaactttagcatccctctatagactgtgccgacacatggatgctggctagtccctgaagacagtccatccaggagtattcattgagctcttactttgctggcactagaaagataatgctcatgtacttgaaaacttatttcttttcccacatgacttttctaatgttctgtagtaagggaagtgctctgagaaatgtctttcagcaatacatcaatctgtatgtggaaggctaggtaagtgtgctcatttctcatcaaggactgacctggagttagaagtcaggttttaggatacgcttgctttcctccaaaggaggcattttctttgtagagtcattatgatattttgtagctattaaaatttgctatcttcatgattggctgtgcactgaacgggatgaaatatttattaaggtcatatcactgttatgtacaaaggagcacagaatgatgtttatgctctgcttctgggcagtgtttctgctggtgcatctatgtctgtagatgttattgattataattaagccagtctacattgtctcttggaatttacatgagtttaaaaatcaatccctcacatattaatttggaattgtttgaaaggatcttagtctaatgatcaacttttcaactattaatcctgctgttgtttttttttttttttgagtccaaagcatgtgatgtctcatcaaaacatttgtagtgcttagatgttatgatctgtttagttttctttggttttattctatcaccaaacttttgaaagactgttatagttatcctttgtccagtagatgtctgagtatgccttgttcaaatcatgaagactatttcaattccctatcagattctctctgcatttgtacatttcctgtacacttcataaggttatgaggctctgtgctgtttggcatctcacatacacttgatggattggatggggatcactggggggcaagaggtctgactttgagcacagtactaaggaatgctgtcagagctttataagagatttctgttactttctctttttttcttttttttattaggtattttcttcatttacatttccagtgctatcccaaaagtcccccataccctcccccacccactcccgacccacccactcccacttcttggccctggcattcccctatactgaggcatatagtttgcacgaccagtgggcctctctttccactgatggccgactaggccatcttttgatacatatgcagctagagacacgagctccagggggtactggttagttcatattattgttccacctatagggttgcagaccccttcagctccttgggtactttctctagctcctccattttctgttactttatttgcactttatttgaagcagaattgataaacatatttatagtaaatattggggcactaacaatcatgcaggcttgtgaagctgatccatacaaacaaagaaaagaagcatttaataagcactgtgaaatccagtagtgaggtcctgaagagccagtgctctgtgcaagcctgagactgatttatatttatgctgtttctctcgggaactgatttcaggggcatcgattatacttctgcccaagtggactgcctcggtgtgtacatgtatactctaggtgtgaattaagaaatcaaactgaaaaggtaatagttctgatatggaaaatcctgcagtaaagtgcccttttatttcagtgatggagaaataaagtgagtgttatttaaacatgaactcatgctaaatacacagccatctgagcctttatttagaatagatttatttcctcaaacaagagacttgtggagattatgggcagcaacatgttcttaggaccttgattcttgaagatgttcagtaaacagttctcacaagtagcactatgtctggaaaaccctgcaccactccacgcttcctgggcggaggttatgtgtcttctaaggttaagttttgaaaacttactcgtgaccattgtggagctttcaacatggagtagaggtctggttttttttttggttgtgtgtgtaattatgaatcactgttgaatattttccattcaccaacttatcagtattttctttttcacaacaagactggcttcctttgctcacggaaagtccccagtttgtttagaacacagactatcttatcacaattctggtggagagaagatgcagctacataaaacagagaaagctgagcagggttaactcccaatatcaggcctctatttgtgggaagcccaagtgcacaaataacttgttaaacttctccctggctctggttaaagggatctttacttgtaaagtttagctggttcctccctaaagtcctccccaccaaattaataatttcaggagatcttaaaagcttttagaagacaatctaaatccccactccagctactacaaactaaaaaacaacacagaagacctgctgcttgatctctttagttgtgcaataagcacacactagaggattctaaatatttagtgtcccctcagctcccagtgttcttagctttagttaaatagggtctctgagaccctattcttaccccctcctgcagcctccctccaggagtgctcctccttactgccacccccatttctctctggagaattcatttgtacttcagcctgtattgtaacagccagctcttcctgatgtttctgtgggctcaactgaatgtgagaagggctccaccatttctgtctggttgggctctgtagtcctctgccttgtattccaggtgagctccattcctgtagctgttgcgatggcaaagaacaaagcaacctaagggagaaagagtttgttctggctcacagctccttagttccatttgctgtgacactgtgaacttggcctttctcgctctctaggatttgggtgtttgtcctgcctgtctcttggaaggcatggtcacaaatgacgtagatagccaatctgaactgtgcagagaacctgtacacagtctggtggagtcctcatctggacccatagagctatcttggagaactcattcacacagtctctagtactatcaactgtcattctcattgggtattcaaaggcacctctgacccaaaagaagttgagtgatctccctaaaggcttgattaagtggaggtacattgcttgacgagttcagagttcatggcggttcagaatcatttgcctggtggggaggaggagagacagctgtgaacgtaggcgtagaggaaagcctaggttagactcctggctgctgtggtgcacctgggcaagttatagccaaggctgatgttgtaagattgggccagaaacttacattgctagtaaaggcctaggcaggcacccagtattagtcatttcccagcactgcagatattgtaaggttttgagatgttaaggattagtgcgcttttgcctctgggtaaagtctttctccactgatccttctgataactacaggatgcgtgcaccacatatttctttctggcaaaactcttcttcatggctgtggtaggaaccttaggagatggtctgcaacgagcaaatattactctcactgccgccttgatgggtggatactcgtcacaaggctgacctagcctcatggatggagcactggcaaaggtgtcagggtttgccgagcctttaaaggaacagactttcttttattaataagacagtgacaggtctcttagtttgtttaagagagaggacgggagagagagattgtttcctcaatagaaaaggacgggagcttatagaagacggtgtccatgctactttatgtgcttctgcctatggtcaaacgggaatgatgtgcacgctgctctccactggcatgcacactcaaacgcttggctgtttggtctcatagctgttgatgctggaaccatggaatatttgcttactcctccactttctctcattcatggtcttttataaaattctaattattatattctcggaaacataaattaaaaaaaaactagagaaattttaaaatgctaaaattattccagactaaaacgtataggatggtactgtttacccatctacttgaattaagaggccaagcaaatggaaatgtgatctatttaagaaatcatttcctcaggcaagaagcatatttcctatataccttgtagctggacaacattccttgcatttgtattttgagaataagctgaagatattttgaaagtaaccaagcagcttagtaacttcttagacttagccaagaagtgcaaagatctataaatgctatctgtaatgcaagcagattgaattattcaagtcccaagtctggtagaacacagagtggacaaacagggagaaattccttgtttagggcgggctttgagtctatcttctttaaggaatggctgaatactgctgatagatgtgagaacgatcacgagactttgccacctatggctaccgtgtctgtcgtgctgtgcttgtcatgtgcttctggaaggtggctcattttgttagggggaaagagagtactggaataggcttgtacacttaattctgatttgctcttcaaactgcttgtaagagagacaggaacatttggcctatggaaaagggtgggatttcctctgagccccattggcattctcaaagaccaatatagagagtaatttcagtgtatctaccttaagagttttgccactgaacatagaaaggaatttcagtgatgtttcccaactggggataaatgccagggaagaatccatagagctctgaggacttcaacctccaggggaagaaagcagtgatttatggatctctctagaaattatggttgggttctttccactctcaacctagtcttccttagtcatgtgaccagaattcaattatctctgccataaataatcttgtgaatggaagcagtgtgtttggcagtgaatttctgtctcctaaagagaaaggaataacgttagacgttattaaaaataatactgtatgaacctctattccaaatacaagtggccgcaagagtgtggctcatctctacagaaggtagctttaaatgaatttggtacatgctagtgacagattgcataaaggttggtaatactttttgaaatacgtgttttgaacaggctgtatttagaagtttatttatgattggtttgaggataaagccagcctgttggtgcataacagagttgatctggctctgactaacatccttgaaatatttaatgagaatctggtttgagcatttgtagtctcctgggcactgtggagataagggcacccattctttaaataccagtagcctttgttttcctaccttgctccatgttccatgttctagactagggaagatcagcattttatagtcaaaggctgtgtgtcttgaaaatagccattttgctacctatcctcagccagtaacaatttatgtctagaagatggcagagagtgctgatttaagtcattttataaccagtgtcctttactgggagtgagtagctctgtaaattgtttcaagaatcggagcgtttttcttggttattaaaacttgaccatccatctacacagggctcattcaactgagaaagttttattggacccaaaaaataataatcctttatattcgtatagtatttgcagttttcaaagggactcttcacatccattttctcgtttgatttttctgacaacaccatgtaatagagagaataggtactgttacctccaaatgagagatgagggacctgtagcccaagtgcctgtaaatcctgttcaaggcttcacagctactaaatgacagaggccagagcccctgaggtttgatgctggcccagagcttttgttgctcatttaggaaagaagctgttggttcaggaaaaggaagctaaaggacagctgagagggaggtgtgctggcctcctgtactccttacccaccacgagtgtgatggggcaagatcttgactccacgcctgcgatttctcttcttttctctgaccacaacaggttttgtggcaaagatgacacacagacaagttgtatgggaattctttggaaggtgcacatttacaaatgaatggaagtttcagtctgtatattttccccagagtagagggcctttgttctcctatagagacctgaaatctacccacaggagaggagagcaaggatccattttattcattcccaggctgtcccttaccactcactctttctgattgcccttcatttccttcctcttacctttctgagctgggtgtcatgatgttccaaagaggatgtcagagtcatagccagataacccagccatgtcactttctgactgttcagtttggggcaggcagctcttttttcaggcttggtttcctttctctgaagctggtctaaagatggtaccttagggaattggtgaagttgacacatgaatttcatgacatagcaaccagttctcggtgcattctcagtaaagtattctgtattagggatgagccagcagagacaggaatcaggccagagctgatgagagcactggatttggtctcagcctgaggcactgctattgcattattgctctgcttccatccatcttgactctcttcccctcacgtgtgagagctaaaagaagagttgagttacgaggtgagggcattttgcagatggagaggcaatagctaaatgtagtaacagaaaccctgccctgggtctgttcccagccttccctggtggttgtgaaacacatgcaccctcagcaggccagggtagcatgcaaagctgttgtgaaggcctttcccacacaccactacctgccctgaaagccttgtgtgtgctgacgcttcacaaagcagatggtttcttttgctttccacgtggttttgaaatgaaatggacttttgatgaaataggttggggaattccacatccaattatgaatcggtgaaaggagcagagagagggtgtactatagagtttagaagaattcgatgctcctgtttcatccagcattgggttagggagggaagacttgaataagtgaatctgctcctcaggggtccaaaaccagccaccagcccagaatgtgatgttcactttagaaacctgagaaaaacagaagcggccttcctgttgtcgtgataccatacagtgaaatggaagagcagaaagggactggctggtgatggagctcagtggtagagcactttctaggtgctacccagttatgttctcagcaatggagaaaacaaaacaataaggtttcaaaaaaaaaaaaagaaggaagaaagaaagaaagaaagaaagaaagaaagaaagaaagaaagaaagaaaagaaaagaaaaaagaaaccaaaagcaaacagaaaacaaaagtcaaaccaaccaacaaacaaaaaaacaaaaacccagcaatccccaaaagagcaataataacaaaaaccacctaccaataagcagataaatcagggaccagaaattcaggggagtctggttcttagagcaggatggagaactgagatcttggcttttgctagaccacacgccctgaagctaaagtcatgttttaggttgtgacagctgagatccatgagtaaacttttgacaggacccaaccagacatgattcagtctttgagaacgttgtggcatgcggtggggaggaccctctgcagctctgcagctgcactgtgttattggtgtgtggcctccttcccagctccagttaaatgacttaaaaaacacactgtaaattttatcacattacagaaccaatcaccaaacattatctgtagttgctttttaaactgagattacttggttctggagtttattatgattttaagattttgagaggcatagtagggtaagtggggggatatcattagagccgactcttaggggacagcaccggctactcatgactcttgtaaaccctggggacctgctattcttcccttatttcctgaacaactacaaagcaaaacacaaaaacaaaacactaaccctgcagcacaggaaggaataatgtgggaggcggggcttgtgcgtttgctagccatgggttctagtctacctgagtgatgtcagagaggatcacatgttgttggccatcttctgtacctgcttcggccgcctcttcctttatagttacttcactagtcattttctcacttagtcattcagcattttgacactcatgtgtgttaagttctgtattagtcatatttccgctattgagaagcccacagtccaatggagagggaaaaaaaatgacagtcaccagctgatttctgacagaattaaaagcacagtttaaaacctaacttagttgtttttctttttatttgtttttgtgtgtgtagtatatgtgtgtatacatgaacatgtggatatgcctcacttgtgtgtgtatgtattccctctagggttttggggggggggggagcataggtaaatgtcaggtgttttccttaattgctatctatatccacctttgtttttgaagaagagtctctgactgaacccagagcttgtgggttgactagactggctggctactgagctccaggaatcctgtctctgtggtctcagtgctgaggtaacaggcaggccctacccaagttttccatgggtactagagattccaaaccaggtcctgaatgagctatctctctagtccttaagttgtactagtcttagatgtcaatacacaagtgggaatctagtgtcaaaggcttggctggaatggaagtggatagagggtctggcctatgtagcacacagcaaggcagctgtgcctcaggctacatttactgaagagggaggccagaatccacacagaaaaatctcagccagggctatgtcagcacaactgaaatgtgtgttcattttctcttcattataaattttaccatttttgttttgtaaaacatttttttaaattgaatattgacctttataggatgaagagaggcaagtatcaattagtaaatggaaaaggacatttttttttttaccccagggtactccacatatctaagagatgttagttttatagcttctcatgttatattcattcttcatttgtcagaacaaaaacttgtctatcctttgtaagaaactctaacaatccttggggatatataaactggaatgtacttctgtgaactcacaacaaacagcatcataataatgtaagggttgtgtacctgtcgatgttctgatgatatctcaaataaatagtaggcaaataaatggtaggcaaatatctcgatgttaccataaatgctcgaacactattttgcatagtgcttatagtaagagagagaaattaaattagttggcatatcatgtagtgtatatatctatatctatgtctatatatatatatcctctttttaagatatcccgactcccctgagccactgtgaatgaagaggggctttgataaaccatctcagcactggccccgtaaggccttgacatttgcaaactttattatttttttttgtcttttgtcccatgcagcagccactcttgcaaatcaaccttgggaagttagcattatcttaatgaagatctataggagactttatcttcagacagtaaatcagctctctaggcgccattcatctcttccttcagtatgagctggtgtaccgcacctcaccaaagctcatctatcttctgtgggtccatggttatttgctctgcccacgtctcctagatcatcaagcaggcagggatgctttaaaagtcacgaaggtcagctgagatgccgagtgttgcccattacttgagaggtggtgctccatcacaaaaaagagggatgcacaagagcacctggattaggcctggttactcagaggctgaaagagacaaaacagtgagcaacaaaataaaaatgttgagaattttgaagtcttaggaataatttccttactatctggggaaattatgctggctttctttcagcttcacagttaattctacactctgttttatatgctaggtgctttttacaaatggcatatcatttcccatggtcctatcatggtataggtgctgtcattccccatgctcataggaggggctgacaatcactaaggaggcttaagtaacctcctgaaggataatggccacaggctggactcgagggtcaagggcacctgtctccagcaattcgtttgggagcatgggtatgcttcagtcttcttggaattgtccacttgttgggaagatcaataggagccatgcacatagaacactgcagagaagttactcttggcagtgggccccaaaccatgtcttcaatgtgtttcaaaacagtccttgttcatcaatttatattccttcccgagtggattccatgacaaaggtttgggtctacatagtttatttgggaagtgaccccaggaagtatagaattgggggcaggacaggaagtctttataagcaaataaagctggtaccagctgtgttcaggccagttcaatcctgatggatgctaaatatacctgtgattattgctctgagaagtagagcttagctcctgagcatgccactctgcatccctagactccccatacggcagaagacctaaggagcaaagattggctatttatgcctgaggtaggaacacaagtacattccagcctcagtgacctccacggtgccaagagcagagcctgcggggaagagcactggcatttgctaccatgtttgttctgaagccagtacccattctggctgggatgtgtctaggctgggatccagccttgggagtggtagctgtattattcaagcaaggcccaatggacacatggaagttggagctagctaggatggaaagatggggttttcaaaccacgaaatggatggaaagatggggttttcaaaccacgaaatgggcctccttgccagttcttcaccctcagctgatgggtaaactcctagacttctataggtctcagttttcttatctccagagtggatgtagcaatcccacaagactgacgggcttcatccttcagaaagctgtagcacagtagaaccatttgcagccagtgctttgtgcaggtgggaggtcaggaattattaggatatggtggagcagcattttattttacaagaagtgtcagaagagtattgtcatgatagccgaggagtcctgtatactttgagggtcaagggcaagagaggtcacatttagtcatggctccttttcacttaatttttggcctgtagtacttggtgcccctgtgaaccaccaggaaaggaatgtttgcctagcaattcccttaaagtatgaagacttttttttcttcctgttgaacactggtttggatttacaacccacagagcacccactgctcccctctctgttactttctattaattttctatgtaaaagccaactttgtcaatggctgctgataccaaaccaatctggattctatgtgagaagctcacttggccctcctagcaggaaggcctgttgctgtcatacccttttgattgctcattccaggagtcatccagctgttggctggccttaccttttagtttcttcaggcccttggccagtcttgctgtcccttcaccccacacatttagcctctgacttgaactctgtcactcaagagggaacattagaaaacccacacttctgagtcatgctctttattttgtggcctaaggaggtaaagatgcggtgaggagcttttagggaccatcatgccggagcctctttattgcctagcaaaagccttaaatgttaatgtgaaacctcggtattgattggctgattcttgattcttcctctatttatattactcactggttatattaaattaaacataggaaggtccacttaagatgactttgcagcatgggcaatgggactttatcacaaaaagaccaaaagagagcagtcacttttagttgtggcttagctagagaagacaattgatgagcagactggctcagcagaagtctggaggttctcagaaggagccagaaagaaggactttctttctaaaagtccttatctacctcctctatgagagtcctggtgtatggtgtggtggagcctgggaacaagagcaacaacttctatattggctgactctaagcatggtggttgtctcataggagcagctgttgggtggagttctgggactattaatcccactcagtttgtgtaagtgatatctggtcatgtaagatgcagaatcaacaacagacagcctcgctgtagtagtacaggatttagaatcttggttaattttgatcatcttaacccagtattcgaagttaatctagatgagagttttgattagggtgccataaagagcttcagtttttattgagtcactgttcaaagtttagaaagatgctgaagctgggtatggtggtatataccctcagaggtggacacaggatggttgtgtgttcaaggccaacttgagctacatagcaaagtattgtctcaaaaatatcaaagctgggcatgtagatatggtaaagcacttgcaaagacataggggaaaaaacccaacaacaattaaaagatttgacccctggttaaaatggggctggcaaaggcagtgaaatagttaatgtgtccgcctcccttacaggtttccccagatatgcttactggctgtacaatggataattgtcagctcttgttgtgcagatgctgttgcagatggagtcctgtacctgcatgcatagcaaatgaattcgactggcaatcccctttataaagcataaatatgtaatttgttcagctgttgtaattaaatatgtatgtgtgaaacagccaccattcaggtcattaatgatgcgccatgccaaattagagcttacagacagtaatgtacattgtggtacaatgagggaattgcaaataacatagctaagcctctgctggtaaaggatgcattcagaggctttcaaaggaatatttacatctgtaacataatttttatttagaagatacattttattcagtgtaaaagtctcttaagatagtattgctttcttcaccagtttagttttattgttttagcattttaccatacaaatgccacattttattagccatgctgcttgtgatgagtcttaagtatctacttacatctaaggcagcagctacccttgcgtcctctcttcaccattgtggttgaatggatcctatcatagcacatcggaacatactgcttatttcactaaattaaagagaacctcataatatttcaaccataatccccactgataggtaaacaaacatagtaaacagcatgtttatttccatagaaatagggatgggaaaaatgcagttatcaaaatagaaacaaataagagtggtaaatttgcccctagtgttttaattcccagtgaattacttgtgaatccgaagaatttcctaagaaaagtgtcagccatgggtcagaatgattgcttttcaaattttaaaactcgagagttcataaaataaaaaaaaattatttattgctctatcctttcactctttggttttaggttacgttctttgaaagtgtttgatctgccatttaaatacattaaaactatttttactttcaattctttctgcatttgtattttgtttgctacagacaatctatttttatcatgcatgttgttttgacggttcatgctgagactacaagagctgaccatctcgacctttccgtccagtagggcagtgggaggaaacatctcagagctaattctgtcttgttcacagctgggaacagagcattcctctgtgacccccttgcacaggattctcagggatcacttgaaagctggactcaatgctaaatcctgggcttctaaggttcaatacagacaaatttaagtggaccatttggttgagaatcgcaggagggcaatatagttgttaaaagcttcatgaacatttgaaaatggaattactcaacaaattattttagttttgtaatgaaatcaaatttagaagtttccttaagcctaggatggttaatcaagatttgagctcttgaggaattttcaaaactaatcctgtatattgtgtaggatataaactttttgttttcaatgaatagcaaatgttttagttcaccaaatgcatattttattttaaaaaatgaaaacctaacagcagagttaggtatggtggcacatgcctttggtcccagcacttgggaggcagagacagtgggatctctgtgagttcaaggccagcctgtctacagagtgaattctaggacagccaaggttatcacacaaagaaaccctgtctcaaaaaaaaaaaaaaaacaatagcaaaacaaaaacaacaaaacaacaacaacatccctaatagcagtttgttttacctaaattattgtgacataaaatcaaaataatttaaaacttttcatatctttatatttctaaatttttttgtacttttaaaaaatatcttttcagttcagctaaatatatttcctttgcaatgctaaggaaaagtgtgattcatgaactgtttatttagactggactataaagatgacaatgatcaaaagttcataatgtacttcagttgtattaagaatcccctcccccatatagaaactgttggaaaacggccttgtcagctacatgcttaatatgacccatgagttcattactttctgaagattttcttgatgatcctttttcatttagtttctttatccccgttagagatcttaatctttggatgaccagttttattatttctatatgttttagaactattctagtttggggtgaggcattttgaagggtgtatgactttgcaatatcttaaccagctgtagaaatatatacatgggaaactgaggcaagagaatcctaagattgaaacttgtcttggctccagagtgaattcaagaccagaatgagcagtctactttttaatatacctaatctcaaaaaacaaacaaataccagcctggatatagttcagtagtagccagttgattaatgtgtgcaaggctctgggttcaagctcttatctttcaaaataaataaattgagtttagatacctttcaaaggtttcttttttttttccccttgaatgtttaaaaaaaaaagcttaaaattcaccagatgatgattaaagacctctattacagaacacttagtaatgggaattgggagacatgcagatagccttaccctgaacctgaaaagggagaaacatacaaaaaggctagagatcctacttgggtaacttgaagaagcatccacttgttttgctggagtggtaagagttaagagcatggtttaggattatttgggctgcttgctctggaggaacacatgggaaaccaccagcaagtcttctggtcttgtattaaagaacgtagcctttcctgaaggggtaggaataccccagtggtcagtggctagtggcctggtgctttctgatattgccataggcaggcctggccaatcagatgtgctcatttgttggctgttgttcctttggccatcaccgcagtaaacactttcccttgaatgttggttttctgttgtgtctggcagccacatagggcttgaacttcagccagaggcaaatatttatacaccagagtgtgcaatgttcaactggtcaggcctgagaggaagagagctccttcatgccttcggccaaaggggaattatctatttttccttccttcccgctgtgccctgcagaggtaggaccttactggaagccttcggtgcagatgcctgtgctttgtgaagggaggacaccctcctgacatttctgcctgctcctttaattctccttgcaaagtttacagttagtattttccctggaacgctgtcaagcctgagacagcccaaatgtatgccgagctgtgaaatcgagccggagagaagcaagtttgtgagaaatctgtttctactcaaatccgtgagcttcattaaaacacaagcagagaaacaaaaacaaaaacaaggaactcaaggggccgtggccggctgggcccccggcgccatttcacgacctgtgaggcgacgacgcagccgtacatggcgccgtgtttacccgccgcagccaatcagcgcgccgtgccaagccacgtgacgtgccacgagggcagcacagccatttccttgttctgaaaaagcttgcttcctccgcagagttctttgccttgcgctgcatgccaaatgtgcctgcagaatgtgtctagtggactggcatttgtccacaaagttatttcagcaggtaaaaagtctctgcgcacttgagctcggtgcattctttatgtaaaatggatttcccttcttggccagaggccaagggcacggcgcactggctgggtgagaagagcgcttctctgctgagaaactggtggaccgacacactcttaattttttggcttctgaccaaacaagctagatgaatgccaaaattcaacaaaataacacattattgtgtgataggagccatgctccaagagagcaggaactcagaggaacttcacactggctccccacccctcccccttttgttttttggctttattttcttaaaaaataaagtaaaataaaagcattgtcactttggggagcttttgtaggaaaatggctaaatgggacctagagagtcgggcttttagcaataaacttgaaggaaggaactgaaagaaaacaagagcttaaaattacgttcatgaacttttcccagacagaacacacagttctcttgacttcgcggagctgcgtttaaccctacagactccgtagatgtgtctgagttgaaagctgaaggacttggcattaaagtgagaattctgtgagatatagctacattgtacagatttcaaaatagaaggagaactacaaatgtcaaatgcggagttttagctttcccaaaccaaagactggtgaaaatctcatgctttgttatggtttttgtaccctgccccctccatctgactttgtaagtgaattgagtctgttcttccttgcttgactccataagcaagtcttgaaaggcctgtgcctcagttcccacatactcaccttgaggacattcaaagagagaattaagattcttccagtctataaaaatgttagaagctaagcttgaaaaataaaacagtaaacaaacaaacaaacaaacaaacaattagaatcaaatatccattttgctcattcacacagcacccagcctagcaatctaaagaattacagtagtttctgccattcctttgcttacaatgcttagtgtttcccagtgtgttgagaataaacttcaagctggtggccagggcctgccctacaagatctggcatctgcaccacctctctagcctcactttatcctgttgattcttccatgcttgagccttgcaggtctccgtttgaggtcaggactctgccagtcccttttctatgtgttgtttgcctgtaatgattttcctcccttttcttttgggtgatacattcttgcctttcagttctcggctcagatgatatctctataaaggagaaatctgaggttggcaatcatgcttttctatggaacatttcttaggaaaatccaaaatgcccctgctaatttgttcaattacttacatttttttactgttgcctccatgtctgttctacaaggacagaaaatcatagatatcctcttctgtgctttttatactgtatctaatcacatagggaataaaatgttggtcaagttgggatattccaaaatatatcagtttaccttcagtttcactgaagaatccaatatattaccagcccccagaagaccattattatagcatgtataccttgataagcatctagttctccttataagtacatgctgatccagagaggaggaaggcttggaggtcagtctgcctgtactggaggcagcattgactaaccatgacagtacagttggttgattagctagtataaatttcagttttctcatctaaaaagtgaaatttaaaaatatttccaatatcataggattatttccattactgttgcatatgatttagattaattgacctgttaagaaaaatatattatttagagatagagacaaaatacaatcagcaatacaatacaataatacctgtgttattctaatgcatcagaccctaagcagttttactgccaatgtccttcccattttttaaggaaggaactaaggcaaagaaaaagtaactggcaggacatagattggatacatattaaatatcagagcaggatctcatgtattctcctcccccaccccctggaatatgtactctttatatctggtcactctagagtctagtgaagcagtatatagctctcgttagaagctgaaaaggactccgaagagctgacatactggtaacatgtcagctgcaatagtaacttaatagaagggttaaatgagacgattcaagtagaatgcttaacttattgcctaacaaatggcaaacaactaacaaatgtgtggtattccaacaaccactactattattactctgtcatagtgaaatgagactcgtgaccttcatgactagcctgagttcctctccctgtgttagcatcttcactgagctatctacctttaaggaaactgatccattacctggaaaggaatcattgtggagctgtctctgtaactgacattctgccttagtaatttaataattaccgccctccctgctttgtatttcaacttaggaattgatgtgtctgtgaggcagtttgtttttccacgtgaggaactgtgacaacggcatagagggatgctctactcagactcagtgttccacccactccctaggtgatgtcagatacaagcctcagaaagatctgtttttccattgaggctgtgccacacaccaccctgtctgtccctgcttacccatagaagttccgattggccccaacgtgcctccaagttgccttcctgtgaagcaggatgtttacaagtatttaatagtgttcttgccttcaggacttcagaagcctatagtatcctcatttcccatggctgtgtgcccagtgtcagtgcaagcccaccactgtccctgtagcctgagttcatggttgaggagatctgagtgtggtggaccatgcctttgcctgtgcagggttaggcagaagcagggctatgcaaggagtctaaatgtctgactctgctactcgacttcctggaggacttggtgcctcgaaatggtgggtctggtttggcctgttggtgaactgaagcagttagctttctctggatgcttccttacgtaacggtcttttcagtttcagaaaaggaagaacacaatccgccaaagcacccagaattatagcagatgaatagccgggagtagttgaacaaagtgtctattgtgtgctgtgctgcagagcaagatatatacagggaactgagaccaggatacaggggacttcttttctcctttcttttctattttcgtttgaaacaattttgctttccttgtagaagttgttccttgctcttggttcttcattcagaataacatagtcatctggatgcatgtcctgaccctaccaagaaaatactgtttgcttcaatgcaaattatttaactgtgtgaagtggagagtttaggtaaattttgtaaattaatctttggtacttatggcagataaaaaagcctgttgttctgaggctgtgattagccacttgatgtatctgaacacttccttcttcaacaaccattgcaggcactattttactattaactgttgctataatacctagcttgcattttcccaagttacattcattacttaaggctatacttagatgagtctgagttcaattcaaagtcctgtttgcccaattccatctgcggtaaattaggttatggttagtattttaaacctgtaaaatgcctatttcatagacatagtagtgttcagttcataggcttattgtactataaagaaaagtgcccatcttggtgcttcttagaaatctaaggcaccatggctggtcagaatatcaggctaataaagaaccaaacaggtattgtgttcaaatcaaagtgccagagtcaaaaagtgtagcaaggtgaggggttgaggaggagagtggccagatagaggtcagtcaggggccttcagaccacagaggagacagaaggcaaagcaggctaagcttcccaacctggaagttaaagcatgagctacgtttgacctttatccagtatctcccgtcttctctttgcctgggcagcacaagcacctgggaggcaggtgcagagtgctggcttcaaagtgtggctctaagaagagccactagttgttactccagtagtcacataaatagatccataagccagtgagatcaccaccaaaccttagttctgtacactccatttcctgttcaggagagacatcctgtgctttactatctaatgatagaaaggctaatagtgttagggtgccaagcctcaggtatgggctaaacactggctgatggatggagagggcttgggacacatcttgtgttctggacacttcaactcacatttctattttaggataagagaaaataccacacattgctatttctgattgcagtgctgtataattttaattatggtgatattaattcaatcaatttaatgaaatgaatgctatgaactaactataatagcattattgaatggtggtgctttgtagcagacagcagcagtctaagcctcataagttttcaatagttatctcatttaactctcatactgtcacttgagtatagtacagttattcctcatttcgctggccaagggattggtaccaggcaggtgaacccagaggtcagtctcaggggctacatgattttatttacatcagaacaagttccattcctatggtatttccaactaatcttttaaaagaataagatgtatcttttaccatatgtaatatatatatacacatatatatatttgttatatatgtgtcttatatacttatatatatttattatatataagtatgtgtttatatagagacatatgcgcatgagttcagttgcccacagaggccagagaagttggatccctctagagctggaaatataaatgactactgataaatgtgcagaaaattgaattccagcctctggaagagcaatatgttctcgtaaaagctgaaccatcaccccagcccctcagctaatgaattcttagcactagaacactgggtattccccagatgactactatttatgactgctgctattgtgctaggtgtaacccgtgcttggagaccaggtcttttcccaaaccgggctgctgtgaattgggatgtgaagtaccttgtctttactttctcagtcctttgcttatagacacacatacacatctcaccccattttattgatgccttaaaagaatgactcattttaaatgtataggagtaggggagtggtagtctcagggtaggttgtaaactctagcatttggacatctctagatggaactgaagaagtgtgtgcctactgaacatctcgattttagagaatatgctttttggaattagaatctgtaaggtatcagaacccagacatatgaattgaagaccacagacatcaagtgtcttttgctcacctggcactcacagatacctaaagcttggattgaattcattgctgttcccagctctgtcatgcatgtgttttgttttcctgtgagtactaaactcctctggtagttttgtgattgaggtttggtagccttaatgatctggtacagtaaacaaccaagtttgtgccaaaaattttccaggaccagacatgggttttgacactataataaattaaaaagaaagatgttggcaatgaaaatgaggatttttttttataaaaaagcaagcaagagaagtctacttgtaaatttcaggcatgttttcctagtacttcagctcagtgtggcaatgcttagctacattaatctgttactggggaacttcagaaagaatgttgggcccagccattaagagattggtgaccccctcccttgagcattattgaaatttgacaacattctcagagtcccctttttcttttaaggatttggctatcaaaaatacgggtaagtgaaaggaaccaggacaaactaatgaccaagtgaatagtagtgtttcaagtcacaggttgctatgatacagctccactgtgacctggatggataagtgctcagtgggatttgctttctggagattctgggtgactcctctaccaattctgcacgtctcaggcctggttggttggccgcctcctcttcccagcagcatcacttactctagttctgagaaacagcttcctcccattacaggccccaattcaattaggcaggggacatgctgaaggtttgggtgtgcatcagcttctggtgtgcagacagtggctgagtttggaaatcttggtgaggatcttgtgatgtcgtggcctaggttcttgcagtctggtggctcatcccattagtctcctgtcttccaaatgggtgtagtggtgcttgtgtcttcagtcatagtattggtgacaaggaagccatgtggtttcccccagatgccaggaaatccttattctctccttggagttgagtttgccccacaggggccccttcccttttttccaaaccatgacttaaaacttaaaaaaaaatggactggagacgctttaaaggatattaaaaatagcccaacaaaaaacttccttctctttctttagcccgctaaactccctaattttaggccaccatgtagaactgggcctttattgagttttgaaatatcagaataaggaggtatttgtgagtgtttttgattgcctttactgaaaatgctgaggtgattcggaggctcgttcaaggaggcagttctgttacatcaccatgggaatacattttgtttagcatctcaaagaattgttgctcatcttcacaggcccttgtctgtctgtgtacctgcctttgatctgcttttccaaatttgaacatttctaatgctcactcctgaaaactcttcttcacatccttaaaatactctgacattttccagattagcctagcacagagttccaaacagacagaaactgccagaatcctctcatgtgggagggggactgctgtttatcattgaatgtgcctccaagacctaccgacgttggcaggtggccaatgcctttggtttggaccaatttatgaagtgtttgtgtgcttatgaaaaattttatctctgctattcagaacagtgggacctagaacagaccccaaaaacgtaataaatatggaaagaaacttttctgttatttttttaatcactgaatactacaaggacctttgttatgtatgtatgtatgtatttacacatttatgtactttaattttggtttctaattttaccatattgacaatctctccagtaaagttagcactgcagtcattagactctactctgtctggtgtttttcttctccttcaggcccatttccctttccacaaaaggagggatgtctcttgagttagccacaacaggacggtatcttccaatagctaggtagaactagagtcaatagcacagtgcacagtaagtgtcttggtgtttctcttcaaacgctttatgtgttagctgtagtcaaaagacaaaggatcatttgagtctggatggtatggaaacaggacattttctaaataggctacaaacctcctggatcctagaaaaagtagttaacacattggacagctaacacatttgcttttaaaatgaatactttccctttaaagttttttttcatcgtgttttatggccttttgtggaaatagcaaaaggtaagcatcctggcatgacagattgatattctaatgcagtgctctcacctacaccatcttatgcttcattcagggcattgtctatatacattcaaagtgaacttaacttttgacccaattaactgattggtctgatagatttaattaaaatgaaggagtgcttgtgtagagaggagcagcattagtataatgtggtcgtgaagattaacacgattgatttgatttgataattagttaatttgattaacaatataattttgcatctggcagatatctgggttcaggtcctcactagctagctgggtgcccttgatcttaaactttgagtctgatttccccatttccttccttaaagcactgtaaagatgtctacctcatacagctgctgtgaagattttgaaatatatcatgtagaatgctcagcacaatacttgacactttggtggtggacaatcatatctatcgatatgttccagaatagacattctgtgtgttctctgaaagatacatgtcaccgatggctgattctttttctccagtgagtagtcagtttcttttctaaaacacaagtggggcagctaccatattcttcatgttttatccactgttttgaagttgggtcaaacctgtctttattgttcaggcctagtttaggccataataatagttcctctaattaattaatgagttgacttttacagtgatgtgtcaaatgctgtaaggtacatctatagctccagtagttcttatatgaatgctagtaattggcatacaagcttaatatttcacagaaagaattcagaaatgaagagacctcaggccccaccctagagacaaagacgatcctttctgcagcaagcaggaagaagacagacctgagccagcgcccttccagctatcacatgctgatcacttttcttcttaattaaaagtgccctattcctgacctctcactggcaggctactcagagctctgaatttctagagttctcaaagctattgaacaaatgcacaacattagtctagaccctccaactgtatagagtcccattcagtttcaaagatacctgggcaagtctagcctgagacccagcacaaagccctgtgagtgtgttctttctcaggtcaaggttctttttctgtagcttcctggtgagtcaatgctgacccccctgcctcttgttgcgtgtttctccgactttacccaccacagttcaaatagtaataaccaggaatccatatgtaaagatttctaattaactcactgatgtgaacatgtgcagaaattccagacatttgtttacagctttttttttctattgtatttcatgggatgttgattttgttccattaaaaattcctttgtcaaaagcatctaatgacacattaaaccagtcacccacttgatagttcctgtcacattagccaggcaatacagtgaagtgtgacacaaagattgtttcacctcacttttagttttcttgagttgagtcctttggatttcaaggtttagtaaggaatttattcctgtgaacagttttgttctggtgaccattttagtccagtgttctctgtatgttgtcctgttttccactttattcacattgtatccttaaaagttatgatagtttaaaatatacttttgatctatattcattttattgatgcctaaattgtgtttgagagatttactttgccaccagatacatgagtccttttatctaatgttactttacctagcagagaaggatgcttatccactataagatatcctaacacatttttcatcctttgacatatataataaaaatgtacacttcgttaacaatagacttttaaaaccacaagaaatacttcctctgaaggatacttcttcttagtgttattgtagactccacagatttcagcttttattagcttagtcatggaattagggatagaaggtgtgtttataaagagtttggagagctattctaagaaaattatagcgacagtctgatttttaaatcctagaattgaaaactagtactttagatgtgatatcaatagaatctaagaatgttataaacttccttatcctggcaaaactggatgcctctcggcatcataacctgaattatctagtgaattcctgtgtcatggctgtgaaccacttattcaaggtaaaggaatcctcatgtgaagacattaaaagatggcttgagatgaacgtgcagtgtgtctggagttggacagatgcttgcatgtggcttctctgctgttcttacaggagcatctagccatacttctcagggagaactgctctgaaaggtagaggagataaccagaggtcatgctctttgcaccaacctgctttgtacttaaggataactatatacacatgcatatttgctttccaaaccagttactgggcttacagctgaggggagtgtgtgtgtgtgtctgtgtgtgtgtgtctgtgtgtgtgtgtgtgtcggtgtgtgtgtgtgtgtgtgtgtgtgtgtatttggttgtctgtgttgtccagcaatgttgtctaaaacatgaaatttctaatgtttatcttcagtatgttttgcttcttttcagagcttaacttcaagtagaatgtgttgtgactctattttctgcctctttataacaatactgataggaaaaataaagtaaaatagattgcactgcttataactggggcaggaggtgagggaaagcagcacaattcttgcttttaatcctgttggtctatattgaatttctgctccagtgataagtctatcttaaattcactcagagatttggactgcaggagagcctggggagctgctaatatttagagtattccagaagcattgcatggcttgatggttagaaactcaaatttccagaaacagaggaccagcatggcctattcactacagtagtcctgtgccatcaaagacaacacggcaggaatccattatgtagaaaaggacccaaagagttagtggcactgttaatactgcacagtgtggccgagacgctcctggtggttctaggcttgcctggaaacagcacacccaaacccttcccactttacacacagtaaatagtcggacaggaacaggcagaggggcatgggagaactccaaggcaattcattaacccatttcgagacattctcaggcagcttactgagcttcagaggtcaaactgaccactaataattcatcacagaggagaaattctgagaagaaaaagttaacaaactttttaatacttaacgagttgtcttaaaaatgttttagttccgtacctcactcacctgattcactgacgtgtgccgcctacttttaaatcacatttggcagtataaaaagagccgtattcctttacactttggaacaggtaacagaggttgtttgtttgtttgtttgtttgtttgtttctccttgtgccacagagagcacatgctgcagggactagcatgagactcccagggccaccaaaggtcaatggctgtgctgttatgaacacggtccagcctggactctgatcctgggatcaggttttaatcttgttcatttcttctcatctttgttcctgcgtatgtctgagctgcagcggtggccctctacacacagtgtctgtaaatggcagaatggccgtgcagggtagcaggggatgttggcagcacactttccaggcacctagcgcacaagcagagaacttcgcttctgccaactgtgacttcagaacccaggtctgttcctgaacctggacacccagctgtcagcatgttgccatatgtcaccagcacatggcaccctaattaaaatttcaaattgcatgcatttgtgtttgctggctggcttgcttcaaaggcagggacctcaccaccccagaatctccttgcttctctctgaagtattattgcccgccatgcttaggaatgggttggaaaacggcctttcccagggaggagaaaaacactactctcaaattctctcacctcctctttggaagtaaaactacttactatcttaaggaaggagggtgggtgtgaagattcatggctggtgcccttgactaggattctgacaagcagccatgtggctcctggtcccattccattctggctcacacacattactccagtctgggctctgtcttctcagctgaaaagtgactattactgccccttaagcatagtatacaaaaaaggggtttaatttgagatgtagttgtgttttaagaggagacagcctgaaggtgtgtctcttcctgccctctcttttagtgcacacctactattagatgtttaaattggaaattttataaaggaattcaattgaggccttagagaaaataccaggaaaagaaccccaaagaaatagatttctgtatacaaatccaggaagatacgttgtgggttgccaggatcctctgtaaattgttatcagttattgaatacttgtagaacgctaaggaaaattcagagaagtgtgactgtgagcaggtcccattcagttcttagcctccactgttgcacatggctgcctatagcctcatttgagacatgagcattctgtggctgacttgaagcagaattttctgagcaatatttagcatagagcaaaatgaaatttgaacccacatctgtctgattaaagcttgcacctcatattatttgcctcatgggaaaaggatgctaagtgttttgtttgtgtgtgtgtgtgtgtgtgtgtgtgtgtgtgtgtctatttagttttttgcttgttttaatcatagcttctaagacaggtgatgtcttccctaaatatgtatttttgtatggaaaggctgagaaccttatccaaataatcagacccagaagtttttcagatattgtatttttttttaactcttgggtgatttgcacttatgtgatgagatatcttgagggatataactcaagtctaatcaaacttctcaataatttatgtttttaaaatttataatagttttatttatggtgggacacacacacacacacatatatatatatcgtacagactattttagtgtctttaatgcaaattatattggctacagctaaatgtgaaatcagatgtggaattttccactcgtgattttatctctattgatacatagaaagtttgataatttgtagcatttcaatttttgaattttaggtttaggaatactcattccatgtacattttggtacaggcacaaatcctttttaaaaaaattgaactagagttatataactaattgcatgtggaacttgagtggtgacaatgggtattttcaactttacccaggctggaaacatactgtctcatccaaaatttatacctgtggcttatttagttattattatttttaatgaggtcttattatattgcccaggctgacctcgaaatcctggactccaactatgctcctgtttcagcctcctgagatgctgagactgtcagtatgtgtcaccatggcggctttacctctggcttactttaaatctctgatgcatgaggacatttttgttataatggcttctatggcccatcaagtgtgtgctgtgcagcatattgacttgtcactttgtggttaataatagtaaggacacacacccacgtaagctgaatgtctgtggtcttcatcctccctgctaagagtcaggttggtataggaagcctcaaggtcagctgtgtttccctctccagagcccacttgaggcttcggaccccaactgcccttttattaccactgcagtcttgaacaaccatcataatttttcttggatgcagttttcttatttgtatgagaaggatcaaagtatgggttaatttatataatgcacttagagtgtttctcttggaacactagtagaatccaatggatgttggctaaaaattaactgcaaagggctggagacataacttagtgccagactacttacctgttatatacaaggaccagtagcatacacacaaaaaataaatgaataagattaaccatcacattttatacctcatagggaaaaaagatattctcccccaccctcccagataagattaattgatccattctactggaaatactgatgtttgaaccattgacctttttttatagcctctgacttactaaaatgaatctcctttatgatttggtgtgttcgttagcagttgctaggtaagcttctgctatgaaatggaatctctaaaataaatagtatcataaagttcatggtagtaatcgcagtgggtagacaaaacacgccaacttcattatatttcaacaagtgcatatccagtccagtggattatcacagccatataattattcgtatacacaccttgaagtattgacagaaagagttaaggaaaactaaacacaaaatcccagcaccctccaaaacttagtagtatatagtgcttatggcaataatttgaacagtggccacatggatgagagaagccagcaatggtgtccaggctgcctatcttagaaccagacaaattgtcttcagacttagcaacgtgaggcagtcctatcacctataaacgtttctaatcatgtgtagatcagatttctattaagctcatatttactctgtaaagcttctgagataaacaacgaagtgtgaaaagaaaagcaactactgtattttatgtaaatttccaatggaaattatatcataaatcacaatgtgtggtaagatttcaaattatttcttatgtttgacttttatttatcagtaccctgagtaccatacacactgacagcctaaagaatcagtatcttttactgcctctccagagcatccttgctgataacttttggaaggcgcatcatgataatttcagttgatgtatcctcccctgcctgcatccctgtctgcagagagaacaaataacccagtaaccgacttgtttctttcttccaccaagtattaagaagtagtgctttttctcatattcaaagagataaatttgcttgactcttttgtgttttatacatcatagtaagaaaaacataatctgatggaagcttagggaaaactcttaaaatagtggttgccagccaagattcctgactcaaaaaccagggaggagagagatggaaaggagaggggaaagaaagaagaaagagaagcaagtagtaaaaactgtttaatgtagtatcggctgccaagagtatttggtacagttgcacacagacttcatgaggaagcactgtaagaaacatgatctaatgagaatgcatttataagagcagtgtcgagtcattaggcaaaggggaacagtggtgtctagatctccttccataacaaagtttaatgagtttctgcacagaggattttaggttaaagatttgtctgatagtaagtgtgaatagaaatgcagctagaaatgtaaactattgtcttgctccaggatcaatttcacagctaagtgtgttctatggaacacttgagtattgagctggtgagagggcacagtgagtaaagtctttgctacccacatgatgacctgagttccatccctggaacccacatggtggaaggagacaactgacttctgtaagttgtccgctgacctccatacatgcaccatgatgcgtgtgtatacttgtgcatgctcacataatacccaggtattggtatttatgaatggtggttttaatgaatgactctcacatctaagataatctgtttaagaaatgaactccaatatcttacatttgttatggggacttgagcagccccatcttccatggactgtctttttggggaagatgttaactcaggactcacatagcacccagagcatgtcaattgcccagtgttccaaaatagcaagtgtggatggagacttcattttcttgccttgttttctagttctggtaaaatggaacttaactattccctccctacataataaacttgtggtcctaaactgtatcagtgatgttttgttttgttttgttttgttttgtttttcaagacagggtttttctgtatacctggctgtcctggaacttactctgtagagcagactgacctcgaactcagaaatccgcctgcctctgcctcccaagtgctgggactaaaggcgtgtgccaccaatgcctggcatcagtgatcttttaagtgaattataagtagacaaaaaggaaagaagacacagtggtgacattggggaagactaataaaataactgaccttattctcatgtttttaatgggccagttcctagcatcattttagagatcacaactgcctcttaactctggcgtcagcaagaatttgatacttccttttggcctccatgggcacctctatacatgatacacgcacacatagacacacacacacacacacacacacacacacacacacacacacacagagagagagagagagagtgagagagagagagagagagagagagaaatcgagagtctgtccgtgtaaacctcatctggaagagtttgtaggaggtggacattgtttaaggcttatttgttctcattctaccaaaagtatgctcatgaaatttgttatgaacgatctgttattagcatagatattctgtcattccaggtagttcaagagtattttaatggccataattaaattttaaagtgacatggttgtagatattataagttgtctggtcattctgtgattcatgtgcaaagaacacgttgttattcttgtgttttatttatcactctttatttatataaaaaattgcatttgcacaagagaagaattagcaggatgtaaaataaaagaaaatgaaagttgctgatggggagaatattttaaatgtcttttaggacgtgggtgaaagagctttgcttaagatttcaccatatgctaactataacgcagcacttcaacttatttaccgctagtgcttcgtgtaagtcacgtcattctgaaagccatggaaactgcacatttgtgcattaacctatgtaaacaacaagaactggtcatccatccaattgttgcttcacttattttgaattacagtgcaattttgtggagggtgaagtggggattacacaatatagtgatttcctgttaacacctacattttttgctgatcaagcaaggtctgttggtatgagagcttaacctttattttatttcaaaatgtgttttttattcttagttctgctggtgcctgtggtttcacttttctctgtgagccacatgttaaaacctgccctgtcgaaatgaaggagtcaagccctggagaagacattataggcaaacgctatattggaaagagctcaagaaacttttgagcctatcaatgatactataaagggaaatgcatgggtgctgacaccttaggtgcccgaagtacagagcagaggcaaagcacagaggtccacaagagaatttacccactccatgctataaaacagaaacgcctgtgtccagtgtggatgcctcctttctctgggctcttctgctgggctgcccagtacatcccacttagccttcacgatgccccagatattttatggaacaagaaggggaatgcctgctcatctgtccatccttcctcggttagcctactgctttctcttccttttgccatcacacatggcttacgttgccttatgctagcgacgtctggcttccatggtagtcagttgtgtgtgaattcatctctaccaggctgtgttttcttgaacactgggaccatgttttcttagtgcttctgacagctctttgtaacagtgaatgctcaataactggtattcagactgacttaaagaaaaaaaaagagaaagaaacagaaggaaaaatgtaattttggtaggatccaggtcttttaatggttattggacatttagaaaaatgttttgaccatttaccaggctccagttgggccacttggcagtgaaacctgtgttagggtagtcttttaagggtgcacacttgctgtggactgagaattcccacttcgacaagagagccctcagttttgccctgatgttttgcccctaccactatatatcctaggagttgtttgctgacaccacacacccacgtttctaaggtgaactggagtgggggctcttctctgtctggactgccctagtaatgtgctatctgcttttctgctgccatccttgaagagggtctgatagagaggagctcctcattactcagctgtcttaggttctcgattccacaagggctaaaaagatcaaaattaaaattgggttttgatgggtgaacaaggtccagtcgtctgggggactagaaattactcaagttgcttcacatccagtttctagaaagcagttctggaatatagaattttctatgcacagtctcatccatgcatctatttgtagttagagtattcgtgtaagataattctgacatatgacatagcaggaggacgttctaggggaaaataataagaggtctttctgtgcaatcctggatgggtaagcttcagggtgtgtggcttcatcttcattccttagaaggcaaaggagtaaaaaggcactaacatctggtttcatctctagctctgagtgtctgtgctatatttgctatagctcactgtggcccttgagttgatgtggttactgaagataaagaagctatttggagactggacactgaccttgactttggtagaacaaacccagctgcttctctttcttcccatccatcctgttgctgtgtgaacattcttctgacatatgctcagcgatgctgcaaacatttaggccaagcttttttctcttttataatttgctcagtccatcacttcaatgactctttcctgagacttaccattctggccaggagggctgtattttattggctcaaatactctttactttattgacaaagcttagtagtggtgggcaaatacttggccatatcagttgatttaaatcccaatgtaaaatataaatgtatattgttgtcaatttaactaggttataatggctacccattctgcagatgaggaattggaaacacagatacatgaataagtttacccaggatcatactggtaggataaaggttacagaagtggatttgagcccaggcatttgcaatagtatatttatatgccaaagaatgttagtaaggcctggaccatgtgatggagagcaggccttaaacttgtccacacatgaccccctttttacccaagaaaaatttacatcatctggctgtattagtatatcaaaagatatataaccaaaatttcacttataattaattataatttcaacaattccttgacaaatttatgtgtgtgtgtgtgtgtgtatgtgtgtgtgtgtaatttcacatttactaaagataaaaatcaaatctgtatactagtgagatggaattgcttttgtgtttttacataaagaactaaatcttactgagtgtgatgtagatgcaaaacatcttcagtaatttcaagttgattgagattttggttttatgatcatcagtgctaagagttccgctttccataaatacacatgttaaaaggcaaaagtgtgttgaggaccgttttagaaactgttggtagttctctcctaatcccaagtcaaattcattaaatgatttatgaaatccaaatttgttttccactacgtttctataggagtgggcaatttgtatgcacagtcaaaatgctgggattcataatacacggtagcctttaatctgagctgcagtgtttcagtgtcccctgatgttgtgtgtgtgaccatgattgcagtgcagagtgggcatgcagtgtgatccttccatgttacacatggtgagcagtgctagaaatgcctcacatttattacgcattttacttgaggtaatttttggttattgtgggttttttttctctttttgacaaagttttttcgaaccccacgttcactgatataactcctagtcgggttgcaacccatactttagggagctggtgtatagagtgtgtccgtttttctgaagtcctttgaacagatttctcttagagctgtattttatcatcttggtgtttgtttaagcttagacatgatactttctcatggatatattagtcatactgtcaaagtgtcgtagattttagaatcaagaatatttggagctgctggccaagagtttgctactggatccaattctttcatttctaacagtgaaagcagggatagagaaagctatgagactaggcagagctggccctgactgagctgaagaatggctcagtgggcagagtgcttgatacacaactgcaagtttaggtacctggaacccatatacatgctgtgtgggtacagcatccctctctaattccagtgttcagaaggtagaggcaggggatcctggagcaatcttgttagctagatcatctgtatgagttcaattgagagagcctaccccagtgaataagggagaaagcaatcaggggagctttcaacttcaacctcaggcttccatacccatgtacacacatgtacctgcacacatatgtgcccccacacatgcagacacacttaaatacacacataacaaagacacatacatgaaaaaagagacttgtggtctggtgttccccaggagcctcagccatgacacaatcatgggcttctatagggtcccagatatttatgatattcagcaactgcctcagaatgaggtcttattctttttctcctttgtaacttttaagacacaaaactcatttgtataatgctttaaaatgaattcaaatgttttcttttctaatatttcatattcacagagaaacagtcttgccagcctcctgagtatgctcaccttggggagaaatctctttctgagatgcccccacagttgtcaacagccatgtaataaaggacgagcgacaaagaccacccttgtgctcgcagctaactcccaaggcttgtttcattgtagtaaccttgacagaaatatagaagaatttccacaggttttgatctgaagcctatggctgacacttgagctttcatgtctagaaggcagtctgccgattctcttttacaatcatgatagtttttgccagggggcctcatagatgcatgttgtctcctctctatgtgcatcctttgatgcaatggagaatcttcaacattagacattaaaagtatttttgagatgcaaggtgtaggctactcatagtgtatagctctggtcccctctgcttagtcagctgaggtgagagaaactgctaagaccattagttcaagatggatggctagactggctcaaaacaaaaagtagcaaaagatgtacattatgtcccaggtaacaaataggttcattgactatttactaaggcaaggagaggaagacttagagctgtccatttcacttctgccttttggaactattactatctgttcatttttgctctctaagcccacccattgcaacacacacaaacacacacacatgcaaacactgctctgtaatctgtataatgttggttttggataaacacccttgctattctgggtgttattaaaaatacatctttagttgtgcatctaggactaatgggggttagaaagtagacacaaggaaagaaaatcattatgacaatcaaaaaggcccccagtggtctagactgtggagatgctgggatttccatctcatgggagggaggggacctgctgaattggttctgaagttcatagctgaagtgggttagaaaactggataagcatgtataaattgtatataactaaaacttttttgaaataaactttaatgaactattgctttgagggaaaaattatattcttcttagcttttatttgtatcaaatttaagtagacaatgggaaattattcatggataataaatagcacttaataagatatatattgtctatccacgtgacttttgaactcagaaacaatgccacaagaaaacttaaatctgtgcacaagaaacttatgtatatgattctctttgtttctgttttagttgcaccctccgcctcctcctcctcctacttctcctcctgataataataataataataataataataataataatattcttcttcttcttcttcttcttcttcttcttcttcttcttcttcctcnnnnnnnnnnnnnnnnnnnntcctcctcctcctcctcctcctcctcctcctcctcctcctcctcttctctcttgttctttttagacagtatctcatatttcccagacatgccttgaactgggcatgtaacaaagagtgaccttgaaattctgatccacatgtttcctagaacctctgactatatgcaaagctggggcttgatccccttcatgtgttctagggaggtgtttgtatcaactgagatatatctatcgccagccctagtttaatggttttatctatgaaaaacttgctagtctcatttataggtaagtttcccaaccccctaggctggattttcattgtaaactgatatgtactcatcagcatttggggttcagttgatagctcaggggtgggaggagtctcaagaatatgtagttgtgggcactctctctgaccacaaaagcaccgttcacatgtacccagatgggattcctagggctctgtctggtgaagtgggacttctgactttaccagtgaagccacccgtgcatgaaaaaccttctctgcccctctgcataggaacaggacagttattcagaaaaaaaaaaaaaagtttgtttaaagattaaaacaaaatgtcatgttattttctcttggacaaagtgtgtggttttcacttgtgtatgtggcttgacgtgcactatctacatcgtttgaaccccaactcccacagagaacactccagcacaccagtccatctgttgcaggatcataggaggacttccttttgcattgagctaagtaaggcggcttggctcctccaaccccttcactttaactggtcattcttggctctgttgccactcacaacatcccaaccactttcttctctctgaagagtctctgcaacaagcctatgtagattgtcactctttttgccccagtttttctcatgactagctttggaatgttgtgtctgaatcctgactacagtgtgctcagcagggggagggagaactatgcagatcttataaaatacaaagaaaaagtattgtgccatataccttttgtctttgtgtttgtaatttaggtttgagaatacctaaactcttaccttttcagttccaaaaacaacagtctttggaatcaagcatatgtgaactgaagctatggaaggtgaccatagacaagctaactttctgccaagtaggaagggaaggaacagactcatattggggtgtcagagcctcaggaggtctgccgcaggacacacagcacaggtttttacacacagaggcggctgctgcaggatgcatagcacagagccttaacatagaaagcagcttccattctcctactaacaaggctgccttggcattcttttgttttgttgatttttataaaatacactttaagctctactgtaggatatgctttcaaattttttataagaatgccagaagtctaaaatgtaagaccttaaagggtctcagacacggttggatggtttcttggtgatttggtagcaggcagttaaacatacttggtttctaacacatttaggagaaactctgagtgaagatcaccatagcaatagtccccttaattagaggaccaaataacagggaattcactcccagtgcttcttggtaggaggcagaattcccccaaacactggaagagcataggaaatggaccccaaagtctctccaaattaaggaaacttacaaactaaacctacatatttaaaaaatatcagaaatgtgttcatttctttctattttactgagtgaatgttaatttttcagagaaaataaatacttgaaaaagttacattttctaatggatttacatgtttcactttagaagcataaacccattcatttagcaatagtgttatttgtgaacatattaactattttgggagccatcaataaccatctaggactatacagccatttttccccaacgagttttgtgcagtatttatttatttttgtaggatttcaaattcattttccatgtaatttctgcaaagataaagatttatagcctttgaggtatgtattagagcatttgagtaaactttgaataggtaattttataatcttaaaatgaaatgtagaggggctagaaaggtagattccatggctaagagtgcttgctgctcttacagggaacccacattattagttcccaaccccacactgagtggttcgaaattgtctgtctgaaactctagctccagggacgctaacaccctctcctggtctccgaggacacttgtgtacatgtgcacaaacacacacatatcaacatacaaacattcacataattaatactataaaaaaagaaatctttaaaataacaactgagatcattgtagatattcagatattcaaaatataaggaatagaaggcatccatattctgccatatgaaaataattaacatcctaatgtactaccccccaggtggtgtttgtttatttgctgttgtttggtttttgttttgttttgttagaatactgttagacatttatgattatgaaaatatgtctacttcaaaagtcaccaaatactagacttgtgtattataggatagaaacggatgttagccaagcaatatgagttgatttaaaaataagaatatctgaattacaggggagaccgtaatggttttgagtttcttagaacagggtcttctcaacttaaataggaaaggtggctttccttaagtgaaataagattacaaagaaaggtgtgtgagctataaagaaaatgttcacattacccaatggtagctaacaaataaggaaactactcagatgtgctgtgttatggccttgcagaattcagagaaaagttccttgttttcagtgactccaacttgaatatctatccttagggtcacattaccatcactaacttacaatgtaagaagatggaagattcttagacatacgttaaggtctactctaaggctcttcacttggtcctagatcttgaagatcactttgtactgagtttatctttatggactcttcatagtatggcccgtttgtctctatatttcttgtgctgaatcacacttcattccattaacattaaaacaaaaaaattaaaaacaaaaacagaaacagaaaaccttctttgtgtccaggatgaaagccaggccattttgcatgctaggcaaaccctctgctactaagctacatcgttagcccttcttctattgaatctatttgcggctgggcttacttgcctagcatgcgtactgccctggcttgattacccaccactgcaaaatctaaggcaaagacaacaaacaaaggaacaaacaaaaaaaggaaaaaaatccactgcacaaatgttagaaaaatggctgcagctttggaaaggtacaagatactgaacgatgagccctgttcatgcctttccgcctgggcatctgaagcctgctgttctcatcagctgagtgcacgtttttatctttctgcccttggctctcttgtacttccatctgcatgcagtgggcaggtggggcttcttcaccaaagagaaaagagtaatatctttctagtgtgcctaagtctttggcatttaaacaaaccagagaaatgcataaatttagccaaggattggagccagagtgatggctgagttggcaccacttcacattcttcattctctgtatttatagcaataaatttcaagtcaggaaatagattgcaggagcatgatgtattaggaaggaagtttgtacacttgtggcttatgggtatcagtataacctccctgcttccctggttgagtgaactgcaccattgttaagaagcagagtatatgtagagctattgccttttaagagctttctaaagaaaattcactcccttcctcccctttgggtgcagtgatagaaatcagactgcgggccttacgaatgctaggcaggcactctactactgagccacactccagcccagtgctcaatttaatggcaagataagaaaaacaccgttgtatcaccccgtccactgagatgtactgaaactgtcttaatatggaaatttgcattcagtggtttctttcttttcttttcttttctttctttctttctttctttctttctttctttctttatttatttatttttttgaagcagcagttgggcacagttcagaaataatttcccaaattactgtttatttagttatgatattaaataataactatgtttttagaaaaacggaattcatgaattacttaggtttcatgtctttcacaatccattatattttctaaggaaacctgattttctgaacatttgaatcacctgattttgaaggtagttgatagagatctagaggcagtcaggaacaccaacagtcagtctccttagctattttatcctatatattatgcccagtagaaatttagtggggaggatactgtagtaaaaatgatacccagtgttcctgaaggtttgggccttcatcacttacctaattgcaatgtgaatttagatgagtctattggattgttaggttcgcagctgtagcagaaagcttatttgtcttaggataactaaaaggaccatgatgcctgacaccaagatctgcgctcaaaggggagatagatgagtgggtaggcgatggggggagaccatcactgttttgcctcataccccattgaaaaatttcttctgagtcgtctttgggatccaaactaaggtttactgttcttcagagccaaggaggaaattacattgtagtgttcacctacaggagcatagtttgggtctcagaaatcatgactttggaattccaagtgtgtattatccagcatcgactgtgagtcccccaaggtaggcacagtgtctacaatggtgcctctcagataacagaggaaagactccacaaagccctttgcctaactgaacgagtgaacagcatttctcaggacactttttttcccctgtactcagcgtctgcttatgaatttcaaagacattttccatagcaccagaaaaaggatgcttttactatcattgaccgttcctgtatatattacactgtccctgtaaagaagaagtttatgagttgctctgtaaaaagacatccacagttctgcacctctgagaccacactttccgacacagacactacattcaagcttgcagacccctgctctgcctggtgtctgggtttcagcccagactgaggttgagtgtaggaagatggaggctctgtggttaaaccacttgtggataatcgaaagtagaccatacttattttcaatttggcagctgcgttagctttttacttgagcgagctggttttccctgcttcttcacactgtggcctgctcaccattagtggtctggcagagagatctgaggaagcttcctttacttcccctctgctgcaccagggtttcccctgattgggcctcggtggctggtattaggcagttggatcaattgctgtaactgcaccagaagaaaagacagacaaaacaaaacaaaaccaacaaacaaacccaagtacgacccaaagagtcacaaagacaaatctcagacctgatgcacgtgaagagctatggctactccaactgtcccccatgctcttatccagacccttaaacatgtctgcgggcagttgatatttgagtccactactgcatcgggtttgatgctccgcgcttggataccatgtgagttggaggctctgtgtgcctgatatagatgatgtgtgaatgttgcagtgtcaacaggagacgagggatgtgaagatatgtgttcatgtgggacagactgtaagtcctcatctccaaggatgagctagtatatgtcacccacttcatgatggggcctgtgtggtttctttttttccttttctgttttcatctccagttggtgatatgtcatttaaatctgcgctggcaaatgaaatgtggttttcaactcaaactgaacttgagttaggagaacttcagctctcgtgatcttattttactattttccttggataatgtgcccctgatagcacatactatatccagaatatctgttattacttgagtacagttaactaaaaaggagagctgataaagttaaacccactttccctcaagcatttaccacaaccgggtaagacaatggcctgaatgctaagtgcactttactcaactcccggatgcttttacctttcttgctgcagacaaatgatggtctgtttgtctgtctgtccctgtctctgtctcgatgtgtgtgtgcatgttcatgtgcacacttgcgtgtctgttggtctctgatcaagcaatataaatatcactgatgtctcaggtatgcaaagggactcagttgtatcattcataacagtgaaagatgtatgccatttaagcaaaaactattgacttaacgtggtttacaattatattacaattatattgatgtacaaaaacttgaaaagatattaaaattgaaaaccatcttgaaacgtgctttaaacaaacaaatgcattgtagagtttctcaggagcatgggagtttggaagttcttcccaatcaatccaaacctagatgaaaggtgtctgccattctcagactgctcttttctcgcctgtatgtagagtaagttcaggactaaggcttgggggggggggcggtggtgccaacctcttgatcatgataacctcacttgggttctcctaagagcttaccacattgttgcttgctagaaattgcctctccagtttggattcgaccacagagctaaatggagttccattctcagctcttgcagataaacatgcaatatcctggaaagcaggtggtttgctgatgtcttgtgtaggctctctaagatgacagagatcgacaacagtgaggtctgatgctaatggagttttgaaacgggatgcctctcagtcagcaggaagtctcacacagtacctgagcgccatagttgctcactggtgagacaaggatttccccttacggttgtcatcaccagtagcttccaggttgtagctgagaaaccgctggctctggatatttcagagatggtttttctagagtatttatctcccagttgctcatctgtggggcagttcttgtgttctcagaacctgtgcttccagttcattggttctatagctgagccttgctttctcagggcttccctgtctgctgctatgttatatttgatagtttagtggcatgaatatgctttataagtgcttactttgtcaaataacagtagctcagatagtaagtggcagagaatttatataatatgcttgttaaaatcatggccatttttgaaataggccctagttctgagttaaaagttaaagtgaattcctataataacattattattgtgcttgcaaagcctgacaaatatcaggtgacacacttttctatctacatcgcacctgatagatctaggcatgtctggagtcctcagctaatgaatggctggtgtgtctgaagtcttcagccaaggaatgacggcacacaagatacgcctgctttgtcaggagcttcccagggaataaatctcttttaaaacaggagaaagtcatatctacagagttgttagcactattttaaagtacattttaatgcagatatttttaaaatacacttgactggggactggaaagatagcacagttggtaaagtgagtgtcctgaggatgtgaattggactttcagagccatataactaaccagagagggtagtgtaaggttgtgatcccagtacagaagtaactggatccccagggcctgctgggtagacagtttaacctatgtggtgagttctgggccagtgagaggccctagcttaagtaaagtgaagtagatgacaccgaaaaggtgacacctgtgcttgtcccccagcctctacacatgctcacacatatcccccacacaaatatgcacagttagacacacaaaatacattttgtcaatttttcaacattgtccaacttctcaaagtggtgacacttttatttgaggtgtgaaatccttttgtgcaggcttccatgtgtatgtgccatgtgtaaaatgcaactgaaaagttctaacggggtcttgttggttcagttactgattatgtaatgctataactcttttataagcatgttactagttttcctgttttgagaatgaacaagaaatattaaattcactcattattgaaggcaaacacctaactttatcattaggcattaggtatgtttagagctagccataaatatatattaaaaggctaggtcaaggggcagaagcctcaaccattgatacaaatgaggttctttactgcataattatagatggtattttcccatggtagctgctaaattgaaaagacttttcagccttaccattacaagtttaacttcttcaggtatatgaaataccaacctcatcctgttctattataaatgagcttttgacctctagatgaattatcttttaaatgcctacggtacccaggtagacacaaaagatttatttttatcgacttctacaatgtgacagaagcatttcagaacttgttctgtccttgctccgtgacctggcattatatcgtcgggtcgttctgacccgataggtaaaccaaagacaaagccataaggagcaaagcacaggcccatgtgttcagcaccatccgtactgctttgaattaataacccctcaacatacttgtctatttatttcctaaggaggagctagctccccaactgcggatgctaccaagtgtgaggagaaatactgactgttctcagggtgctgacagtgacatcctggcacagttacttccagtcatagtgactgtcaagttcacttctccatctctgttggagagttgggggtgtggtctgagtgtcactgtgtagttcccagtgacacgtagtgtacccctatccagggctgtgagtttatgccatcaaccagtatgatgatcataccatcttctcctgaaacgagcagtagcataggtctgatatctttgtacttcttgggggaatccaactctgcactgtggacctcccagaccctagataaaaagtgtctgtgaaggatattgtcagactatcaacttcaaagatcagatctactctccatcttctggaactgtgtaccggggccatgggacagcaagtgggctcttgaaaaatagatagcttctttatttcatctgaattttgttttataagccaatcagttgggcaggacatgatcactcaggtgagagccgtttatatgtattgtgtttgctttggagtcggccattgctggcagtgtagcagttgtgtttgctagtttgttttgcatatgttttctctagaaggaacttgattacactcttgaacagttgtatggactccatgacttcaattagtatgcatgattatgcccttaaggtaagctatcagtaattacaaaccttatgcttaggaacagctatctacattattcggtccagtgttcctttagctgtgtttcagaagtccaagtattggttagtaatctaccactgaagtcagcggggacggtcccactggagctattgggaaaagcttaagattgggaaatggaactctggcaggcacaggtcaaaggaagctatgaaacgcttgccccacaaccctgagcagcctgctttttttgcaggggtgaacctcttcaaagtcttactgagaatcccctctgcgacttagcaccctttaaacgtgacagaatgtaggcctcagagtggacattgtatttagtttgagctcttgagttcttgagttcactcaggaactttggagctccaggcacctgcctatccttcagttttataggtcctgcaaggctgtctgcagaatgctgataagcatcgtgatggaggagaactgaagcagtttctgaagtgtttttactcagtcactggtacacagaagcctagtaaacgtgggtttccttcatactcagcctctgccactgccgtctcctgggaatccgtgcgcagttcgtgactttactctcccatgccaagtgtatttgccccattgttttagctaattgaaatggaaggccatggagatctaaacatgcagacctactaaatgagcaggcacacttagccctggctttgccccctttccagggtgctttaaaggcgcaggcattgctgctctgtttctgagtattttgccgctgtaagatgtggtgacatgctgggatattcttatgaaaatatttgttgttgatactcatgtactagcttcaagatatctgagaacccactgaaatgacagatggtgatttatctttgtgagtatgtttcctgggaaaataggccatgccattatctttccacaaagagataggtaggggccctaaaagcttaacattggtccaagggacagcttcctgggtgcctttgacctctccagctctgtaaatgtcaccttggaatccattgaagtcttattaatatggtggctggagttccaggttatgttttattctagtgaaaaccaagaatgcacaagccttccattccatagaggaccctggagtacacaggaatatgcaatcaaagcacagttaaaagtcccaggggtcaacaattaatacattttgttttccaccttgcaaataactctaatgtaaatactgtaaattgctgggtcatgcttttctgctggtcagcaatggggaggtataagaagatatcttactgtgttgctggatggacccattatgattgacacataggctgaaatgataacaccttgagagttggaggtagagtgtttttgttcttagaatgtctaaccttactggaaaggcattttccccaacataatagacattttgtacctggtttatgttcacgtcagttgtgcttgaaacattgataataacagacacaggattgctgaaagttagttttaatgttattttccacattaagaaagtggtctctctagaagtcctgttatcccttaaaccattttgatagttcctgtggacctgccctaaccgtccagtgtgtgaacataagcaactctggtgctcaagacaggtctgagtatgtctttatttcagaccgtgttcagagtattatttcattgctctgaatcatgaatgcctaggctttgctcaagacgtattcatgcttcctttagagaaataagtgagggagatcaaagaacttcagtgactttatatcagcatcagaaaggatgaaggtcagatgctagtctgagctacttttcccagccacacactctctggtggttttgcatatagcacacactgtaagtgtttgcaatagaactgctatcatgagccatgtttaaggttttaaatagatttgtgctttaaaggatttaaagagattttgttttcattctggctggacattgggtatctccattgaaaacttggaacccaccgcaggcagcattggactctcatctgttatttagaacatcaaaaatcaaaacatgaaaaggccagttcggaacttattccacatgcttattaaaccttggttattttaaagtttttctaaataatgctgactttactcgattcttatgaactccgttacaactaagttacttaggaagccattggggaaaagaatacaccccaacccaaaacccctttcttttcagccaggagggcgaagtcagctaatcaccctctgagcgaagtcacatcatctttcagactctctatatacttattagtggcctataattttagaactttttcttgattttacaagaataccatggtaaagagtaactttttaaaaagaattctgtagcagtatttcattaacagtgtgtgtctgctatgcctctgaactccctcaaaacacttgggactatcacacaatgtattacatagtaattaatagtgccacaaacacaaaagtattactgtttctaatatatattgctgttagtattgaatttcatagggatgctttgtgcctataataaaagtttgtgtcgtgctctatttttaaattaatgataaaaccttgcctatgtatattctccctcattaggtcaagcttccagtgtgcatcacattgaaataacaaaataatattagcaaggaaaaaaaacagtaaaattaccttggaaaaaagttatcaaaattttactatttatgagtttagtattccaactttgtatcacaactttacatcacatgtgtgttgacttgtgtacatacatacacatagctacatatatataaatatacgtagatatactgaagcgtacacagagattttgtaattttttacaaaaagtaatagctacagcccagacacccttttctatttcctggtgagctcagtagctctagcatatgatgtacatgtcgtattgtttgggaaattcattctgtggtagacacagagcttctaaaatgtttctttttaattcatgtgacaacaaatattcatgttgtaattatgactattagtataggactttctattttaaaaatcatattaacttgtgctttagtttaagtgaaactaagtgatactaaattaataacttacatcttatcatttttatatactataaaaatattgctttggaagctggagagatgacttagtagttcagagcattgggcctgggtctaattcccagcacccacagggagacactcttatcttacactacatttccagggaatccaatgccctttctggcatccatgtgcatagctggcacacaaacatatacaggcaagacattcatacacacaaaataaaagcagataaatctaaaaactatttcttctctggttactaaccacagtcccaaagctcttttgaagtatttactaattatatatgtttggcatatactagtaacctaattattaaacttatgcgtgactcataaaaatacctggtattttacattaattttaaaaataggacagaacataaacttccatttggggtggcaggtaaatctttagggtgtttcattggtcctttaccaacagcatgcgtgtgtgcgtgtctgcatgcttgcctgcgtgtgtgcatatccgtacatgtgcgtgtctgtttgaaggtcagagaacaacctggagtattggcccttgccctgtacttcgttttaaacagggtctcttgactgtttttctgctaactttgtcaagctagttggcctgtgagcttgtggggattctgttgttttgtcttgccttctcttctcagtgtaggagtattaagattgttggtgtttgcattgtggggctggctcctttacatgggttttggagattcaaactcaggtcttaattcttgcatggcaaacacttttacccacctaagccttcttcctagcccccattccttgattgtaaaaggggaaagaaagactaaaaatctcactatattaatgattataattttataataatataccatgtcccattttttgcattagctttaataataggacaaaacagaataacttccctttggtgtgatagagaaagctgtggggtgttccactggtcttttgccagcagcaacaaatggtgtgtgtgtgtgtgtgtgtctttgtgcatccatttcctccatccatttcccccatccatcgcctccctgtctatcacagaacatcttaaatgccgctagcaggcattaagctgtcctctccaatttgtgggtttgtgggctagtccagcaacaggctttggagaagttgcttgccaccttattataacatacttaaactcaatagcaattcaggccttactgggtgtttacctaatttattgtggaaatgtggtatttagaccattgattaagtgaagtttgtcagtacagttaaaagaaattagagacactatcattgctaaatcacttcacaattcaaagaagtattgtaaacatatgaatccatttaattataatagtgccaattataagagaaattgtaacgctgaaaacagtggcttttatgtaatcataataatggcatgtatttatcttggtttggcaagttgggcctttctttaatacttggctttgcctaaatagactgtggtttgctgaaacccacaataacccccacaccctccaatttcttatttcagaaaatactgaacaataatcacaggttatgaatgcttgctgtatgcatgactaggaataggacgtatctgtggggcttaaaagggttctcatttacattcttccattggctgaaagtttaaaacaaataaagattcctgtgctaaatattcccatcttttctcgcacaagtgcttgcaggctgggtacagtcagaactctattactttttgtgtctcttgtttttgtttattcaatacatatccttaagtgtcagttgtagcatttgatatgtagtctattaaaacttactgaggactttgaaagtgtcttctgtaaaacataataagaataaatttaatatttgagtgttggcaagcttcatttgtaatgttgaggtcaaatactacctgttagaataacagtttgaaaagcatgtgtgaaaaatttcattctctacttaataaaatgacttaataaaattactattattactgagggaaaggtgctatctagtggtataaacaaaatcactctgcagttggagccttgctgcacgttaataccagcctttcaagctccccacctgctttcaggaaggtaatttgctgcagccacacactgtaggcacggggcaaagaaacctcactgttgctgagtgaatgagcgaagggcgccaactgaaactctacttaaaaaaaaaaaaaaacaaaaacaaaaaaaaccaaaccaaaccaaaaaccttctaaacgtttgtatcttaaggataatttctcatagacacctagaatttatttatccccaaattaagcttcaccaaacaatgtgttaaaaaatggcagcctgaaagggttaattttttattacttgaaatttgatataaaattgtgggcaaccgatgacatggctcagagtacttgattattcttttctcaataaataagagtggcatacagttaatttcagcactgtaattgagcaatgcattctgggaagttgaaaagctctgtaagatgaggaaatgttttagggactaatcatgagaagaaaggagcctttcatagcccgtatgatggtgttgtcagagcgaaaggcagataatgattcggtaataatggcacattgtgaatatttaagctgaaaagatttgggcaaaatgaacagacattgttggtttgttaaaactgaacatttggtctttaggctttaaaagccttctgaacacagtacaacatttttattcaaaatattccctaaaaccagatacttttttgaaagttatagccaacactaccactagaagttttaaaatgatcatttgtttagttcttttttacttttttctgcagaaatgaagctgcaggctctcttttttgttacaaaaaaaggtaaaaagtttggtgtgttcttctttatatctcttttgaaaaatttagctaagggaaacaacaccttcaaagaacattctcacaggaatgatgtgaaacattgaagcaattccagttctgaaaaagtaacgagatctacgtgttgtttgtaagtttctcctgtgcgattagtgagggtcttgcagctggggggctgtgcgtcttctcttctcttcttcttgggtgtttacaacctgtttgttttcattctagaaacgtctgtgaaatgcaacttcatttcccacttggggtgagagttaccaggagtgtgttctggtagcttcctttagtgtaggagaagagctttgagcccaagcccagtccaacctgctcaagtgtgttcttttgaacaaagccggtaaaaagctgcatcttattttagaaaatgtagtatggacaaagcctcactatgttgataatgttttttaagacttcaaaatgtggttcagttagacaggaaaacttcaggaatcaggcttagaacacaattcactctccattgtgcccagcgagcctttgcttattacccatatgttacaatgacagagggaattttaattctggcactttttaataaagtacttttcacgtatactttcatatacaaagaaatgaaacagatttctggggctacacaaatgtttttcttgagtaaaagctgattacttatttaaaatgggctcacaatttaaacccaaataacttttttttttaatgtttctgttctgaagagtttttttctgaagagaaaaaaaatgtcgccgtgtgtttacgctaacatttgcttttacccatatgctttaaatctgtgtatttgcttaagcaaatactgtttatttttaggacagtttaatttttctttgtaactggaatttttagcagtaatattttttttaattgagttaaataaaattgccctacttaaaggacattttcttcaggagttttgaactgtcaaatcctttattaccattagctgagatgaggttggaggcaggaaatactcagagtccaaaggaagaaaggaaagccaaatgagtgtgtaccaagcaaatctgttagaacccgagtgtgttcgtgtgtaccaggcaaatctgctaaaacccgagtctgttcgtgtactattttttccaaaggtgtttttgtgaaaggtgctattccttgtgcttctggaaggaggcacagacttggatgttgatcttttatctgtacaaatacatgtgtactttttcaagtttgacaaggagattggtcatataaatgaggttacatgtagagctgcccattcttattttgaggatatgaggtgaccatttcagatggtattgagagatttcccaggtttctgactttcagagtctgtaggacactgctgttattcgatctaactttccttccaagattatgtgattctcacttgacatttaaggactaattttatttagaaagacactggttaccccatccctcctccacatttccactcctcaaattcacctttcttacccggtcaactctgctgcctatgccaagggcctctaagcttttcagggagaccaactcaaacttcctgcacaaaaattgctccaggaaaattcaccttatattttatcctaagcagttgccatccatttgagaaagcctcttgtttgaaaactaggatcctacttccaagtttccagatggttcttgcctgatacgaggagaaaagcttgaggtgaagtctgtatgggggaggaaggaactttgggtgctgagaaaaatcacattttccttactgagatataaaacagtaagggcaattagacattgtgtctaaattagggaaatcagaggtttcaatgaaattttctaaaaagatattaagtgagttggcttgaacttaactcttcaatgtttttcttaaatatttttattaaaattagctcaattagaatttacttaaatctgacctctaagttaatgttaaccaaaatatttttctcacacttttgcctttttttatgctcaatggcagagagggagggagggagggagggagggagggagggagggccttccttcctcctgctcatnnnnnnnnnnnnnnnnnnnnnnnnnnnnnnnnnnnnnnnnnnnnnnnnnnnnaaggaagaagaagaggaggaggaggagaaagagagaggggaaggaggggtgttctgaaataaatttaaaagacatgcttatgggtcttagacatttcaatacacattatgtgtcaaaggatctgagaccctggtttaacgtagcagtagctgcagttatttgtgcacagagccctttctggcttgtaacccttattaccctcccaaaccacactttaagaaattgtaccctttggtcttttatctgcatttgggtgacgaaacactgttttggcctctgtggtgaaaatcctttccctactgattgctgcccatctcattctgacccctagtctgctcagtctccatttgggtaccaggagcacccagaggggacctgacctcacagccagggtcctcactgtggcttggcccactgtgacttactctcaggacttcacactgtgtccttggagacagcagtgactggaacgattccaagttggtgaaagggtgttctaataatgctccaaggtggcaccacttgctgatcaagaggacagggtgagggtgttgaaaatgtgccctgcataggtcatttcacattgcgctgaagccccttcttataaggtctccattcctgtcccctgctgttcttagcaccagggaagtttagtggccccctacccctgctcctctattaagttgttgttactacttagaaacagactattattgttgagattcatggcaaaagactttactgaacacctctggtttgagtttgcactgtttctcaaaacttcctgacgttgggtattccattatatctgtcatgccagcacatgggagactgaaagctgaaagatgttgagtttgaggcagacctcagctgtggagagttagagtcctttctgggctgtggagagaactgttgtctctgaaatttaaaaacaaaaaacaaaaataaacaaacaaacaaaaaccccaaacaacccaaagcaattaaagtccatgaagaggaattgattggaagattttaacctaaaataaatatttgctataatagcattttataattttttatctacatagtatctttcggggagatttgtatgggtgaagcatgggcaactgtagcaatgttttttaaacattttttcttgtcttcaaaagaaggtttgcttgttctcatttgaggctgatgtcattctatctgaggaaacacaatggttcttttctaccaaatatgtatgtttgtatctttgtaaaagttttagatttgtgggtgtgtacagtccccactggtatgagagataaaagttattttagtgcttgagcaatgctgtgctaaaaaaaaaattctaaaacacatactcaatgcaacatccattttaatcgtcttaacaagtagactatataattccagaagattcagcacaattcattagataaatggcttgcaattttaacagaccacaaacatatatttacaaattattaaaagtgaaacaaggtcctggtggtaattcatgcaatcacattaactaatgcattaattggtgatatgatttggaggcgggtgctgtatatcaaatgtaggcacgatctctaccactgagccactcagccccaaaccttaagtaatatgtttcctgtacccagcaaaagaaatgaaatgttccacatccaagaaatacgattagcagagaaaaatccaactctggcaggaactgctatttgtggactacttaatgtggtgtgtggtatccctacaggagtatgtggggccgggcttcctaagcccaaatcctgccttatgctatgggccattagcaccacttgggaagtaacatgtgcctcagtagttagcacttaggctgtgttttaacaagtctccagatatgtatttacatgatagactatactgacacctttcagtgctatctgtcaatcatggtttaataacgctcctccatacagggttcgtttttattgtctctctatttattttatattttcaggaattcatggtcacctgaccccttggcagccttctgaaagcccacacaaaccttgcttcccagggctggaaagggtgttccaacccttgtgaaagagaaaagcagaagtaagggcaaagccagttggaagggatcggcagaggcgcctcctctcacgagatgctttcattacgtgcttggcagccacctgcctccatctttttattttcctttttagtgaaaggattttacatcagtagatattattaaaaagatcttatttaacatgcagacgcattttgtgcgcaagcgactgactgcttgctcaagagtctaggaaggcttcgtgggaagagcgcagcaatctgagccatatgtatcgggcaggttgccagttgttgccaatatgcccaaaccacctggccgtgcactcagccaagtgtgccactgtgaccagccggctcgaacctcgccgcctttcagggcttaggagctctgaaggcctgagctgtactgttttgccccactgccagcggttcccactcccacaaactgtgcagctacactgaccggtgactcacaaacgcccattttcaaaggagctctccctttgtttaaggcccattcactggtgttgaacccgtgccattagatgagcctggagatactgcctggaaccttcccccatatgcggtagacagacacagcctggctggctctgctgctccccagcctgtagcgacagggtttgagattcggcttcgccaagatttgggttggttttatttgccgctggtttcaatttttattttgagtggttctgacttttgaatgtttggaaacgtttgttcatttgcttttcctctctttgtttagcatagaaatcggtcgagtcgtttcacaatttatttatcaagcgtggtttcataatctttggcaatctaggtcaggcaacaaccagggacaggcaggatcggagcatagaaacttgaagactggttagttctttttgcaagccatagtagaaaaaaaggtttacatcaaaggtctgccctctgtgaacagactgtgagaattgtgtacgcacctgtttccctttttaccttggctcccaagaagctcagagataaatttagtttttaacttcaatagaggcttcggcacgtttcatgttcccattatgtgttttcttcacatctgcagtttttgtttatacgtgtatatgttttgtttatatttgtagtttttgtagctataacttggataggtgtatatttaatgcgattatgaaccatttcttaccttttttttcagaaggtagattaataaataaaactttggcctgcctagcggtgattgttatgtttcagtgagctgttctaggataagcaggtgactggagagatctgtggcaatgctccacaacgtgcacactagcctttggcctggacatgttatgatctcccattcactctgtggtgtgaaggttcactcagtctctccggccttcctctctccagctcaggggtcaccataagctggatcctgaggaactgttttggctccagtttaatcagtcggaatggatattactaagtaagctgcctcgttcactccttcctagagaggcgtcaaatgttcctgaagatttaaaaaatattattataatgcacctttttaattaaaattatcagacacttcaagaaatccatgctatcgttgttgaagtgtgttttgggagcccatttttcattctattaataaggcctgttcagatagtaacattttggccagtgtcctgtgacacgctcaacaaaggctggagcaaggtggagtcgtaccagcaaacaagatggatagttcgtgctggggggagtgtccctgagggtttttgcagcctgtcagagaggctgcagctgtaaccacccatctgtgcaggcttggcttagaccacactacagtattgagtgcttaccctgaggaaggtgttcgaaagaattcatggtatcagtcaaataataatgcccgaatgtgatagggctaatgtgtgtaaagaaaagttcctgtagtccacaaaccctttaccttttgacagatataaaattctaaactctttgcagtattcatcttagtgtttgttttccttcattatagtgaaaaggagtagcaaacactcagcatctccatccatggctagctccgagcgtctctgtccgtgggtagccccgagcgtctctgtccgtgggtagccccgagcgtctctgtccgtgggtagctccgagcgtctctgtgcatgggtagccctgtgtgtctctgtgcatgggtagccctgagcatctctgtccatgggtatccctgagtgtctctgtcagtggatagtcctcagcatctctgcccatggctactgttcaggatctctgtccatgggtagccctcagtgtctctgtctatggatgcctaaaatctgtcataccctaatctcagaggcacatcttagaggttcttccctgtccacatgctgaccctgcaattgaatcttcctgtctatttctgatcctaagtagtactgccttgatcatttgaggatatatttttctttgaaaaatatttgtgtgcaacaagaagctctgtaatgctggacaacgaaagcctgttaagcactactaatttgacattaattatttgagatttaaaaggacatgataagaatctctttataaccaagaatgcagatctcttccacaagtgatgcaaaatcgtctcttgttaaatataggggaagaagtaaatatatttcatcagaatcgtctaaaacaaatcagtaatggagtaaaagttagaaattctattttaaaaggattcgtgtttttttttaatttcttaattttgtaagaaattttgtagaagtttctatagacagctttactgattttactgagctaaatatagcagagatattcttgggaaaatattgtgcagtttccttctatttagcccctccccacacttactttaccatatattattagaagaaatgattacttttgtgtttatgttcaaggttttgtgagagatttgcagtagagggaattttgtattggtgtcttcagtatttgcccaaactcagaggacctaatccttgctgtcatgggaagatccttagaaactgttattttatttaaaagaaaatgcctttactctttttaactagcattagcctattgagcataaatggactattcagctacacactgcctcattgatgaaccatcattgattcatttactgagcacctaaaacccccaccaagacccgtggaggatgggagtcagcatcctgtgtctccccctcctcagcagcatgcacttagcagctttgcagtctcattttctggaagaaaacaaaaaaaaaaagctttaaatgttgaattttctaccaaaaccaagaatactggcacaaaaaccttgttagaaataatttcaagcaaaaggcatttgataaaatctgacattgattccagactttcaaaaattctttgaaatccagccacaaggaaacaagtatccagacgacaatgctgctaccatctacattccatcagtgaaccatgagatggtgcagccaatccagtaacagcaagagtaagaccgagatgatagccaatgtgcagtgtgcatctggagcttttatgatgataactagtgactcaaaatgctggaccttttggatttttattagagaatatagggcagaatatctagtttaaaaaacattgaatacccacacagtagactttaatcagctagctatcgccactaagaagctgtggtagagagatgaaaagaacaaaccaggaaagcaatacaaaactaaagctattcaggaaaaccttcaactaaccaaagagtagtttgaaagtccagctgtgaagtgggtgcattgagctatggaggttgcatgaatggacacaggtgacatctaacaagaccacctgcagcagggaccacaagttatctcttcctcctccttcaagttccatagccagtcatcatggagttctgccaagcttccctctgactagcatgtaaaccaactcccacagttgtaagccctttgctttatgttctttacagcctagactgtttctagaatcctctgtttgctcccattctttccacgccattcatctcttccttacactgttgccaaggtgatatttccaaaaaggaattatcacttccgactggcaccctccattggcttctcatcatctcctgtagacgatccaacctggtgctccgatgccaccatggagaataccatgttccagctgtctgatacagtactgttggaaggctttcttttcccccaaggggctgtgggtgttagtgccttggaactacagaatcagtgtggcacatgcgtgtgtgtctcttttctgcttaggaagatctcccttgagatggatccatagcctggaagactccagcccctctgcagtttttagcttaatcactgtgtcatctgaaagtccatcccagacactgcagagttaggggccctttgtgtacccttaccgtgaccatgatcacacttctctgtcgtgactgttgaacttcactgggatatggatctctctgtgtccttggtatatgactcaagggttggagcacggttggtgtttaaggttatttgttgaaatgtatacttataaatcatttttgggggtgattgctttatcatttcttggttgttttttggcctctggggatctaaacggtgactggaaataaaacttagtatcactcatttttttgtgccgctgctgtagcctaatgaatgtataatgctttctcagagagaaagttttatgtgttacggtatgggcttgtgcttctatggtctgtgctaattgtatctttctgagatgttttgtctaggttgagggcttcagtttatttgctgacatctgcaatcatataacgagattttacttcagctaataaatgatacaaagtcataaatatgtaagcttcagatccattaaaatatttattcaagttctcttatttactcggggcttaagttggtacaactctattgcagaaagttataaaatgtcttcagttctcaggagactgcctagggtaaagacctgctcgcctggcagggaccccagcgtgtaagtagcaggccttcagaggaggcctggcaggcatgcccactgtgcacataagttttagtgtttgcggactgttcatctaccagtgatggtttggttctggagtccaggttttcagccccaccaccaagccttggactttcctatactaaaaatgaagtttaggaattggaaaatgaaaggttcatctctaggataatttctctaattgccccctcacttgcttaactaggttgtgttgggatggtaaagcatggcttccggtggtcctatgtctgcaggcattccacagccactaatcagtctatgctcccaaatattcctgtgtgattaggttagactcatttaaactaaaacagggaattaagtcatatattgtatgtgtacatgtttatgtaaagcagaatagagaaatgttgcataaaattttattgccgctagtttgagatgacatgttataagtggcaaaagccacaaccaattatgcaggtcatctcaactcaatgccaataaaatgcttttccctataccaccagccagcattctgcctatgcaacacttttaaagagaacttcctttaaaattttccagtgtggcaaaaagtttttattggtgccatatttccaacttgctgacctgtaaatatttatcctattaatataacacaacattttaaaaataaattcacagtaggggaccctttctgaaaacatctttctttgaaatttagtagtccattttttttatgcctgaagtatagacatttagtttttaatgttttttttttcccatttcaaaaccaactgtggcttgccttatcctcaagcccttcatgggcatgtgcacaaggaaatgcaatttgtacttttttctaactcttgcctttcttcataaatccatcagactcttaactttgctgtgctaggtttgaactcaggatcctgcacctgctacgcaagcaccttaccactgagctatccatccacccttctatttctggtttattgttaaattctgtcactaaacttttaattgagtgcatattaccttctccaaataagttccaggctcataggacatatatttgatggctttgtgttatatttaagttttatttttttcttcttccttccatcccactgatatggaaagattgtttaccctggctttttctaggatatccattggctattagagatagcaaacagaccaggaaagacctcatcttatactcaaactactctgtacacaagtcacttgggaggaattgtttaggaattctcaaacctctaatgcaagagaaccagagtatatatctacctctaagtgcgagacagctcagatgcaggatcacagacctatcctgagaaagcaaacttatgggaggtgggggaagaaaccactaactggacattattatgatgctatactattgcagatgttaattggtacccatatattccaagtgtttaagaatcacagtgtagcagcatatacagagaccaagaaaaccagaagagtgagttgccaagtccttgatctgaagagaagaatgaatgtgtgaatctagaaccagactaaagcagctataactcatagtgggctttattctttggagccaattcagtaacttttctgaaccttagtttctcactgtgtaatatcagggtgatagtggctatatcacagagtctgcgctgacctgaagggagttcaggtataattgggattcttggatctactcaagggtggacataggctgaggcaatggagtcccaaaccagtcccattaaattggtctcactaattgcttagcatgatgtatcattgtcctctgagaatccctaggtaaatgtacagagagctgcacactctctgaacttgtctttctcatttaaaacagtctggacagggagcgaggaaagtgatgcccttcctttcccatgctcctgaaagcctatcacgcagctttgcgcacctggtgctggcccatccagcatccagtgggtgtgtgagtaccgcctctccccaatagctcttctgtgacttgaatgcttgtcccccgtctttgtctccactccttgcaggccactttgcctttagtagcctatagatagtgtcatgtaaaagaaattaatccctcagacaggcccagtggctagctgcagcctcagcagcagatggggtatttaaggcaaaaatagaaaagtctatgccttttgtttaagcagcctgtgaggctgtcagggtccccacagtcttgtctggctgctttactggtcagggaacggaggactcaaataactgaggacagattcccagccctcccagatggccttctctttaaaggcatgaagagacacattttctactgtatgcttgaatgttttctttgcttgcttgcttgcttgcttgcttgcttgcttgcttgttcgtaaaggtcactaggaatgagttgttttccttaaaatacaatggctgcgatagctgtaccttcagacctctggctttggttccctagctttgaggttttctgggaaggtcctgtcttggtcctgcttatggcattactcactttaccagacttcactgtgaagaaagatggtacagttgctgatacagagtgggtgggcacgaacagccatgtttgtagaggaaacaacaaaatatggtcacgagcaataaaaggaggagtggtctgtgggttcatcattgatttttaagagaagattgggtcagctctgctattccagagactcctcactcttatagggctgtgcttgacactgatgatttgtttttgggtcattgtttcatttccctgggcagagaatagagcccagacccaatctatgttgggcaagcactttgccaatggcccagtcctggtgatgataatcacaaagcagtgggagtgatgttttctccttgcatagtgtctgagcctccctcccttcctgagcccctcacctcttgaggaaataaatacagggattgctcatatattctaccatggatgctgtgcacattaaagacatctggtgctgaccaatgattgaaatccagctcaggggagtctcatcctttcacctttttaaagtctatttggaaaatcatggcgggaagatagggcagggctaagtcatcctctctgggtgagagttggtgtgtgaaaagcctactgcacagagctgacaatcaggacagtcactggagggagctccttgcctaagaggccagattcgagggcactggggcttaatttcaaaacacatggcacaaatgaccacgtgcttcccaactttaaagtgggtgtttggcataatttttacattgtgtctttgctatgattttcttaagtgcatccaaaccacaaatcaagaccttctccaaggtagatacagaataggtagatgcaaaaataagtaagtaagtaagtaagtaagtaagaaactgagaaaaaagtgttacgcaagactaaaaagaagctagggtttaactcctccatccagtttttatttatttatgtttgaagacagggcctccctccttgtgtaccaacactgacctcagacccatgatctgccccagcttcctgaatctggattatggtatgccagcatcattgacacacttgtatatttgaatcctggtgcataagatgaaccatatttcctgagagaatcaatgaatacacacccagaagcttccttctccacatcagtataaactaagctcccattgggtgggaattttcatccctgaaacattccccaacagtggtgaatgaatgaagccaaggcagtttttaacctgaaactttcagtgatgtgggaacccctgacgtccatgcagtgtttaaagtaaaagcctctcctagctctacagataagcactcactctcattttcaagtagttttgttaaagcaaagatactatatatgagttagctggacaactgactgatcaataaatacttcagtgtccgtagagagttaagcataaaatattatgcttaactatattaaaatgtcaattcagaaaaaataattttttcttctgggcagaacagataaatatgaactatcaaaaaaaagtcaaattattttcttttagttgtatgattgccactacccccactgccatattttataaatgttttgaatggtgaaacattctgtaagttccccacacttataatttcctacatcttccctagatcatgatttgctgggccccacttgtggtgccgggatttcccaggtgtataattgacctaacagtgctcatatacctaggaatcgggtataagacttaattagtgaacagtggtaaaacccctcaagagagtctgagtcagaatggaagtgcattgttattaatcattattactattgttattatttttaaatggcttggagccatctctgaatttagcaataaagtaaatgtatctaataattctttctatgtgcatgctctgtggtcatgggtttcacaaattaaatggtggaatacttgtaggatatgattataatgatccaagtaaatgatcctcaaccaattcaaaattatgtgattaagaccccaaggagctacagcaagcagtctcctttccttcttttctgcttggtgttgaccctctgtgtgttaaattatgtgaaagttaaaaagcaaactcgtaacacactagcaaagtgtgtgtgtgtgtgtgtgtgtgtgtgtgtgtgtgtgtgtgtgtgtgtgtgtgtgtgtttgggttagaagttgagagtatccgtgatcccttgtccgagagacaaagaagctattttaggtatagctagtttcactttctgtaagtggtagtgtaaggcttttttttttttttaattcgacatgggatatggtcagctatcacctggacagtcacaggtcccctcctgtcccctcctgtcaagtagctgcattctgtgtgtgcaaggccatgctgcatgtccctggaggagcagcttccactgccaactgtctgctttcagcttgaattatctcaggcagacatcctggctggctgcaatgcaggatgcagggctcgggcctgggaagacctaagtttggcagccctaagttggggagcgaaaaagaaaaaggaaattctatcttttctggtgcttttcccttcttggttttcctagtcgaaatcaatggtggggtcgatagctggctctgacttgttccctgcatgctgagttttcctgatgtaagccttcaatgtctgggctgcaggccttgtgtgtcagggaaggcttgatgctgtcacagccctcctgggtgacatttaattcccgtggtagcctttgtaatccaagaagggaagctgagatcaatttttacaccgtttagttgtggaagaaaattttctttcttccagttgatcattcttacaaaaatcaaccatatttatatatttttctctaaacagcaaaagcgaataaaatgagatctttgcattagtgcgtattttgaaatgaaaaacaaatcaagtcctgccctgagttgttaaaatgaagttgggaatttttcacattcctttcccatgacaaagaatgacacatttaatttaaatatatccattttggggaaacagtaatctctacagtgacagtatcagggtggtatacagtcagctccctgctcatgtgggtttaatgcatatctgacactatatgctggattttatgcatattggataattaggagattaaccattatatatgatgtatattaagaagtttctatttttctttgatttttttccaatggactcttattgtctagattagtaattgcttattttctcttctaaaacttcttttagttgcctgtgtccttccagtctaacatttattcttcaatataatacctaatacctccccccccccccacacacacactgtaattttcctttcattggttatggtgtggtcaatgaagataagatggtaagactgtgtaaagtttattcaagttttgaaagagatttcttagtggattcaaaataggttgtaaaatcattaggaaacatggagctggaaatattaaccactagcttagtagtgcagagcacatactactcttgcagagttcagttcccagcacccacagtggacagctgttaactatatgtaactccatctctaagaggatgagatgcctctggccaccaggggcatctgcactcatgtgaacatactgttacacacacagagacatacacagacacacagagtcatacacagacacacagatagaaagacacacacacatgcatgcacacatacacttaaaagtaatagaaataaatccttaaagtaaattaggaagcaacatcctatgaattatatttctttaaaatactaaatatttttatttgaaataacacaaatatttgaatggcaataccttaggaagaacattagaatcaggccttgtcctcagtgttacatatcaatcatgttgtattaattgaaagggttttatataatctcataaagaaacaggcaaactccgggctttcttctgtactgaaaatctatcattcatgtcttccattactgcactataattatggtaagtgaagcagaacaggatcaatagagcaatttatcaatgcattccaagccatcctagcatggtttacgtcatatcactgcagatactgtcactcagcagagagactttgagtagcataacgaggttaggctgacccatttcagcataatgtcttcctatgtaatgttccagttctgagcatgatttaatgaattgtttcactttggatggtattatatgaattaaaatatttcctgaattgaaatcggttcaggcttcaggtttaagagccctgcactaatgtgagcactgtagttgatgctgtgtctccccccgttcctgtgcctttctttctattgcacctcattggagctagaggatgagccaggtgcctcgtacaccccaaggagcactggtatttaaataaatgtgttgccgttttatttagtaactctagtcttttatctttggccatcacaaaatttagaattctttaggctttattgtcctgtttgtgatttggcaataatagttggctaataaaagaatagtttggggattgttttccccccaaaagtatgaacaatatggtccttttatcataaagcttctccctgtgttgatatggaattattaaatattcataacattcaaaggaagttactgaatcgtgccgtaaagtgttatttatttcagtatgaaaagatattttcggattattggattgtcattttccttttccatatgttgtaaaatttcactcactgtcatttcacttaattcaccagtgtaggaagctgtacaggttttataacgatgtcggtcccagcagtgcacagttactgcttgtattttaagttgttagacattaagaaatgctttcaatgataatgtagggttttttgtttggtttggtttggtttttgttctggttttctatttttatgtaatcaaatacttcaaaattaaatatgttaaaaggtgaaagagtgaagccaaagatgttttgaaaaacaccaaaatctgcaaagttttccttttctctgtttagatgagccttaagagttattgttgggctgagaggtggacgttgtctccttacccaaggagagtttcgtactacatgactgagacttccctgggctcatgagataagaccatgggtacagtctgtgacactcggttgccattgtctagaatctagttctcagcttgcctttgaacagactctgaaacattttgataatatttgtgggttttgtgggggccgagcatgtctgcctttcttttccttacctgctcctggtaagagcctccaacatcatttaacagcttgtctgctaacggcttaaggacacagaatagcagctgcattacataatgtgttctaagttaaggaatttgagatgtcattacccaaatgaagatgtaaattgttttgttggcaaggcttataaggagggttttgttgttgatggtggtggtttgttgttgttgctgtttgtttttttggtattttggagggtttttgttgttgttgttgttgttgttgtttacctgctatcacattgtattggttagcatggactattttaaaccagcattctatttaaacagtgtcagcgaattctgagagcttgccaaacaaatcctcaaaatggttgccaagctgtaagatggctgccaagatctaagcacactgagcaggttcaaaatggtgaccaacttctcagaatttgttggtcaggttctacttctgccagtcccttcccccatgcaactaacacccagaaagaggggtggatcccaaagatgcgagacttggcactaactccttggcacgagtccttgtagtgtcatccagagattcgaggagtcaccgagtacttcttgtttcacatgcttggcaggagacgattcgagggacactggggtgaaaagccattgtaaaataacatggccgtttcctcttcctgatctagtgtgcaccagataattctctggaagagatgtggggagactagacaaggcaatactttcttcaaagagctttttaagcgagagcaaaaagtgttgactaagacttttgggctgtgcctttttgtactgcttgcatgaagtggcacaaactttatatacaacaggtttaagatttattttagttttgcatttgtttacttaagtttatagcaattgcattctggcagttgtgctacttagcagattgaaataaaatcatagggtgaattaaaacatactgctgttagtactgattagaattttagcttagtgtaaataccggatgcagggtccaacttttcagacacttggcatgagctcaatagggatctccaggctacacaggagacagtgtgtgtgtttggatgctttaagaattcttggataggtgcagcagactgctactgctggcacggtggttcattgtgctggctgcatagtgtgctcggattccaaggtagacagaagaactggggaaacgagaataagggagagtagtttgaacttaaaacacaaaacccgaagaaaagaatttctgtttaaattgtagagctgttactgtgcactttggctatggatacaaacaatgattcctaaactaaggtgaaaacgaagggcttggggcgatttgaaggatgccctggtagcaaatacagttttaaaactggggatttttctgagatgaacatatacagatggattagcttctgcgggcagtaagtatagcaaatgaattccttaaaaggggcttgtgcttagcaccaccagagactagcttttgttctgcctgagaccagattcttcaaggtagcttttaattggcacaagcagtttggttggtacttgggtagctttcaaaaaagctgttggtcctaacaggtgctgttgctgttgctgttgctattgttgttgctgataatagttcagaactagaattagaagttacttagtgtgagattttttgaactctgtgaatttggggtgggtggttcagcatggagcctgcttttggctctgcacaccgtaagtcagaagacatctaagaagagtggcttttgatacatggaaacttttctcttatagttagccaaagatgcttgttgccatttaagcttcctactatccatttctagccttttctctcttagtaagcagttgttaataaagacacaatcatttgataggagaagccagattgattgacaatgctgaaatttgaattcaggtacctttccatgaagaatggtagcgcccctttagctttgaatatcagttcaggctggggctaaggaggtgcctggcattggcttggcagtgtgtctgaaggttgcaagatccctcaatacgtttttatatggtctatttatactgttttgtgatattacaccattaaatagcttaaagccctgtagtgtgcacaatgttgaagagattgctcagtggttaagagtgcttcctatgcaaacgtgaggccctgcatacaaatccccagcccccacaaaaaggccaggcatgatgatatgtttctgtaaccccagcaattcagggacagagatgggctgatcctgggagccctgtgactaatggcctaactgaagcggcaaccttctggtttagtgagagagcctgtctcaaggcaataaagccgggagcaagtacccaacaccctccttgggcctccacataaacacacatagaaatatgcaccggtaccctgacatttctctctttctctttctctgtccctccctcccttctgcctgcctctctgcctctttctctctctttttctgtctctctgtttctctgtctctctctctatcacacacacacaatttttgtgataattcttacacattgtactatcacttcttttagaatgcaccgaataaaacctttgttttcaaatttaaaattgaaagttcaggccagaccatcacaagaaatcgcacacttttaacttacaagttagtaatgatgattcaaatgagagtatttttctttttgtttttattacacactagctgatattttagttcatatttgggtgaatagtattgtgtgacagtgacaaaaaaacccacataaaatatgcaatttttctcttttcatacatatccatccatgagtatgtaagcaagtaagattttttttcacactgcttgcagcatgagataattctaaattttagaatataaaatgccaggtgggtaatgttcgtggaagtagaatagagcctatttttacaaattggcaaagaattcatcagcattcatactttcgtaaaaagcacagtagttttcagggaaactttgttcgccttcttatagtcggtactttggtgaaatgacagactcctttcttcgggatattttcctattagcccttccaaaacaaggatttttatctgcaagggttgtttgtgtttgacactgatgttgctgtgtgtttaccatctcatccttttccatacagcccacgtgcatgcttggtgcatgtgctatgtgtctgcctctgtctatccaagtatgtatagagatataaactcctctttctatatagctcgctgtatagggcaacccaaacagctgttagtcctttttatagcttctttaatctatgtgccaacaagtcagtttacaaaatctgttttgttgatgactgctgcgataataattgtggtgttttgtggcttggcaaaaggctggggtctcctctgaggactcttgccaaaggctttgaaggggttgaggtggatccactgccaaaatgagtcaccactctctattttatttaatgtccttctgccaaggccttagacactttctgttttcattcttttgtaggcttccctccccacattgtggttttcttcacagccagaggcctgggtctgccaggataggtgagagaggctggctcccccgtgcccaaagccaatgtgcactgaagtggaaggctttgctgttgtataccttaaatgaatatgtgggctgggttatgcagttatgagttacagataaaatgatgggtttagataaccacgtcctgcatagtcacctcaccctgggtcagggatcctcagaagtacgcctagtattttcctcaagtgacattcaaatcatatgaccaaattttagtggttttcataattgcttaaagcccctagattattcatgagttctggctaaaggcccaaatcttgaaattctcctcagacaaaagagccccatccccctcctttcaagtgccataatatttggcttcgtgaaagtattttctacacatgcctaatagacttcaaagactaatcccaacatttattcctacctgtctagatttaaattgttactcagaagtagactaagagatatgaattgctgatgtgatgactgaaatatattagagatttaaacatttcctttattcagtattttagtatttgaaacacactgggctaaatatctatttgctgggtttttgcagcttaaatacacactgcatttacaaggtgataaaaaaacaatagtgtcccacatgatagcaagcaggagcatggttagatcctatctgaacccagataggttggggttttctttccctttctaagccatagttacaacatcattctaaaatctaataaaccatatatatggaattaagttgaggttgtagtttttgttttctaaatatccattcattgtggtaaatctttaagcatggtacacacagtgaaacttcattataacatcccctgaaaacatttccataaaaataaagtaaaaatttcaaagttcaaagccctaactgtaggcaccaaaatattttccatttattatggtccaagcttttgttctttggggagaacactgtaaagatagctttatttaacacttggtttgcaaaatgaatgctactaaaatgggttattattttaataaaattttcagttacagaatataatgacaaaggtgaagagtgtgaacaagtaagcaagatgagtgccaagttgatcatctcctgcctaggtcagaggtcattgttcaaaaagtcagacaatgagctaagacacttcgtaaacgtctctgtaaatatcaagatgtttgagtttgtaatttctttttggtgtcctaaaactttagattgtctgattcctctctccatatatctaccttagagttgtcacttggaatagtgagaaaatagaggcagtcattaagaacctatagccactctgaagtatagattcatttaaaacttaatttcttgagagtaaggcaagattccaagacagaaattcttttgaatcatctataaaacactcactccctagttagggctcaagctgtgtaaaaagccccaggtcctcttgagcctcgtgtgaaccccataaactaagtaaagtcctataaaccttgtgtgtaccccgaagaaccaaaataacgaaacccagtacagctaattaaaaaatgttttttagcagatgctttctgtgtccacaatttaaatccagaacctgcatttggaagtgaattgctctattttggaaggtataaaccataactagaagtattgaattatagttatcctttatgagcatctaatacatactgcttaagaaaaggaattggactcctttggaaatattattatttgccaagttgtaaatattatggtagaaaagattgtggttttgctggtggtattaataggaggtgtcctggccaacattatttgaaaatagtaatgctatcttaatttatactgaacctcctgccacagatttaaaatgagactcttgctacatcattattttgaccatgtgaattgtggaaaccaggtactattggtctgctgaggcaaaaagagaaacggagttgccaatctgctacgtcatctggattcagaatcaagtatattaccgtttggtggcacccgcttcctcttaatgactgctgaaatgacagggctaaagtgacttctccgagtctctagaactaaaactctggagaaaactgtttccatggaatgacatggaaatgacccaccacagtcctttcgaaagtgagtgactgccctagcagggtacattatggccctctggtctgacttccatatcgatcactgtaatgagaagtcctatcgttactgtatgtaccaagggtctaattgtcttcatgtgaaccaagtcatctctctgcagttcttcatgcctaggcatggtatatgattatagcaatcatttcatttgaagtctaaacatttttcatgattcttcataaactagtactttagatgcccaggaaaccagaaatccctctgcttgttaatactggtagttaactaaaaggagaattttaagtttcttacttaatgtactcttttgagcttctgttactctggccaattccttcctgtaagaattgattgattggttttcatatactctctgtctgctcatccatccatgggtacaggaaagaccctgtcatcatgatgaccaaagattcaggtcctcagtggaatgaatgtctttgccatacctaaagttacatgacactgaaatatctccacgtggccacagtcttgagcgcatgggtgaaatgtgcacttcatccacttttatgtcattttcccagaaactacatggccctctgaaggaatggactgttaacagtgtttgcatcctatccagtctgagtacagcacacagggcctttggtgtacctgtcccctcacgtgaggatcagtctattacagacactgcattacagcttctctctgagttcttgttaataccatacagacctctgaaaggtattacagctgccctgcttggcactgtccataaggttttggtattgcccttaacagataggggaagaaggatgtatcatgggaggagtgggggacaaaatgctcttggggtggcacagtgacatctggttactactgctgtgtcaaatgagtatgcttactgcctctgggctgagttttgcagcgagcacccaattccttgaagtcatcactgtgccgagctgagtggtggggttaacttgaaaagggacttttcatttcagagctagaagtgtttattaagagagaaagtgagcaagtaccttgatgatccctttattgtttttttttttttttttttttttttttttggtcttgaactttctggtctaagtgaaaatgttacctcttatcattatttttgaaccttagatgagctaactcttctgcccaggactttgaagttttccttggatgtatgcagtgtgatgagcaaatagtgctctgcagtcatagttcccaggtctctgacgtagatagagggaaaggagaagaaagtgctggcctcacttacctgtcctttagcttgctagtacgtggcacaggggatggagtgaagacaaagtaaactgttcagctctgtgagagtgatggagagctgtgcgtacagtaacgtaagaggctacgttgcactgaaaggcttggctgagatacattctggaagcgtcatgcacagatttcacagataagcatcccccaaccttgagttggtctacagaccaggttaaatgtaacccgtttcctaggaacctctgctgctccagcagcactgtcttcttcccactctgtgttccctgctgggctcagtgctactgctgctgccgtgatcgcactgcacaggaatactctgagattgcttacaaggctgacttaagtgtctccttaaaactaaccaggaggttttctggtagacaagaggaccgcactgcagatctaacttaaccaaggactggctgtttttaaatagcagtcaatgatcattgccagtattttaaaaaaaaaaaaaaacctcttaaaattattaaatatgtagacatgtgtaagtaaaagtgtgtcagttaactaatcttgtatcccccatgcctctgtatatacttctgaatgcatggagacgtcatggtaagctctaatctgaccttcatggttttacaaacaaaagagcagactctcatggtccctgaagtgacatattatcggaaaaccatgaatacaatttagttttaattgattctcactcttaagtatgcaaccaatacaaatgtgtctccttttaattacttatttgagccatatgagttaagcagagagttgtttggtgagccatgcaaataccttacaggaaaggaatccatcttttatgttataggcctacaaaaataaaacaagctcttactttacaatgttattagtattacttataagttcaaaacataatttataaagggtgcttgatacatgtttgctgatgggaaaaaaatggccacaagaattaaaagtatggaattgaggaaaacaacatttaaaacatgatgaactaagaaactgttttaaaaagtaaactatctctcaagacctaaatgttcactaaccaaatgctattcttaggacaggcaagggaatactctaagaaaattaattcaacccatacatttattaagttgtcctttgtgattagcatggacaatggagttgtgactagagaggtggaaggagtaaatagaggagcaaataacattcattaccatgtcctttggacaagtttaagtccacagatacacgagttaaatcatccgttcgaggaataaaatgtggcagaaattggaatcatcatggacagattcttcctggaagaggcagaaagagggagcaattccttcactaggaaaatatttgtaaattatgctcggttagttcaagtatacagcaaccagatggaagttttcaaacctattttccacagttcttataggaagtgctgagtaaaaggtatggctcctctgtgctgaaaataatcattttaattggattgcttctttggaaacaagacagagtgtattgctaaaagcttctgcgccattttcaatatttgtaataatgtaagtgctacaactgtgcctccatttatatgcaaaggcagtgatgccttctatgggcatggagactggggaagactctaagaagaatgtctgcttaaatgaaagcagacaaaagtattttttaacttcagattagaggaccaactctacttttcttaggagcttttgttcacccaagttctgctctcaaggtcaatttatgtgttgccttttgcttacctaaaagggtgatatgtctgtcagcaccacaccagctacagatgagctgaggtagaagaaatgaatgtaacattctgtgtgatgggctgaaatgttcactttttattttggtaacagagcaaagcttacactacaagaaagtcaggggctgacttagtgcacattaaaatggactttagaccttgaatcactctctgtgtctcttctgccagccagtcaaaagttttagttttatactatgacatttaaaaagatcttatgaagtatttgttaaatcttagcttgagatttgatccttgtgaggaattatgcttactattaaagactttatggtaggataatatcactgtatttaactaacacagctgaaaatcagtttggctcatctgaactttaactaaactgaatttatttcatttggggtatattctgtaaaccccaaacatctttttcttcctctgtatcagaactctatatcacaaaggaagacagtgggctttcacattcattccattgctctgggcttgtttaagtaaacgttcgtggtagtcattcacacttcataactccttgcagcaaatgcctcttttagtaacttctccctggcttgcattgttttacattgacttagagagagagagagagagagagagagagagagagagagagagagagaacatgcatgtgcatgtgcacacatgcgaatgaagtcctacatgtacatgctatatacaaataaaacttcaccagaaagtaaaatctctgatcgctagtgtattttaaacacacacattcacacaccaaggagggaggggaggagagaggaaaagagagagagggggagggagggaaacttgttgacgtgggaaactaaagtttgagagttccagacataagttctgtcttcatttcccctacctgaaataagaatagtaaatatttactttgtaaaagtttctgggaaagctatgtgtgtaaattcagtcagctcccagaattgaccatggctgttggttttaggctgccagtaactctaggatgttactaacgtactaccagcatcatatttgcacggttatattctcttcttgtttagttggtaataaatattgataataagtacagttgctgagaggaagactttttagtgctaaaagattaattataagtgtgaccacgtgaaagatgatagttacagtaacccaaaaaatcttaaaatgcaaaaaataggacaatcatatttatgtgattgatttaattgtcaaactaagtgatggtagaaagggaattaatatttccctaatcactgataacaaatttgagtgaaaatataagtaatgatattctgatagttataaaaattaacaaaagtataaatagacatagatattgaattggaaaatactgtagcaagagctgatctgcctaattatttttcttgtttttaaaaatgtatgggatcaacttcactattaagttttctattcatgtggatagaagtttcaactcagttactattttaagcatgactacaatatgaaggtctcatactaatttcagattatttcttatactattagaagttaaaagtatgtcagtatgccaggaaaaaaaaaaagatgtttttgtcaagactaaaccctagcatcatgtattcaacatcaattccttctcactgtatctactccctgggttttaggatgatactttctttggataattctcatagtagcaacagtatgtgagccatcctgcaagatgaatgaataccttacaggatgtcatagaatcctttttacatgtttgtgtgcttaaagtcaattgtcttattctgagatgtattcattctctaagctaatgacattcaagttcaaggtgaagaaaaagttcatataaaaaagttcaattcatataaaataagccagcagccttagaaaggcagtaaaggtgagttttaaagcttctgttagatcaagcatgggtcagacagatataaaagacagcagaatatataagaagtacaagttagtcaagcttattcttttttcttatttatttattttatgtatgagtacactattgctctcttcagacacaccagaggagggcatcagattccattatagatggctataagccaccatgtggttgctgggaattgaactcaggacctctggaagagcagccaatgctcttaatcgctgagccatctctccagccccatctagcttattcttaatgtgcttttaaatatgacctttcttttaaatgaataaaattagaactgttatatgattccttatgggcatgagttgtgtagcagagatgccacagaacttcaactaatgggtcttaaagttgggtcttttctctgcataaacaatttggctgtgggctgtccatgtgcatgaagctaaaatgtgtacaagtctcatattaaacaaacatatttgttcagtgttttgttagataagtgtcttctggtctcaacagtactaaacatggctcctctcccactcctatacacatcctttacagagtgttaagaggtctttagttcccttcctcctgagggaggaaaaagagagctggcagatagagttcatgtccaaggacatgaaacctgtaaaggccaagacctgaattatcaagtgtgcttgacattattggttaacgctggtgtgtgattccatgaggttcagccaaaagaggtttcatgtagtttgtgtgaagacatttaatgcaagccccatggtgcagtgtatgtggtgcaggcttattggaaaaagttgaatgtcccccaaatcgggcagaatcaagaaattaaagagtaggtgagaaggctacaataatgcaggcagttaccatcagtgaagccaccctgtgctagcatgacatagacctctagatgatggcctccattccagattagtctggacactgtcccaaacataggcatagaggctcacatttaagggggaaccatacctgttatagagaaagacacaatttattgtaccaaatttggagcagagatcagaagctagggttggcttattattgatgtcaagatgaacatgaacttctcatgcccccccaacccctgagaacagctgagaccacagatgggaactgttaggaaacgagaagacaagtggtcttgaggaaatggcgagaagccacgtgaagactaaaacagttcagataataaggaataaaattcttcaatgtgttagcaatgaagacaggatccagcagcaagatctaaatgttcacctaaagacacactgtttttaaaaggcagtttgtacctgctcagatgtctgtcagttgtgtacccgctccttgtgcaggggtaacaacctagaccctgtgtctttagtgttggtggttgtctaccactactgtctgctacttagtggtgccccaaaagcaatgaatggtcgttggctgatttgatctgattcagtagcacgtgttattctcatacatccttcattaaagcaaagatagacatttttctttttttgaacaacaacaaaaagatctatgtagctagtttgtgagttttggattctcctctggtggattgttcatttagttagtggtgctagctgcagtttatagtgaggcattccggaggtgtgactgagctgtttgaatgagactttaaacataacaatactctgtgtgggtttatttcatgtgtttgttccctcttatgtcatttgtggcactgaaaatgagatcacaattcccagagtcctgggacagttcactgaaaggttagcccacctaagtttataggagttttctgtggatggaattagaactaatttccactgttgtttttggagaaaactgtagactataattatgtgttggcactttctgaacagctccctgtattgtcatattattttaaatgagctctgttataaaatgacctttcatgtttggattgcaataatatagcttacactggtctgtagttagcaaaatccaaggatccagtaaatgatagagtgttgacacaattctagctagacttttgttaaagatgactagcacttccctgggtttagaggggagggttggggttggaggaagtagacattctcttttctgcagtaattgagcaatcttgttgaatggaaactatacaacatagagtagctaagaccataggtagcaaagataatagtcacgcaaatgtaaaaagtagcaaggaagcgtcttgtgcaacatttgtatagcagactctttagtctctagtccagcctttagaataaagtaccatctttcagaataaggagcagcaactttagacttctgggaagtgctacccaaaggcagaatgtgcagagagccctcctggacacaccgttgctctactgcatctcacccccatattagtaatagaattttagtgttcatttagaagacagtctgccttaaagcagattgaatagtttgcacactgtgaattgtaattaaagagtaagaggtacttattatgtcaacaactggcatgagaaaccccaagcagcaggtgaccccagccatgtgatgtttgtgacagctaggacccctttatactggcttagcaatctgaaagtccaaattgaaagaagcccgggggctgtgtatttcattagatcccaggggaagtccaggatacagcttccttctgttttcctgggaggtcgccagaaagttggtacagcactgtttctgtcagaggctgaaagagaaaagaaaaagcgcatacaaaacaaaacaaaacaccatacacaccacaaacccatccaccaacttcctgcccccccccaagaaccataaatttaacatttcccacagtctttccaagaccatcgtgatcgctgtgtcagcactgtgttccctgcttggaatagtttgaaatgagggctcaatgttccagcattgaaaaaaaaaatttaatcttcaccagccagtcattcttttggtatacaaccatgagaaatgatcaagcacacatatcagatttgcttgaaatctgtttgtattaggcactacatcatttgtctggccttctaaaatggggtagatatccaaatttagaaagataaaaacatacttatagtaaaggaaacagaccaaggacacatgccatatgtagccccagtcttattgtgatgagtaaaccctttgaagtatggtcacgttaatattatgccatggtggggaaactcagagcttttaggagttacatcatgaaaatagacatcccaccatcatcaccccaactcaggcttggatatggtcaaaaggttttgaccattatctcacttaagagcctgattggagtgaagaaatctcccttttcttggtacctcatataggctacgaggcatccagcctattgttgtggagtttctgcaaccagaaataagtgctttgcctcttttctggatagcacagatatttagtaggtaattctatttatttaattttgtatggtatgcatgtgtatgtgtgggatgtgtacctgtgcattaatacatgtgtatgcctgtggaagccagagatttacatgaaaagtcttccttaaccatcccgcatttagtttactgaggcagtccctctcatgaaacccagaacccacacactggctggctcctgggatctcctgtctccagtgcctggttaacaggtgggtcaccatactgtcctttaccacatgtgggtgatgggatctgaactttgggtctcatgcttacgtagtaaggtactttatctcctgagtcatctctttagctccagaagtgttttttgtaaaaatagttttgaaatgtattgaatgcataaaaccacaaaaaattacccatatggatgcttacatacaggagtacattatgtaaagtttaaatcaagttaaacctaccatctccccaaacatgtagtatttcttttggtgaagaattctaacaattacaactttcaatttttttctccttgccttctgaaatgtatagtatgttgttcccattgtcaacaaagacctctagtgtcacccataccttcttctgcctgtctcaccatcctctggtgccagaggtcccactttcgccatccatcttgctgacatcgattttgaatttgaacctcaagtttcttgaatcagctaatgtgactacccctaacctgccctcagggtatacatccaggaggaaatgttctgagtcccatataaacctagcataccatttaatccctaagtgccattctgtctgaagcagaaggcaaggattctctcaatagagacctaccattttccctaaatagagaaaggagggttagcagttgcagtttatgagatgtaactatgtgtgcaattgtactggccacagggagaattttaggactgggctccatcattctttacatttgctgggcaagtgggaacctctcctctcagagctccattcaagtattacaatgggagagcgtgtttgtgtgtgcatgtgtgtatgtgtgcacaaatgcactgtatgtttgtattcatgtacatgtatgtgtgtgctggtgcatgtgcacgaggagggcagtggccaaggctgtagctcaatgattcaataagactatctggccagtgagctctagtaagtctctgggctctgccttgccagtactaggagcccaggcatgtactgccccatcaggcattttacctggactctggggaccagaactcaggccctcacactgagccctttatcaccgaaccatcttcccagtctccaattggttttgtatgtagtctattgtaaatatgcaaataattgctttttaattttatttttcaaagctaggttcttgactttgttggagggaaactatggagtcgagtactttccttttcagttctttttgtgggatcatttgaaatatcacatcatcaagtaggattatcatgaatgttaaatgatacagttcccagctttggcagaagggagagcgttccattgtatttagccatttcaggaattttagccttacaagaaaatgtagctttttctttcctagctggattttgtttcacctaggagacagaaagccttgtgagccatctcaggaatcaccctggcttcatcctcttgcccagactggcccctccctcctccattcctcagttccaacccccacccccagccacagttagcttgtactgtgtgcaagtgcttatgcaggtgagcggtgccctggtgccctctgggtctcaagccttggtgggaagacagatgggaattacgtgcagtgagaaatcatgccagagcagaagtccacctcagtcagcagggtgcagggccagaggaaggagtgattaattctgccaagagtttgctcttctgctctggcgaaccctctagattccgaggagatatctgtgttgtgttaacaggcctatcaggcactaggaaagaatggaagtatgttttgtgcccaagaagggtgttggttgaagcaaacactaacctgcacgaatccaccaagaccctttcaaatgtttaagagaaagctattgagtaaagttttttaaaagtttttaacaaatgcatttaaatgacaaatcaaagttggtaaacccaacagacagtgtccttgaggggagtgattatgtcacatactgggaatgctgtacaggagatggcattcccaggagctatttctgcaataccaggggggtccattaaccttggcagaagtctctcattcccccaaatgagaaccttttgagttcactatagattatcctgtagtgcagtgtgggttttaaatttagcaaagctggagcctgcagaaaaccaaatcaagaagatgggagagagaagatttgggtttgagccaataaacgtattcatttagggcagagggttggtttgagcctgtcaggcctcacatgcctttcagaagaacggttggccattttcagtttttagaaaatattttcacatatttattttattgctatgtggaatgattgaaacatggtgagcaccagatctccattctccctcccccacccccgccagagctgccccattcccctggtgttacccctcccctgatactgtcccacccttccctggtcattacctaccttcttctggttctaggactttcccctgctgctattcccctcccctgcctgggactcacctctccccctgggactcaccccgcccccatcttgccccctttctcgttctgtccctctagttctatttcccttcccagtgatgctctgagtggtcccacagtttgggtacctgaaccagttcttcacagctgggatgctgaccaagagagcagggaggcctttgttgagtgccctatctacagtggtcaccaaaaggcaccttatcgagtgggtgctcatgaaagccccttgttttttgattgtagaatgtttttccagttaaccgagtttattatcaagacaatttcatagggttttcatttccttgattgttaaatagtttgtgacattgggttttttttaaatatataaataaaaaatgtaagctgtctatttatctgtttacttctttaaagtacaatagaaagactgtacttgtcaaaatgctgagaacgaaggagattttgatacaaaatagaatttctagtttttgtttttgagtttttattcactcaaaaagacaaaaagttatctctttattttttgttatgttttatttatttattattgaaaatagatcttctttcatacagtcatattctgattacagtttccnnnnnnnnnnnnnnnnnnnncccctccccatctcccccagattctctccacctccccaccctcccaaatccacccccatttttttctctttagaaaacaaataggcatctaaataatagtaataacagtaggcattttagtcagtgtgttagtgacacctcagttacttctggtctgtcagagagatactgcatgccccatttattcttgtgcagtcactattttctcaggacataaagtttgtaagaaagaaattatgtggactaaaagaatttaggacttttaggggaaatctcaagctaacttgtcgagcttccttccagagaggttaacaagcccagatttctaatgattggctccggagtgcaggtcccctgattctgaacgtggtgttctttgagggactgttaagccaaatacctccaaggtctcctctctgaagccctcacatttgtgagtacttactgcagactcaacgggataatgaagtgctctggtggaagatccctcagaggttaactttacgtggaatgttacgggccttgtactctaaggtgcagccaataacaagagaaaaagcgagctggctctctgccttccatgcaaaggttatttttcttattacaacaaaactaattagtgggttttataatgtaagaaactgttgctgttagtaaagtttcctcagcgccaggaagcagatggcggcggtgaacagtgttttcttttgccagggtttgtatatgcttcgaaacctgcaagagattttgcctttctggattcatatttctgatctttcttattttaaaacagaaatagaaacttatatttaaacgtgcttccatcatgtggtctgtttgacatatcgtggttgcttgaaaatgttgaataacatttgatgttcctcatgaatttctcttcaccagtgttttctgcttcttctccttggggaaggcaagactctgccctcagagcaccacaacagggacttagagttggttgggaaaagcagcccatgagatctttttgttttgttcccaatttctacataaatcccaacttttctcagagaggtttcttagagcctgcctatcttcattgtgacatcagtgtgaataatttactctgctatctgctagtgagacatgagtctctgttaacttaagtgtctttctggtcattgtttaaactgtgtgagacagctgaagcacatcactacaatatcaacacagcagtggcgttaataacaggacgtgggctgattttaagagcagttgcaaacacacatgcttaggatggtgtggtgtgaagttgttctgtgtgatggagaattagcacttttgactaagactatcaaaccatcaaataaataagaaagaggaatcattaaatgtatagaactacaatataaaaaccaatccgattttttaaaaattatttgagcaaaagtaagaaaaatatactgtccgcaaagtactgttttagctcatttctgatactatagcaaaacaccagaggctagataacttataagaagagaggtttattttgactttggaggatgaaaatctaagcagcatgcccccagctggcaaggatttctggcttcattacctcatgatatcatagcatgacatcatagcaggtttttggacaagacggagataccagatagcaagacagaaagactaggaagagatcagacatatccatggtctcacaaggtcaacttcccactaggtctcaccttttcagaggtgctgcaatggagagtgagcttccaacagacaccagaattctttggggacaagccatgtgggaatcagagccgctgtgaacatgtgaagcctgtggggtaatgggttgctttgaaaggtgatgactttcaatccaagggaagaaaaactgccatgtcttccgtgacccccatgatagactatggaattacagtttcttcacttcacccttcctaacctagtcactcacagatgtgatgagacactgggtcaccttccttccgggataagtacattttaatctctagcttttcctgcatccactgcagttggctttctgtcccactttaaacctgttgtcttgtttctgccacctggtctacggtgccactgctttgttcttctttttaaaaaattataataggattttgtggggttttttctaatccccaaaataatgcaagacagaattggacaaggctgtgtcaaacactattgcttcaatgtcctgggtgctgatgctgccagagtgaagaataaccatctgactcttcatgaaaaggcacctgctgtataagcccattgacctgagtgagttcaagaccatgagcaggaggaaggaaggagccagtttcagaagattgtgcttaaatctttataaagcattgcatggacacagagaccatccccaacaacaacaacaaataataataataataataataataataataataataataataataatataaggagagagaataaaggaagaaaaaggattgctcttccagggggatagaagagataactcagcccaagtatgaggactggagtttagatctctcgagccttgtatctgcctggcagggtggatgcctggatgcctgacctcagtccttggcatcccagagtaagcttactagttagactagttaaatatgtgacactctgcatcagtacataaggtggacgcgatggaggatgaaactcatgtcaacccctggcctctacacaaatgtacacatgattgaaggctgacagtctaaacaccatgaccccagctggcaagggtcttcttggctgcatcacattgcacatacagatacacacacacacacacacacacacacgcataacatactcgcacatgcatgttacattttttttaattaagaatcgctctcagaacctggtaggggagaagggggtcccgtggaagtgggctgtgattggcaggtagatcagcccaccagtgtttcaaacaccaaggatgcagcagcttctccttacgtttgtttttgctttgcctttttttttttcacattcactcttatgaggaaaatatatgaaaaacaagagtcaagagattggtgatttttgttgaatataaaataaacagataagccctttctggtttgtagaaattgctacctcccccttctaccactggcaaatgttagaaaatctttgaacttaaagaaactccatgaggggctgatagaagtggccacttaaagcaccagccgctgccttctacagcgcaagctgaatgtgagggtctgactggccctggccactttgggactaggagggtttccaatgccttgcacttgtgataagaactaattgactcaaccacccacagaaaaggagcttttgctctgagaatgcctgagggatgcatgctgacttttgaaggatgaaccagaatgtatattatttgatgccatatgcaaataattaagaagagacctcctagtaaacatgatttctcagtaaaataagtctaggcagtaataattttaaaagcatgcaccctgaaagacttcacatggctaatccctcacgaattcttactgttgtttggaagacaacttaaattcagaattttactgagcaaactgcctttccatcccagttactgagaggagaatggttttcctcttagccagcgtgagagaggagaaacatggagactgtgtcctatgaaaaaccagcaggaccagagactgaggtcaggtgacagtgaaggctgggtgcatgaccgtgtgacttctggtggcacttggaagacggttcagaatttcagaactaggtgagcatgtgagtcttatggtccaggtttggtctcccttgttattacagtttcctacactgcattaactcacacaattctgaagttttataatctggggcagctttggtgctatattaaaattcagtgggagaactactggctaatcttcttaggatgttcagctgctccatgctagaaggatacacagagattgatgtcttccaagtgtggttcaaacatccaaagcactgagattagcaccatgtgaagaaactttaaaatattgtactgcaattaattttaaataacttagcactgcatatgtcaagggtggggggaagccataatagactccaaatggaactccccaaagtagaatgaattgcccaaatcatttacatcatttatcataaggacatagaagcccaaaatatgactgttttcatttgaagatgagtgaactttgagagacttctattccacctgtggtgatacagaggcgttcgatggagggacatccatatattgtacatttttattataggccccaacgtcaaggagaaaactttctgttaatgtagaaatggagatcatgttgttttgcagatatgtgttaaagaaattctgaaatattttttaaaagagttagtgatatagttcagtggtacagtgatggtctgccttgcataaggccctccattccatttcttacacagtttaaaaagctactattgtcagggtagaaagatggctcagcagttgtgagcacatgccgctattgcaaagcagctgggttcagttcccagcacccacatggtggctaacaagggatccaacaacctcttctgacctccacaggcaccaggcatgaaagtgctacatagacacacatatatgcaagacccttataccaataaaatgaatgaatcaaattttcccttttaaaaaagcagtgttgtcttaaagtctaagctacaactctactaagttatttagtagctttcaaagcataataatttttatctggatgacataatgggtcaagatataaggagaaagctttcattgtttgtatgcttgtgtggtgaagggttagccaaatgactgaagataaaaactcttgcaactcttgggccatttgtggtcattgataaggtagagaagagaagagatggtctttgactttcaaggagaactgcacttgtgttattgctagttgtgcttaacgacgatcaacagtgagtaagtaccttggaatcccttctgtgccttgactgcggccaaaccaacaaagcagttactaggaatctgcttcaggtactgaacctgagagctggaaaaccttcagaggccagaggacttcccttgcttttagcttttccagcttggaaaggtgagagtttacatgtctaagagggaaaaatggttgagttaggaccataaagtaggcctctgagtcctagaaggtctgcccttaccacacaaaacatccgcattgccgtaacccagtcctcccagtaccagaccatctacccaaagcaaccatggcatcctccaggataggaccagttgtattccgtagcccagaacactatatgtttttgtcttctaatttcatttctctctcagtggtaccgtagtccctgtgtgttcacgcactgtagtatctgctgcagaaaagaaagaacatagaaataggcagagttgataccatttgaaaagtggctccacacagtgaacacttagagattggtcactcccataaccagcaaggcacgttatgtcacagacaaacctccatagtcgtgagagtcacctgttaggaggagggaaagggggcgaaggccttcccaaccccacacagccacaagagaaaccaggaagggctggaatccatatttccttgtacaaaactctctgccaaaactgccatttctatgaaagagaaatgaatgaaccaatcaatcagatcgatgaatactctccattttctaccacccatgaaattgttgttgttagacacagtctggttttttttaaacattattttaatagtttacaccatttgcatcaatgccaattttgcggtgaacacccagcttttcacctgtgttaactttgcctaacactctctttgttttattagaaatggtcacctcagtcagcccttgctactaacagtcaggatccagacccctgtaactaaggttaccaaggtacatttagttgcactgaggccactgtcagtaaggaagtacacacagctgtgacagtgtgcagtcgattcttttccttaagcagcaggagatgggatcccattgggagatgttacagaatcccctgcactgttattgccctgactgactcagctcatttgcgggtcagtgccttacctgtcctcattgtctgccccacagtatagaaagtggaagctgcatagtaggtgctgaattcatgaatgggtggattgagtgaccaggcccaaagacaaaagacacggggccagtgtcatttcaggaaaaatggtacactcacattcctccttcagctgagagcagtggcgtgaacatggctactctgaagaatctttggcttgcccatctccctggtcccatctctcagcagtatgggaactcctgcatctagggagatggaaccttcgtgcttaccctgtctgcataaccagccgctctctcattaagtgcctatgcttttcagacaaactgttgctcctcccttctccctcacagcttgtcatagacttattttctgatctggatgtgtcagggccacagtgacttgagattagttgtctcatccctgcccgccatgctttctgcttgactgaattcattactccttagctctcctttccccattcttccttgataggagagaaaaatgccacagtcaccctccatccttggtctccccaaattcctagggatccccaccctgggggcaggaccctcctcttcaaaccttaactggacttttagacagttgtcattatctttgtctaaaggtcatagctaaattgaataagaggaaagctgtgttttccagccgatgcacaaaggcagtattgacttccctaatccagtttgctgaggggtgagagaattaaattagatatctaagcacagaaattgagagcctttgaaaacaaagataaggagacaagactgtattttccctcttcctgggagctctgtgctcaagattttgcaggtgtgccatctgatccatggctcgcatcgatcaaaactgtgccaatgcatatttaatcagcgaggggacctgggtgcattatagccatcatccctatattgaatggactgtcagacttttctgtatgctccacccccctactcgcctctccccctgcccctcccctcccttgtttgggaagcctgtgcattttctgagcggctaaaaagtttctttgtttttagctgctgatgcatacattgccactgacgggaatacaaacaagtggagccctgacgtgtttattttgtctaccaggacaagctagctacaccaggccggtccctgcacaaagggttccaaagcttgaaaaccagaggggaaaaaaagaaaaagcaaaggaaaatactgtttacctcttcctctgtcgttgtcctaaagaatagctggtcatgttagaagtagaaggaaaaggattccattacaagtcacagaagtgtagaagagatatttatctgcaattattttgttcaacagctccctgggtttgatatttagactcaggactacaacacatctttcctcagttctcttaggagttccggttcaccttcatgtcagaaatctggttcaccttcaagggaatccattgaaagtttctgcttttgttttttcttaaaagatggacaaatagttacagctgttttttttttattattattattgttgttttgttctgttgtgtttaagtttaccagggtttgtggtggtctctgttggtgggccttcttaaagtgcagagatctagggggtttgccattgatatcccaagggatgatgggcaccattggccttcacacagcctgagcctccctctgacagaagtaacaccaggtctcctcagaagaagaggcataggcagctgtgagagcttgagctgatgcagctcagcagcatagactagcgaagaggacttgacttttgaggtagcttcttgctggtgaggtaatgaagatttctatcccttggatcagtttgtaccttccccttagcaccctccccccaggctcatgggaaatcgtttgcatacattttgtatcaaagacttctacagatactacagagacaacttccaggctcggacaaagcattgcctgataaacacattttacacacaagtgtctggaataaaaaacagcaagatgaggcagacacttccatcactgaagatacacccctcccccaaggtgggaattagaacactttctgcagaaccgtgctttcatactgttacaccagaaccatgtcacatgtaggttggagttaacgttttaaagtgaaaaacttgcctgatgagaagacctaggtggcagaaacgcgctgttacttgtgatcgataaacttcaaagtggggagtttgttataatctttgcaacagtcccgttaggttaaatgattagtagcgttcccattttatagatgaagaaactgagatacaggaagttaagttagatcactgagtttgtttttaagatgctgctcttaaaaaaaaaaatcatttaatagtctcttcaacatgaaatacaagtagaagaactttgtgttgctcctaaacttgaccagcacaccctcagcagagggtgccctagtccttacgtgaatcagaaatggtttgtatgaataagaacacagaagaggttaactctgttgtgcatccctctccatggatgagttactgttatgacatggatatatatgggaacgcttcagcatatagatgctggtttccctcatctccaagtatatagacaactctaagaatctattagttacaggggggcttacattctgacacgtgatagttttacagtgacactttttacgtaggcccttgtttccctgggagtggataggcagccgggttgatcagtaataggagttctgaattaaatcacaagttatcattacgtgccctatgctcctctcataggaaaaatgaaattcaaatggttatataggcattctagtgtttttcagtaatagactcttgtcaaagaaaatgtgagaaattatttctaccttttcccatcactgacttcacttacatcacaggaaaagatccttgaaacccacttgttaggaagattgacactttagtgagtgagtcgtgttattactcctagagtgaatgaattcatgggttttaaagctaaggagtgactcaccccaactgtcatctcacaatacttattccatttaacttttttctcaacatgttaaaactgcatcattccacagcctcctcgtgcacatagaagctaacacattgagagtgggtgaagagacagttgactcgctcctcaccctaaacactcacatcatcgtacacaatcctggctaaacagatgggcttccaataccagcactgatgccaaaagtctaattcctgcaaagttaatatttcacaaatttcttattcagaaaactattataaaaagaaaaagttttgaggaagaaaaataaccccgattacatagcagtcttatgtagtccttgaaaatgccaggcacgggtgtggttcgaatggatctccagagcagctggcagccccggggtggtctggtggaccccttccaagtagttgctgcacaaacatagccttcgctctccttcgaatacaacatgtgcaaactagccaggtccctctgcagctggctcttcccccactttacctccccatcatgtaattccttcagacagcacacaaacacatagttctcacacactaggactgattgtagagatcaaattttgtatcttaatgtaaagataatactttctgttcaaagaaccatgaagcgtttccattctaatacttaagaaaatgtacagggcctggtttaccccaccacatatctgttctgagaactaggtcattgcacgttaacttctcctcgttaagtgagtgacaggtgtgagcattagttgacctgaaatattggtttggttatttgttataaaattctgtctattatctaggggtgttagtaatatttctgtagttcagacttattgatatattacaaaccttatctttcacctgatcaggacagataggcttctgttcacctgattatatggcactccgccttgcttacctcttaagccctctctgcatgagacccatacagtggtgcacattctcacataaacattcatattccttattattacggtcgttaagatcttgatcccatagaaaaacataggcagtatttctaaatgtagtgtcccaacaataatttctttttctaacagcaactgtgagaaaagtaagcaaaatgtgactgacataaccacttcgtgttctagagagccttactgtaaatatgtcatgacactagagccaagcacagtaattcttaaccttgtactatccatcagagagatattttgtcctatcctatgtggatacagaagatgaattatttaacctacctctatgacgaagtactcaacttctcaagccatagacacagagacttaactacggttttaaagttgttattggctacagttgctgaaagctattgttgatgatagtcagagcaaacacccagctccttccttcctttcaccctctcccagttcttcacttattttcaggacagtatccattctgatctttgaatctggttcatttaggtaactgagaactctgactcttttgaacaaaaatttcactttgtttaactggactggcgctgtgtgtgtttgtgtgtgtgtgtgtgtgtgtgtgtgtgtgtatgccttcgagtttcttcttaatctttcagtttggaagattaaaaaccagacactgaattctagcaagggctttgcaggctcaactttagccaaacctttatgtatgttggtaggctgaaacttagcctgaagtgttcctctgggggtcaaaatgtgtgctttcatggtccatagacttgtgttgatattgcactggctaaatgggaattctgttgctacatttagggaggggaggtggggacactgccatgtgcctgctctgctttaccccattcttggcagcagtcttaagacctgcaaggcattagtcagccattggagagcacatgacttctctttcctttgtacctctgagtatgggaaatgttcctgccattgggcattgtatcctgtaaacagttcttaggtcttctgagtgctgaacagtgctctgtgctcacaggtggtacttgctacaacctctttacatcatgcagagtttccagataaccccacgtcagaggggtacgtctcgctttccttaccagcccccaacaaggggcttacacagcagagatggtggcctttccatcctttgttttctgaatcccactcctctttctctgtgactgtacacttttcagaggctcgctgttactggcagttgcctatcattaagaagctgaaagagaattgagagtttaaatcttgagcagttactgagctctgcggctgggccaggcagaggaaagaacccccctcaggagtctgaaatcaccatcacccagcctccgtcagctgcatcaggagagatgtgtgtacaatgaaagatggatcagacggaaagggattagttctaggtcaaggacaggaagattggcaatatgccatcttttcatgaagcttaattaatataaaatatagaaaagtgacacctatggttttccctcatcacttttaccacattagcatgttttttgtcattttctttctgccaaaaatgtactctttgaaagggaacagggttaagatttcagggattgaatgtgtgtataaacaacaaactcaggttctcttcatcttgtccgagtcaaaggcacagataccaatatgtcggcattaggatttattattattattattattattattattattattattattattattattctttctctggtgattatattgagagtggactatctttatctgagtactgcagcaatatagttctagatgtcataaaaatgcgtagataaatggctaccagttcacttaagaggtcttcatccagctttttatatgcaaaccctgtctattttagttttaaatatatgctcatacattttttaggaacccaaagaaatatcacttttcaaggttagattgatgtttgagatccattgaacaaacaaacaaaaaatccctatttatagagaaaaacagataaccctaatgtactttgtacaccatcgtttagataagctttaagtaatgttcttatccttgtaaaatacagcttttaaccagagagctgttgaagaaagccactagtctgctatacagggattgagaacttcctgtatgaaagggccatcctattttatgtaagtgagtttgttttttgtttgtttgtttgggggtgtgtgtaattatttcaagtggccagaaatcaaacaataattgtccaaaacagaaatacacgaagtcttctgccaggtccctaaaaagtagaaaaaggagaagagtaaagtattcgttttgatagtgttttgacagaagtgcttaggagggcttccttttgtatcagttgtgtgtggatagaaattaatttgtaattctggtcatctggttggctccgtacttaacagcatctgtgaccttttccattcgagcaaggggctgtgtctcctcctcgtggaacagcaccaggaccaggacggatagagaataattatcaaaagatttagggcactcgggtttcatgtagagccttggctttgcttgagctttcctgggatagaatatttgagctagacggcctggggtggtaacattctccgggttttgaataaaacagagaattcatgctccgctcgttccctgcttggctagatgcctcttcttagtatttgtgtctcagtgttccatggatgctcatgcccggacccttgtagaccaagcccgagcctttctatcccactcagttcctggacgcttttctgtggcttgaaattttaaactagctttgaaaatgcctccttcagctcttactgctcgtattttctgtttctctagaggtagggcgatgaaatgaatatcatacacaaaaaaagtgaaacgaaaagagatgtttgcttccaggttttataaaaacgttttgggttcattatccctattttcattaatattgatgaataaatatttaatcccattgtctcttgtgtacctcaattaattgacagaaaagatactttccactgatttatggagaagcactccttataaagatgtcacacctataggaataatttgagctaaggtatcagaacatttgtttgtatggttttaaaccaaatgttatgtctggcaaaaattcatctgttttccagggtgatcaaaaggaatctctttaacatagatttagatattttccttaaattttatgtaatgaaaggtttaagatttgtctagaataaaaataatgacagtacgactctctgaaaacagactgaaatagttttgaaatgtttaacttgtaattttttgtgaaaaaaataggatcttagaaaaagaaggaattagctatattttatttagttggtctattataatactagtttctgtcgttagaatttaaaatatgatttcactataagtttagctgcatctccaaggtttaggcacaggcttggtgtttgtctttgcagttcattctgaaagggctcctctacaggcttttgatacgttaagacttctggttttgtttattgtaacaaatagcaattgtcaggatataagaaaggctcttttgctagagttaaatttttaaaaaccgtttctttatggcttcttatattttaattgttgactcatcagaattttttgttgtatttaccaggttaatattgtctgaaaattctaaagtagacataaccctttttatgattaagatacccattgtctgaaagctgggagtcttttaatatcacagattaatatttctaggtgaaaggtccttgggagcatcacttctttgtttagtgtctctaggaaagacaagagacgctatggctaggtcccagagtcagtcactctttcagtttggtcatggttatatgttgtaactcttgacgttggcttcttgctgagatgaagtcaaattaaaaatagctaattctgaacctgtgacatcaaggtagaagttagaattcacattttacatacatagagatgttctaaattttttaatttcaaataattatttctgtctgttgtcttaaatctctgaattctctttgagatgtggcacatgatttttttttcttttctcccaaacatataagtatgcttgcttcttattctataaaattcttttaaagttccttctatctcattctagaaataaatagaaataattttctaattaaaaaattatgtttaaaaaagaaatcaattaaattctctacatgtttacaagattctgcttttactaataaatgcttttggggtcccccgatgcctcagaacaacaggaaagcatttaccctgtgaaggaagcgttaggctgggaaacccttgtctgggcaactgcttattcccagtgcatgtgctagaactttaggactttgggattcaggagtgtgagcctgagatctgtgctgttgtctgggttgcttttctatatgagcttgaaaatatgtcctttattatgatccgactcaagcatctaatatgtgtagtggaggatgaagctattatcggacttcagtgtgtaagtaatggagaagtgagctcggagaatggttctggagagcttagttactgatccagcacagaggaaactactggaggcttaaacaaaaccgagcatttctgctaaaccctcatgtgcctgccgcacctgcatacacacacacacacacacacacacacacacacaaacacacacacacacacctctttttccatcttttcttcatcagtcctgttatttttctgatgccctcattcttaattcataggctgaaccttttgagaaagtctggcccccccccccctgctccgctttctctcacagaccctgtaattccggctgtattctttatgtttttcagattcaagtcaatctgaaagtcccagccagccaagtgaagctgacattaaggaccagccagaaaatggtaagtttagcattggcctctgagctgctgttgcagagtccacaggggccagcagccaaaggctgccctgtgggcactcacagtaaactgaggattcacagagaaaactcaagaggcatcctagctgccccagtccccaccccagtccctctcgatgaaggctctcaccagaacatttaactctctggaaatgtgagagggggcttggaatcaccaaggcacattcttgagcagcatgaaagaaggatcatggacttcctatgtcattttataatagatcctttcaagtggaaatgtccaaagatgctcattgaaggacaagcagtctgcaggataacttagagcttaaccctattgaatcaccttaagaaagtaccatatcttcaaaggattttcccttttaaaatgtctaaaataaaatagcaagagaacacccagtccctctgttgtataaacggagcaatcccctcccttgtttttctctccttcttcctctccatgtctgcaatagtgggaattgaacccagagcccctggcataccaggcaggtcctctgccactgagccacatctcatatctatgtgaagtagcttttatagaaaccgctccaagaatgaaagcacactttacattcagtaataccttgtgagatattccagatttgtgatatacccccaaagggtgagaagcatagtagtaggttgtaatcgtagattgagcaagaccactcatttgataaaactggccgtctctatcacaggccaatgtattgatatcttaaaaaatcctcaaatatatgactaaattctcagggcatttgtttatttatctaaatattcacccaatactgaggattttggtattaccttagtgataattatttaccaagtctctttcaatgactttatcctaaataaatgcctatgctactactggttcaggcccctcccccattttttgtccatacaatgttatccttctatattcttcatctcctactgcatacgtgagaattcctctcctctcctctcctctcctnnnnnnnnnnnnnnnnnnnnnnnnnnnnnnnnnnnnnnnnnnnnnnnnnnnnnnctctcctctcctctcctctcctctttttctgttcttcattttttcacattttaatctccagtttgttatctggaaaggatacataaaccgaatgatttggtattgtgtgatggaggactcacctaaccaaattggaaattctatcactaattgttcaggacactttttaatggttaaccctggaaactctttcttacaattctccactgtgatgttaaatataaactgacagtttttcttcgcatcctgggagtttactgaagtttccttcatcaaagcttttcttttcttttcttttcttttcttttcttttcttttcttttcttttccagaggcagttaagaaagaatgggagagacccctaagattaggatttgggtttttttgtttttgtttttggttttgtgtgtgtgtgtgtgtgtgtgtgtgtgtgtgtgtgagagagagagagagagagagagagagagagagagagagagagagagcgctgcatattaatcttgttggcaatttaagtagccacatatagagacttgtttctttattttggggcctggctgctgatgccttaaatgttccatttttcataaaatctatttgtactaaggttcctgaagttgtgtccagagatactttatttttatcttaaaaattggtaagctgtagggtgtgtagctcacatatttaggtctggataccactccagcaggttgcgattcatctgtcttcataaaatggccggcaagctgttcacatgcaaatataaaccgagcagggagaggcctggcacacctctctggagctgcctgcaataccgaaattgtgcatttcccatccaaaaagcatcccacagctcagtccagtgtttaggccaaaggcatggtgatatcggccaacttggatgacttggtgctaccttaaggattcctgagtgtggtgagttcaaagagaagaagggtttgtatctaagagataaaagaacaaataactacttttcaagctttggtgcttttattgttgttcttgttgttgttggtggtggtggtggtggtggtggtggtgtgtgtgtgtgtgtgtgtgtgtctgtctgtctgtctgtctgttttaagaaaaagctgttgtatctttagacctctctactggaaaaggttatcatattcctttcttccatctgctcttcgtcagcctcacagatcatttcagaaagaaagataacatttcttttctttaaagacacagaatcgcaaagggaataaacggtggttttagggcaaagtatctgtgtgccctaggtaagcttctattcaccttgactgaccgtgtgtccctctccattgccccagccaggaagtatgaatgtgagtttctgaatggcttctttttgaaagcagaacctcttgtaggcatatcagctatgctctatggacttttggaatcttgtgtgatggcatgacagaatctgttcttcaaatgaagtgggaacacattgttccttccttattaattagcacacacaagggaagatgagctttttctcctaggtccctagaaaagtaatgggaagcaaatggtagtccccaagtaaaccttagagagtggctaaatggcaacacactgcttcacctacagcagtcagccgggcctgctgagttctgtagagctgtgttttccttacacagtctcaattgtgagaaagcacaaatctttgaacaattagagtagtagatggaaaaattttaaggaattatctggaacccagagataaaaataccaacatttctgaaactcaaaattgatgtaatctaatggttaaaagcacctctagagccagacagacctgtgttcaaattaaatagtagctaggtgagtaaaaagcttcttccacacacttgatcatcttgcaagcacgcgagaaatcctaaaaggaacctacaacacaagtattgaagtgactgtgggtgggaatagtataatgccttgttcacaggaagagtccaggggttcttcaggaaaggcttgctgtaaacatcacatactagtctgcatttccatcttggagtcctggtacagaaggaatggtgtcagaaatgaaccagaacttccagggccatcctttgtagatagcctcttagatgcctggcagtacgttcctccttaggtcccgtggtcccagagtagacatctacgttactgtttagctctgtccattcatctcccatgagcctaaggactagtgaacagcagaagagattctgaatttctcggacctccaggtatgtgtgtttcagaagagaggtgtccttcaaagaaggcacactgcctagatttctttaaaaatatcagctaagttattattattatcatcattatttaacctggcatataatccaagtagaatctgtaaaatgctggaaatcgtgttgggaatatagctcaatggtagatcacttgcctagttgggtgaggttccatattcaaacccagcctcatcataaaaagaataaagaaaagaaaccaaaaaaagcaaaccacaaataaaaggaaaaaaacccacacacacaaaaataaactgaacaagcaaaccaataaaaacctgtgaaataatgtagaactcatgacaaaaatcacatgaaatagatcgtacacagcacccaactcttcactctgaacatacaatgcaaggatattgcttaacaaaatcagtatgttgataaatgttgtcggtacccttatatgttatgttttgtatatgtcttcactgttgagttaccataaaggttttttgggggggaggagcttctctggagaagttggacatccaatttgcatgtaggaaaagacctataggtagaaatatctagatttaacccattgtttctgaagccaaagctagagtgagtgggtcaaaattagctgccccaaagcatgtgtggttggcatgagatatatttgatcactctagggaatgcaaatataacatgatgcttccaactctgatgtatcctgtccatcactcatgagagcaaagcttgtgagatatcatttctgcttaatcaaggccatattcagttggaccacagaggatcaggagccagtcagcacagacagacctcagacacattccccactgggtctgacatcagtgaaaacacctggaagtaaaaatgggcagggcaaaatctcatgcacagagccatatgcatcccattcaccactgccagccagtaataaccttaccttagttgttattgatagtgagaacccctgtaagaaccaaggtcattttctttgggctcggtggtgtggtgctcctatgttgcagctctatggtgttgctacacaaccccatgggcctctgcaattagaggagagccattaatcatgacacttgccctagattttgaaattatgcaactctacctgccacctggaaaaatcgattctagatatacttttttatttggctggtatttgactctggttttgatgttgactaattttatttattctagtcccatctcgaatggttaaactcatcaccactgttaaatgttactagaagaaaaaaaatgagctgatcctcaccataattgttattactttattagttatcatttcctctcattcctgtatctattttgaatatttaaatattttccaaacaagttcttcatagcttaagatttatatgtagatacactttgtaagttgggggtgagttaagaaaactgtaaatttctatttctctttggataaacttttttttttttttagtctggtaaatgttcttataaaaagcccaatttaatattttcttttctgtacttcctccacaaatataatagatgtgctatcatattaaatcacaatattaatatcactgaaaaggcagaaaagttgattatttcaacctaaatacattgtgactgttggacggactccttacgtgagaggttatttttgatgaatgggccattttggggtcatttccaaatctgtgaagacaatgtacccttacagcttgcatttttctgggaaagcaggagtggtctggcatcattgacttgtaaagacagtctatcgatgtttcataatttgcatgactttcttttacaattacctagcaacaattattctctgaagtgttcttcagagaaccctgcagggacagacacagtagagtgaccaccaaaatagctgcaataacagtaatgatcaatattctaaaatatgtaaaggccccaactcaggggagacattacagcctaaatgcctgctggttttcagctctgtgtgattaagttccgactgatgagttttcagcaaggcaatggagccagtctctcctctttaagagaccagggactaagacattgcctgatctgaaatgggagtttgaaacatgatgaatcctgaactcctatataacttgagcatgtctggcccattgtcgtctccttagaaattcttctagactgctgagtcttaggaaatacgagtgaggcaatggcatagctcacacaatctacacacaaagtgtggaaagtggggaaggagtcactctaaagaagtaaacaatttattgtctatccacaattttgtctgtgtgagctttagctctgttggctaataacccaaataggaaatgttttagaccccattccctgatttttcagattctgaaatgggctagcaagtgatttctttcagatatttccccacctccgtgtctaacttcttacataattacaattatttaattacaaagtgaagaagaaaaaagggggttttcttttggcttctccaatttgtttgcccctgtgtctcatcagagacccaagagtgcccttttcctggaacattcaaaataggaaagtgtttgtgatttgcatgtggttatacaaatatacccacagctcagggttctagcatttaaactgaagtgaggctgtcttcatccagtcagtgtagtagaagattcacctgttgcttggctgcagctccacctgctcctgtttcactgtgatcccagcatggagctagctagcacaacaggacccattgacagaaatgcctttaaaaggaccacttctctgtacttccacatcaatcaagtagcagcatgaggaagtatcagggggcctaggtggattcaggaatatgggcctttgctgataccaactgatcatttctcatttctcattggaatgagtgagaatttcttattttcgagcatgcacattattttttggacggaataatccagttatggataatagtagtaaatagaatgtagtatgagtaatgtatttggagattcagggtcactaatccagactgattagttgtctgacagaaaaattcatgggaccacaaggatcttgactcctttgctcactccctcttcttcattctttttctcttctttgggttcgtcttagctgctggcagctccctggcaggagtttattgttaaggaactctactgggatggctccaacaaggtggggggaggagcagcatttcctgcagagtattctgctccttcttggttattaattttcatacttggttgactttagcccagagggagccaaggagtctcctgtgcctcatccacgggcaaatatggcaaataaccaaaaagagaagtgtaacgagcgctgtggcgcgcctgagccacagaggaatcgccaccaacaatctctccacacaggacacagtatttgcttaaatttctgtagatattctgcagccagagagcaagcaagtactcataatggtcagagatgaataagaagtttttggacagggccacattagtgaatgggaagctgacactgaaagccagacacaatgatctgtgaaggaaatatcagccaagtggcttgaaggaactctcttcagttctcagaagccattcaagggacagtcttcagggtgcattcagaccatgtatttaggagtggtaagccaacacagacgtggttcaaacatctttgtcttgagaacttgatagcctagaaagggagcaaaaggcaagattcatctatttacatgtcatatattggtcatgtccgttctaagagacaggcatgattttttagcactacacaaatcaaaagcaagtccagctcttaatgcttacctttttggtcaagaaagtgactaataagcatgtaatataactgtcaatattaaatactatgaaataaagtcaaatgaggaggtgtcactattatacaaaggctcacgggagggccattgtgatctgttgccatttgaactgaagcccaaagattaagttgtaaagttggctattattaggtagttctattttagtataacagaacagcaacaaagctgtctctggggtatatgcaacgtggaatatagtatacacaaagtatttattacttaagccaagttctgtactttatctggcaattagtccaaattctgcacacaccctgtagaggtttcagagttagccatcatagtagtgtgtagggggtttaattaggctgtgatgacgtcactgatcaccaagggtcaaaccactggaatttaacccactaaaaatgaaacctgaagagaccacttccaagttctcatgacttttggtgcattgcccagtagttgttttggaacaatgagccagttgtcaggtgctgtcaataggtgcagtaaagatggttgagagtcactcaacctatgaaagtaagcatagaagtttaatcactggggtatcaactgaatccaccactggggccttatgtgagtcactgttgaaagaaaagccaaagtgcattttttcacagcatcttgctattagcagactatttgcctcatgaaagacagtgagtatagaacaattgtcaaatactagagcactggaaaattccactttcagaggtggagtcaaaaaaaagacagttcaggtaagctggactgcagaggactccatgcttcaataagaactgctaaatctgaaggctttgtttaaagagtgagtttctcaggacgactttacttagattgaaaaataagcttgtctgaagatgttagattagcatagagttgacccttttaacattaaaaatgaataatgtcacagatttaaggaaagcagtattaaaggaaataggataaaattcttcaagggtttaggagtaaataatgcaaaaataatcatttttgtttttatgatcatagcacacattcctcgagggcattttatataccaggtgttcaagttctctaagtacaataggctgtgttggaattcagtgtggaagacattgtggagggaagggagcaccttcagactgcaatatagttccagtgcctggatacggagacgtggtctaaggattttcataggaatagtctcagataacagggactttctaagagaattttgtctagaacagtaagagacaatgggccaaagccacctatttaattgctgtgttcctgatgcaggaatgggcctgcctcaaggccttccctctcagtcactggatgggaacaccctggagaaagtgcagcctccagatgtgctaggtggcctgaggagccacagcctggttgtcaggcaatgatgattgtctttgtagcagtactttgtcatttgagacaaagttctaagagttctgcatgtacaagcatatttaatcctatttctaaaagcggatgctgttggtgcgttcattttacagatgaggacgcagggaatttaaatgatttgtccagagccaagtattcacaagtcattccagctcattccagctgctgtccaaatgcttggccattacacatgctattgtggaaagaatggatttcgaatttggcttcataatgcattgatttgtaatgtggggcaagtaatttaaactcttaggcatttggttttctatgtcagaacttccctggagaaatgtattttgttgctggttttggttctaacagtgttagtgccttttgcaccctgtttgtttcttcggatggatactcctctcttatcttactcacctcatcatcttccaggagacctgcctcagttttagtcaggcagccacaggagatacattatatccttaggtggtatgtcagttctgtgagtattgcttatatgaatctatatataatgtgtgtgtatatatatatatatatatatatatatatatatatatatatatatacacatacacacacacatacacacagtaccagtacttgcaactaactattcccaagagatattcagtggagtaaagccctctcaccaccttattgcctcatggaggtgaagcatctcttagttgacatcttgattttatttttggtaaattgtattttatggaaatgtatttttaggaacatttttcagttttggggggaggaagttaaaattattaatatatgttacttttgtggacatttgaaagcatgaaactaacttttcattttattttcctgccagaaatggagagtatccaatgggatttgttttaaatattataccaggtgctgctatgtttgttggatggcataaaacaattacagttgccagtaaatctaaagtgctccagttgcagaaggtggaagaatgtagttttattgaaaaaaaatgtttacttccagtcccaattttttgagcaaggcaataagaattttcaccttacctctttaatttcaggtttgtgaattatttaaaagaactgtttaattctccatttccagcgagcaaaaccaagttcgttaggagatctgattcctggcaattcccacattcacagatcatggtaactccatggagaggtttatcttcttttaaaattgcaaatgttgtcaaaactgaaagcttttcaactgaatgtcttgttagagcttcaaacccttagtaagatcctaacaacaaaaaaagggggcattgatccatcacccattctcaagtagctgcacagaggggcatgtgtgtccattctgttgcaggacttgcagagtgatattgtgagattaactcagcaaaccttagttggaccaagagttaacagctggtggcccctgaagtaaggcaagggggagaatggtcaaggaatgataggctaacatgtacgtgcccaggtagagtggcatagaatgtagctttttgcttattagtctatcccagccaacttggaagtaatagtttggatctatttttttaagtggaggaaagatggattttcagttaagagagatggtaaataaactgttttcagaaatattccatgagagaaattaacacaagatgccccgatcatgagagacagacaaattctgagcagctttcagccagtgaagatgggctacgtgtagattgcctgtcctctacactctgcctgttactcaccctttccaagtatgtctcaggctcagttccatccaatgagacctgaaggaggaccatgtgcaagccagggagcactcctctgtgcagaggatctgaagatttaactctacagcaagagcaaagctcagaacctaatcatttccagctgcactaaatacactggttcagaactcagctctttctacgtgggattcttctgtagatctcctgggcaagcaagaatattgaccacagtgtggaaagactagtcagtaaacactataaattgtttttagtatgcggaatgatttagccataacagttctagagatagacatggaggaaaacaaaggctggagagtgtattcgtggtcagtagccagtgagaggccatgttttgttgctatgtcttccttaggagatctttgaaactaagatggtagttcataaggtactttggaagcctttgaaaggcttgtacttataaatagcaataataataccaaaataggaaatccatccttcttccaattgatcttaaccatgtctacttattaatttatgtgctattctgggtgccaggcagtggggaataaaagcagaaattaaagtcaggcacgctcaagtaaatacgtgagcaaacacagagagagtagggcagatacttacgtaaaatgcagttgtgcttccctgggcgtggtgagtagcagcatttggtgtgcatggtgagggctgggatgtgtatgtgttggaggttattcaggaggcagcaggggtgaagcacaagtatacacagaataggtgagatctttgctctcaattctgaaatgggcaacatttcacggatgttattttgggctttcttatccattaatattatctctaactcgccctgacattcagtgaggaagtctggtctacctagacttcggtatctttctgggagtcctcaaagcaaactctctcttgtggatctcagctggctgctcctgctgaggcagttaggcttagagacctctcctgtcataggatcctctcttccatggtctgaatcttagatgttggagccccttttttatctccatacctatggaaatgacatatgcaggtgactttggtgggcatagggaaaacaagcttcagaagacacaagctacttcataagcaatgctgttcttagacgcactgatccatgccatgtcttccatgagctctcctctcttcctgtcctctctgttacaaatgctgaggagttccagccttgcgctttgctgaatttttcagttaagattcttggcaatctccctttttgattatggtaaaaatgcagcatcaaggtattttctgagttgatggatctggcacccttgataagataataagcaagagttctatcctctggatgtggaagagggaacacccaaggttctccttaagcaaacagagcatgctgatgagaggccctgggtgcagagcacgtagcacaggcatggaagtatctagcctggagggccagtcacacgcctgtttctctggagtgaagcaggctgactgccttgctgacaatcagaaagcatctatgaatgagagagagacagagatgaaattaaaatgtgacttctttggcatccacctttcgaacctaggccttccccactttactctaattcaatttagtagatgttggaaggaaactaatacagttaaaaagaactccatgtaatctcactaacgttcttagaacattgtgctcaaggttttctggtcaaggatatttgcatttgtaggatagttagagacaggtttctcttcatgtggaaagcccttgctttgagaatgacatttccaagctgtcaaagtgtaatgtcctcaaagctcaaataaaatggccttttactctgtaaatattgaagagaaggctgaaagcttcacggtgagttcactagcctgctgagttgggctcagagaaggacatttgttgagtccgttataataaaattcaagcctgagcgatgtaatgggaaagtatgaacagcatcaaatcccccattttcccctggcttccattgctttggcattgctcgcgggtggggtttcctttggagtgaagctcactacatgcatctttgttacttgactgttctcatctccaatttcttgctgtttacggagaactataaaaatcttcacgctaaatcttcacatatcacatttactcatccagccaatatttatttattaaacatctgctgtcttccagataccattccaggccttagtcacaggactggggaagttgacagtggatatgcctttaatggcacagaccagcagtaacagagagaccttttatggcattcagcctttcccagcttcctttctgccacacaaattctctgcttttcttagacttaagagcttctccaggaagaacaaatggacagcagaaagtgacctgaaatactattgaaatcattttctttcttctctgaagagttgacttgaaaatagtttgtttagaattcggagtcacttttgcatttttaatattgtgtttgtttagtggtttctggaacaactgcaaagggagacattcatggctgataaaccccatgagagcaaagacttcatctttcctatctccattttcctgagtgcagtgcctaactaccacagaatttgggctcagtacatttctgctataaacacataactaagcaaggctgtcctatccttgtagcctggtgcacaaacagttcctaaaggtttgctgatggcgaggctgtagatgatggccaggaagtctgtgtatacctggaaaccagttactctggaggctgaggcaagagaatacatttgaggccactctggatcttcagctacatactgggaccttgtcaaacacacagaaaagaaacaagaaagattaaaagcatatggatgctgtccacatccagtgggcttctgttgtgagcacatggttctcagcccttctcctctatgcaacactctagtacttcgatggctggccaaacagcatatgtttttgtttgctgcactgtggcagggatgtatgtgtctgaaggcctgcagcagcattggctgccagtcaaggaggaaagggttgccttggcctggcctggtgagacttcaggcttttatttgagagttgtcattgtctacacattccttgtctctccacaaccagtatatttccccagagctttgccctgacagaagaaaaatgtctatgagactgaggtgggtagcactagtccaagtataggagaagaaattgccgtgtggcaaagatgactgacacagaaggatccttgttctcagagtactcggcaaagcaaaaggagatgtcttaagagcaggcagcactgagctggagttgaacaattgacaaagcaggccatgtctatcttatatcatttcaacatacttatagaaatggtgcctctttgttactcttttccatgacttacatagttacagaacatggggagtttgaagatgtggtgagtttgataggcttcctattggaggagaatatttgtgggaggagttaaatcagccaccaatgtaagctttgccagagatgtggtaagagaggctgagaagtctaggctgtgacatttcttgggaccatctacacctgattttgctccttcctctaactgacctggggaaaggcactgggcctctccatgccccagtgttcccacccgaaacaatgtttactgatagttcttattcttctttgcccttaaagacttggtaaaaatataatatataaaatacctgataatacataagacaatcaaaccacatataaattagctactaaaataattcctagaaaccaggaattcattcattttcatgtcccttcccaaaaaaattaggagcctgcagatattgtttatgttttttttccagtacaacaatactagtttttaggttgcacacagttacaacggtcttacgtgggaaatgaatgctcctctctcatgtggagggcattgtaccatgtggttcatgatttcccctccaggcctacagagtccaaaggaaacaaacaaaaaatcacccccacattccccacagccccactctatctctagtctgaacttatctgatattttaacatttctaagataactttttcaatgcaaacacaccaagtcacctcaaatagccaaaagaaatgcacgaataaagccgttaacttctaacaatatttcgatttacccagaattcatctagggaacttcaggatatatttgtgtgtcattatgtggcttcaggcttcaagttcattaatcctcaaaccctcaaaagcttaggcttttaaacttcttatttggatgagtatatacacaccaggagtgcttggatccactattttcagatagcttttatttgacatttctttgtggggagaatgagtagctcatagagaaaactatgttatgtatccttggtgtttgtgtggccacattagagtaaatgttgggaatcctaaaaacatagttactcccagcaaatcttacctgtatttgctgacactaaaaggaggcatcagtatctgccttcttaatatgctagagtgaagagtctaccaagtatagaatttagatctctgacaagttatttctcagattaaaaaaaggtttgagtagtaattatagatgatagatagatagatagatagatagatagatagatagatagagcatattttccttttcatacgttttgctgattgtaccaagttctttcacctcaccttctcataaatgtcttcaagtgtgctcgcataaaggctcacaagagtagctatgccaagccatttgaaaggcagtgttcttgctctatgatttcttctgtggacactccctagccatcttacacgatgacgcaagttggtagagcagccttccttggttaaatggctcatttatttcactggcctgatgaaagctctgtgaaccacaatgaatcacaacaattatcaatttaattctttttttaccccatattcatttaaaaggcttgctctataaatataaagcccatagataaaaggtttctctaaaaatcactctcttttcaagatgttttcattagttggtattcatttaagtgggttctactctgcataccattaaagatgtgtgtaaatgtttttattggtctcttccctgtcttccacttttatatttcctctataagaggcaatgccattaaccttagcagtgctgagtgtgatcgcttttcgatcagccccatcattgcaaaccactgatccatagcttacattacttaaaccactggttcctaaacagaaaaatagctccattacctacatggaatggagataggctgactggaaaatcctttcacaaagaagactgatcacagagctcatgagctcctttgggaacagccctttcttggatataaatgctgcagtagtagtacctgggtttcttcttttaactctacataaatcttttattaaagacacatacgtgggtgccactgagctgttttggatgtagattgagtctttaagagccatcctttccccacaggcagtgggcagatatagacctaataataatgcaggggaaatacactaattcaggggagacagacaagatgctctgaggatgcagaaggtaaagtgcttcagctcagacttcagatacagaaaagtgagagttcagtgacctagaaggaggtggaggagccaagagaaagaatcatgtttcacattaataaaatagcaccactgaggtctggaagttcatgataatgagttgtgcagaggagaccaagcccagtctaagaaggcatggcggccataggacagggctcatgtttttgtcttgtctcctgagtgtctgcttgcagcacagctagtctcaggtggatggactcgaacccatttgtgccccagttatagcctcttcttgtcattcagtcacaacattggtagaaagggccttagatcaggagtctgaaacctggccttcatgcctgggtcagccacatctagctatgatactggggaagcaaattgtcttttctaatccatggtgactcttccatagttgtagacagaaaaacggtgccaatcacatagctgtcaagcattctaaatttaataacaccaaaaaaagtttccagcatatagctagtgcttaaaaacaataaataattacaaaaaaagagaagaagaaacagctggggctttggagatgccttattccatacttaagcatggggaactcaggttgcaccccaagctcccacctaaaggacaggtttaatgatgcatgactgtagctccagcgctctagtctctggaagctactgaacagctgctctaaccaaattagtgagctccaggaatggtgagagcatgtgtctccaaaaataaggtgaacagtcatgcatgtgagcctgtgtgcatacatataccatgcgcatatacatgtacatacatgcaaatggacatattttgatacctaagtaccatctgaaataaattaattttaattattgacttgaaggttctttttgccatctctcgaagataatttttaatccctggagcctaccagatggaaggagagaaccagtttgccaaagttgtcctctgacctccacaagtgcaccataccatgcacccctgtgctctcctggacacatgtataactaaatgtaataataaagtgacgtaattatccatcctgttgttaggatggcagagcactctgcactgcttagcatttgctccatggcagccagtaagcttgtagaagctcacaggcagtggttctttttgacttagtgtagctgctaaagcctctctcaattgttgatgctataaaaactaaagagtctaatgtttcctcaagtcactgtagtgacagtgacagtggtcttgatcttcacactggttcatatttttacctccctttcccatcttttgaactttcttttgatgtttgtgaagactcacatgtctgaaaacttagtctatcttcaaatatgagacaagaatgttaaccaatgtttgccaaaaaaaaaaaagtcactacctctttaaattttttacttaatttaatctcggtgcctctaaaagaaaagctttcacttaaagtccagcctttcagaaaagcattcttgttcatgggaaatcttaatggagaaaactgtagataatgaatttaaggaaaatatctggcaacacaggcttatgcaagtctgaagtgcctggtgaaatctcagacagtccaaatggaaaattactcagcctgtttcctcaagatagacttgtttgtacagcgactcaaagtttaggtggcagaacggtagatacacatgctgttcttatgagctgtgtttttaacctcctcttagtttggaacgtaagctggttaatgtcttcatttgtgcttcctggattatgagaatggtgcagttctattggactcagaaagtcgagagcctccccgaagaatctctcttaccccttagactttaagtattgcctcataggaagagtgctcttaaagaaaatattgagtctcgtccttttaagatcaaagctttcaaacattttaggattcccatgtagctccaaactgagcagagtacacatcaggtctctgaggctgcaaaaccctctggtctgaagaagcaaaaagcaaatgaattaagaataggagttcatacattgcagggaggctgcagatatagctcagtggaagagtgcttacttaaatgtttttggtcttgggctcagtctccagcaacacacacacacgtgcatgtgggcacatacacacatgcacacacctacctacctacctttatttccacagttgtgaacccacttactgatgagatacaattcatccttaagaccatattttatatactgtggacaatagccataatatatacaatttatgttgtacttttggtttcccctgagtataacaagttaatattcaaacatgctacttaaaatagataagatttatattgtaattttgtgttcttctgaggataacaagttgatatttaaacatactacatcacttatgagtaagaattaaccgtatgtaattttttaaaattgacacaagtctgaaagttttaagaacatggccatttacaaattagattccaaaagtactcattgattaataagaataatagaaaatgccttaaaacttgaccatttctgaatgtatactgtcagagagtcattgaatccattaagactattttgtataatgagcaatccagtgctttctcatgaaggtgtattactaaaatagcttttctaatcaatcttacatacacacagaagatagaacacatacaatatatatgtatatacatatatcttgcatattctaaatatatgtatatgctccaatcttcacttttgcaaagaatcagtggctcacaaatctatggtagagtaaaatgggaaacgaggtaaaacaaaaattgannnnnnnnnnnnnnnnnnnnnnnnnnnnnnnnnnnnnnnnnnnnnnnnnnnnnnnnnnnnnnnnnnnnnnnnnnnnnnnnnnnnnnnnnnnnnnnnnnnnnnnnnnnnnnnnnnnnnnnnnnnnnnnaaaagctattttagtaatacaccttcatgagaaagcactggattgctcattatacaaaatagtcttaatggattcaatgactctctgacagtatacattcagaaatggtcaagttttaaggcattttctattattcttattaatcaatgagtacttttggaatctaatttgtaaatggccatgttcttaaaactttcagacttgtgtcaattttaaaaaattacatacggttaattcttactcataagtgatgtagtatgtttaaatatcaacttgcccccaccccccaaataagtgacatcagagcttcatctgcaggcagcttttggttagttggttggtttgttgttgttgttgatgttgttgttttgagacagggtctccccatgtaactctggctgttctggaacttaccctgtagacctggctgacctcaaactcacagagatagaggcatgtgtaacgatgctcagctgagctttggggtcttgaaggagagcagaagcctagacattatcctcaccaggtctttccaaaggtactaacatgtgcttgggaagctggctctcagccactgttgacctggggacctttctttcctttgagtctcattagcattcctctgaggaaggacttttctcacacgtggcataacttggatgcattatagctgcttagaactaaaaaatggttttgatgtaggaggaaggacaacaatgatgataaggtggggaagtgtgtgtttgacaattgcagtatacctatgcaatgagtagaggcattcatttgccctcatcacgtaaggcagaggagtgcggtccggcacctgaatcctcacccagtcccatatgctctcaataaataccctaggaaaaaactttcctcatagcagaggccatatggaataatgatgtcgacaaattggtgagctatttcttatgtgacactgttaggcacagcagtatgaagagcattgagttctccaaatgcttaatttatagctacagctattatttcagtgtacagcgtcagatttatttcatcagagagagcaattgagaggctccaggacagggactaagtgggaatcggcagcaatgctgggtgaaagtgttgtttctaagaatcttgtttgtatggaaaccccctttgactaatgacagaaaagaaaacatgtggtgtgccttgagtaaggcagtccttgacaggatgtttgagtttttgtgtttagtcttcccccatagtaacaattataatggatgcatcaaaaactaaagcctgcagaccttgtgacccgtcttgtaatcagtgcaagtcggtttagggcagggaagcccagctgcatattagttttattagctgttcccaaacattttattgcgagattgtgggggaaagcatcaacattcttaactttccaatatgtttcctattcaatatgtattttacttggggagtataactaagcaatatgtttataatttctttgtttttaattcatcaaaatactgccttttgggaaaatgatttcagcataggggaagatctcttgttctaacaacctgttcgtcaaaagaagtatgtctttcctgctccttccaaggcatataaaactacagtgcctttaaaggttcaaatcttcactcttcatttgtttttaatgatattgaaattatttttccctattctgatggttatattttatactattaactgaatagctaaatgagctgtgtctggcttttatctctcataatcatttcttttattgatgaagaaactgaggcccagaaagattaaacaccttacacagtccaaatggcttctaagtggtagaaactttgagcagacattccttaaacacctgttttgtgcacatagctttctagctttacaggattttcttaaactctgccctttatagaacatacattctagttgcttgatacagaagattaaatcacaaatacaaaagagcaagtagtgatcaattctgtagagaaaaattgcaaaagaaagaacagcagtgtgactagggtttctgttcaaaagaatcaggtatcaatgtctctctcagaagttgatattttaacaaaatcctgaaggcattgatggagtggggctggctgatgtctgagggaagactagtgcaggactaaaggtagaaacagaggaggaggaggaggaggaggaggaggaggagaaagagggggaggagaaaaagggggaggagaaagaggaggaagagaagaaagaggaggaggagaaagaagaagaggagaagaaaaaggaagaggagaaagaggaggaggaagagaaagaggaggagaagaaaaggaaggaagagaaagaggagggggaagagaaagaggaggagaagaaaaagaaggaggagaaagaggaggaggaagaggaagaagaggagaagaaaagaaggaggagaaagaggacgaggaagaggtgggtgagccaggaaatgggaacctagtgggtcagctcagactaaagcaggatccaaagggcttggaagatttgtggaatcctattgtcgaacacgagcccccagcttccaagtcagaagtgccatcattgctgtgaatgttccaagaatctcgggttacaccatagaaactgatatgagaccagcttgtaccctcaatggcacagatgccatttgcaggatttgaacctagaagaaacaggctttcttgctgctagaaatagactgtggcgatagagcatcaactttcaattttatctctgtgctgtgtttatttgacaaaagcataggggctatatgagcaaatgtgtagtatatgtaatgtcctgagtttgattcccaccaccaccacaacacatacatacatacatacatacatacatacatacatacatacatacatacagagacagagagacagagaccgaaattaagcgtcagctgtgttaatctaaaatcccagtggttagcccttcctttttaaaggagattctagcttgaggaaactatggaaaacaagaggagttccgagtcacgacgttctctttgctaaggaaccataaggacctacctgggaatctgggacagcatggcatattcccaaagaggcagaggatgagacagaagcagcttgagagaggcagcagaagtcacatgggaagagaccacccattttctttcagcttcctggcttttgatccagtctctgatcctgaggtctggaaaggtgactggtgccaggaagttactttttcagcccatgcagatcctccctgagcacagtccagtctcttaggaagaaatgatgagagggctaaactgcatctcctaccttccttcctgatacacaggacaggggaagtagtgagaagagagaagtttgacacccagttagtagctggctagcttggcccagtctccaaaattcatcagaatgtgaacgcaatttgggatgcttgcttaacaacagggcttgtgtcaggcatcacacaaggaaggctttatccagtattagatgtgattaatattattatcacaataaaatacattcaattagctttttaaatttctagttctcaccacaatattcactgcttacaaaagtatatattatggagcaacttggaggtaaatgttgtgactcttgaaaggcatactggacacaagaaagagagaaagaagtacactagaaaacagagatgtgctgaatagaatgaatgtgagaatagatgaataaaattgtgaccaccattttattgtccaacatggtgattgtatgttataaaaatgtattatttcacaatagctagataaaaacaaatctttattttttcctcacaaagggatgacaaatatttaaggtggtacctatgttgatatctctgatttgatcatcacacatgaacatatggaaatactgggtatcccataaatatatacaatttcgtgttgaacaagaacaaaacaaaataataagaatgtgatgatatagcatagagtaagaaagatagtaaatactgtctcaaggcaaaaacggggtggaggaatgcacaggaagagaaggacaacagacatggaacattggaaaggtctcagactccattaggacagagggtaagcataaaggattattgccctgctctcaggggcaccaggctgagagcacctccagcagcctccgtagtaccctgcatggccatggacttcacagactagatctctgcatgtttgaggagcaatgagtatggagactttggattgaaaaccccaagtgcatggccatggtgtctaacaggtgaactgtaaggctcagcatctatccaaacctctatgaacctaagctgggtagccagacgattctcccaaactcctgcagtaagctttgagaatgaggcttccttttctcccaaccctgtgtgaattgcccctctgagggtggaatcaaatggaaaagccattatgtccccagagcctgccctcctattctgagacctggttggctgtaaaagggtgagactggcattcaaaccggattaccttccctaagcaagagagtgtctttcccctgactgttttcagagacacacagtcagccctttgcatctctcggttctccaggtctctgcctacctacctttttgctagaacttagggtttgtggagagctgtccattttctcagtttttgttcctggaaggctttcgctcactcacctacttctgctttagcacctgccactgttcataactaggtgccaaaaaatgggcttggcctttgtatctcctagcttatgaaggttctccacagagtcacttgcttcttaaacttatgctgcaggcgtgctgggctgcagtgctggagtagtttctgtgggatcagtacatccatgtacggacaagcactgccctgccatgtcaggtgatggaaaacacatgcttccacagaaagagtggtccttatgcccaagttggagttactctgttcagcaatggcttagactccagggaaatccttttctaattcaggttaccttcctctaccacagctaagctgacactgtccaaactggaggagtccagaatgtactgaattgctcagtggagaacagactaaaagcagtaagaaaacaaacaaaagccgttggcgggacattatggacgtgtaaggatccatgcgttcttcagctcggatccaaatgactgtgtccctccccaagtccacaagttcaaatcctggtcccgtggcatgttattaggaggtgaggcctttgagaatatggtgaggtcatgggggcagaacccctaaaacagatgccagagagcttaggtaccttttttgtcttgtaaggatgtacctagatggtaccatctctaaggaagtatactgctaaggatatccagtctgttgatattctgtactcagaatcccagatgccagaagtacatataataaatgctgttgtttagaagccactcagttgatgatattttgctaaagcagcctaagtggattaggacagcattgcaagccaagatgtgatataattctaaaccatgatgactgtcagtcactggcatcagcaacgagagatgatgtagaacccagagatggctgtctcctctctggggtttatgcagtgtttctccagaatgaccaggctggcaatagagtcacgtttgtgatcaggataagctttcacgaacctttcacagtgatccattcccaggcatctctgaggactcctgccttcttggggccttttgtaatgagaactaatgtacctgaaatagatctgggagccattctttgtcaaaagttaggaaatataggctgtcttgtcttcctataagtgtaagttgctgttgttattattattatgtgagaagccaagtgctccctgtggaactgggatatggtggtgcagagagcatgactggcattgagcatgggcggcagtagtgtgataataacatcccccggtaatgaatttacccttaccacagatcccaaccccttctgtagctgaacttgaccagggacaacatctcccagaagcctagtagtagcgcctggaattcactggctttcaatttttaagctggaaaaatgtagcgcctgacaggttccctccattttaatctcagaaatgggtggtgggaagcaggtggcagtgaggatcttttaacagtgtgatggatccagactcttgcatgcttggctgttttagtagctgagtccaaagattaaacaagagagggaaatcccacaggaactcatcatcaatgtcactgaaaatggaaaacacagagacctcattatttgtgacacgacaggaaataacaaagatttactttttaaatgagtaggatgggtgggtgtgtaatccagagtccagaggctgcacgtgaaagagaaccatttggtcagcatgagttcttacagctacgacattgtttttacataaagaccaactataacatagtgtggtttcatagtagcgacgactatggaaatttacctttataaggaagtcaagagggcctaagaagcagtttctggtggtttgggggtcaagatggcttagaaccagttaacagttcagcctggcctgcccctattaatcataggaactcaagcagatcagttaaacttttcagcctccaatttttcaggaagcaaagaagttagtaattgactctggctcttgctcacagatctgatataagcacacagtgagtcttcagacagccatcccactgctggctctgccttgccattgcagtgttaaatctggcatcctgcatggatgcttctgtactcccttccaaatggacccaggcccagtcaggcagtgactgagaaccagcactaaggtagataccttgtttcatttctaaataagactaaagaaatccaccccgctgtttagcagcctgccctgcagggacaagctctgaaaccatttccatgcccatgattgtaaagggatagaggccaaatgtttactagttctggaaataccctatagagtttctctatcttgttctttcatgaaccaaccacacacacacacacacacacacacacacacacacacacacacacacacacatatcttgctgtgtttcctgacagattttactgaccaagcctttgctgtgtttatctggcccataagacggcacatctttaaatgatatgcagcttaccatgaaaccatctgaacagaaggccatgccacagtggactgaggggagattgctagtttaatgtactgctatggggcctatggattgccgatctttatctccttctgcagtgatccacccttcaaatttaccactttagttagtgtatgtggaggtgggatcaggtgtaatttccaagttcaagttgtgggagtcagttatctccactgtgtgagttccaggaattgaactcagggccctgggcttggctgcaagcacctttacctgttgagctgtcttgccccaatccacaaatctaaaagtgacttttccttttttgagtctttttatcttcccagaattccccctctctctttccataacttcgaataataagagaaaaattcaagagtaaaattaaactaaaaagtaaaatttaggtagatgggatttttttccccttaattttctattttataaaatgacggtatgaagtagaagcaaccattgcttttctttgtcatatagtagaagtctgcttttaaagacattggcttcaaacacttaagaatgccctggtggttttcctatcacagagactgtttgcaaaccaaatcctatcggactttctctgttaagagggatctcgggtgaaatggcaaatcagtagtgtgtgtgtgtgtgtgtgtgtgtgtgtgtgtgtgtgtgtgtgtgtgtgtgtgtttggggaatctcgttggtgtgttgggctggtggccacagtctggctactgtagatgtggtatcaggctttaacaaatctattgctgaaagcataagatgctgtggtgagaacagaccactggatgagaatgggctgagcctgcaaatgttacagcaaatgtacagcttgtcagaaactcattaatactttaaccaagctcaaaccaagaagtggtgcactggaggcttttcccctggtcagagtgcctggagaggagacacgctccttccattcaacataggggagagaaaggaggtgggtgagagccatcaaagccttctgcccagcacactcctatgcacacacaccccacacaccccatgccaataatgttcctgttcagagagagagacagactcttcaacttccttagtgtttcccaaagtcccatctctggtcattaccagctaaaatgctatctgctttactttggttttctgccccttctttccttctttcctcctccccctcttccccttcctcccccttcttctctccctccttctctggctcaccctcctcctccccctacccacttctcttcctccccttccctcctttgctgtgcacctctgaatttcctaaacacctttgaagaaatagcttgaagctctcctctctggtggcttcctctctgtgctccatagcccttgctgcaccaggcgctccccctggggagtagcctcctctcacacctatgcaaactacagcaggcagctgtgcagttttcattctatagctctggctctcacaggacactgctaaattataggcccttggtaagtttagttgggtgaattaataatatataccatgctggagttgggttgaaaaatcagggtttctgagcaccgtggtgttttgtgaggggtttttgttctgtgtcactgtcctgtgccttgacagatatttagaagtttccctaaccgcttgtgactaaatgtcaggaaccctaccctggatgccacacagttgtgacaatcaacaactgtactcagatcttaccaaatgtcacctatggaaaaagcacaccaagatactttgaaagaagctgtgtgtgtgtgtgtgtgtgtgtgtgtgtgtacatgtatgtgtgtgtatgtatatgtgtacatgtatgtgtgcatgtgtgtgggtgtgagtgtgagtgtgtacattgtaacatcagtggtttgctaactgtttcataaacaggtatgacgttcttttcaagttagcaaactgtgtacgccaaactgttgatgcttgatgttgtgagcttctacagcggacagaagtacagtattataaaataaagcatctcttctctcatgagagccctttggagtcaccgttgaagtcagaggtgcccagaagtagcactagcaaaccttgaaggtggagcctttgccaggcagtgctggagactgcattaattcaggcaatcctcactctgtatgtagaataagatattgaggcccatatttattacattacttgctccaaggccctcagacatcagtgaaaatgagctgggactatgtgcccagtggtatgtctgcaccctgtcctgggctgcccacgtctcccttatgggagtcttttgtctagtggagaagaaaggttcagggttccgcttagaggtggattgccaccaagatgtgagcaactgtgtgttccccattctatgtgatagtctgccctctccacggttcttatatctggtaatgatatactggatatgtggggacacacagcataaagggtgtgctctttgggtagtgaggagagttcaaagaggtaagctctggacatgggagaaatttgtgtttctctcatctttagtacacaggaagccattgctaaagtccacatccctcaagggccctcagatcaaaatggtgattcagtatggctccagggcctcattgggtttctttatttcccaatttaattttaatttcaaaaccccaaatgagtttctaaattttgcactctctctctctctctggtgtgtgtgtgtgtgtgtgtgtgtgtgtgtgtgtgtgtatggacacatgcagcattgccgcatgtgtgaacatttgtgtatacccatagtagtgggtgtccaggcatgtagaggccagaggttgactttaggtgtcttcctctgtcgttgtccagtttatcttctgagaccagctctctcattgaacctggagatgactgatttggcaagagcagctagccctcaagttccatggatcctctgtcccaactctgacttcttacaagcttctggggttccagactccctcctctgcttgctcagtgtgtactttactgactaagtcatctttacagaccacagttcttagcagccttctgtaattcattgctaaacacctccccagtactttgacctggaaagaaagttcacttggcaattttttcttttttacaggaaggcttattttcttcagaatctcattttgatgctaaactacaaataaagacaaatcaacaaccacaacaaaaaaaaaccccagattttaaaaaattcttccgcactttctatggttctctctcagtgtttactactaagatggcatagctttgatcttgtgcatttgagaagaaaaacagtaaattaagcagtggtgaggatagataaagttgaatatagtatggcagctgtactgagaaggggaagtgacattgagtaatagtgactactgtgagaaactataggtttcctgatcttagaggaaatgaatagctttcctatggggtatggtgaagaataaaattgtcttgggctaagaggctaaagtttctgttgcagtacaatcactgttataggaaagcaaacaaactactatctgtaggccagaccaggcgtgtatacattcacagggatgagagtgttgccatcctgcctgtagcttcacctgattcttttccaaggcttgggcctctgtcgttggtgtcccttcacacagtttgggaatggtgccgtagctgatagtgaactgcttgcttgagtcaagatcctgcctggtagtcactgtttatatgaccttgagatacttgcctgaagactgtaagtctgtactctgttgctttaactgaaaatcaaggctattataggaaggagaaaatggcactggacagagcagagataagtatcaggctccgagtactcagaagaggtaagccctcacctctttctgttcacttgtgcatacatgacgagctgagtcacctcttctcaccattgcgtggctaatactgcagggctttgtccactttataggctgtccctgagcctccagagagccttccctgtccttccctaagagccctgcacctttccccatacttactcccagatggcctccctcccactggattgcaggtacctgaaggcccagcatatacaacctcatgcctgcctcaggacccagagcaaagggggaagcaacaaatgttctaagtagattaatgaaagtgcagttcacttatttcaggtctcaaagacggtaactgagtgggatccaaacctatgtaaaggaaatgataagctatacaattaaaaatatccccctagtaatcagtgcatgggattatgatttgaagctgattgtttctcaaacaaacaatgcctctgaactcgctgaaatgacccacatgtagaaataatatcagaaggtcctcactgcatctgcctgaaaaggtgttgctactaacctgagggaacatagtttattggtttctgttctgagtttaccacctatgtatgcctcataggttagcatcggtaagtgtctatggaaagagaaaattaggatgtcaaaaaataatttaggaaaatatttaaaggacctttaaaaagaaaccacatttgacttctaacacttttgatggtaattggaaccccagaaattagtcccggaccctactaacctgtgtgcaaatgagttgcaggataatgttgacttcgtcaactgtggccaaaagggttctaccttcaagttagccacagtttgcgtccttcctagcactgctactaagattagtggcagaaactcctatggtagcgaacgacatttcgaacgaattgacagtttacatctgattagaacttgctttctctgtgatggtattttaggatgtaaatgaagttaaacacatgcattcacacatgcatgtatgcatacatgcaaggggttcctgcctcatctgagactgttctgcaaccttgcagtgatctatgggtttccttgggttagggacagaaattgaacaatgatgttcaattacaatagagatagcccattgtaactctctgacagaaggacttcatgcaacttggcactgagcgcctgcccttacttcttactgttaggaaaatgacaggtattctctaaaatctcagaataaccagagacagcaaacattgagaaagagctggaggagttaccctagtgctgcaccaacagtagcttgggccatcattggacttgttggttgattgacatcatgtagctatggtagcctggactgctccatttccatggtggcagtctcctctgttagcactagggacgtggggtcatttgggtcctaggttcagtcttatttctactgcatctttgtgctataaatagagagcagaatgctcatatctttcccatttttacatattactttagatttctgtagcagctgtagagttttaatgcctggcttctgagaggtcacattggagcattggattcaatgtttcagatagttccataagattattcggtttcaaatacatgatgcggtctgaaagaggcatttctccactagaggtgaggaagggtgtcaaaaagagaagtccttcatgggtttcctagggaaatgccagcagtcagtggtgaagaccactgtgtgaggtgggggcgggcagggtgctgtatcctgcagtgaacgggatctgtctacactctggaagccatgcccttcaaactgctgatggccctgatgagaagcggtgcagtaattctgagaatgtgagcatgctgtcttccagctgagtctgagagagactcagactattctgtgagaacaaaggttctgctccctaaaatccaagagactgcctgcatcccagagtgcttcagtgatcaaagtcagtgaagtgaagcatgtcgatcatcctcctgcctcaaagccaaactcttttagcattgattttgagctgtgaggaatcaagacccccatcggtagtgaggctttccgacagctctgtttatgctgaggcatggagcggagctgaagtgtggaaccctaacaaaaacgcgtttttccctcacttaatgataataatcgcttatatcctacccattttaaaccatcagaagcatttcccattttaagaaatgtaaatggattttatttgaaatatattttagagatcagtttataaatacctattttctattgcaaacagcatggacacatttagatatcaacaggagttttcaggaaatcagatccttaaaaaaataaagtgaaaccagggaagggaaggttgtttttctttcctcatgaaaaaagttagtcttctgtcagaaaaatgcactctatgtccacttaaaaaataaattgtactgaatgttacaaatatgtaatgtacttatgaataagtaagattatattagggattatatttatacctatttaacgtaacttagaatctctttttaaaatttatttatttatttgtttttgaggcagggtttctctgtgtagccctggctgtcctggaactcactttgtagaccaggctggcctcaaactcagaaatccgcctgcctctgccttccgagtgctgggattaaaggtgtgtgccaccactgccaggccgaatccctttatttttaaacaagccagtaaaatatatcaggaggtttgttttcagcaaattttgtgttatttgctttggaaagtaatcttatttcaccccaaaatttactcaaataaataaaataaataaactaccaatgttttcatttatgcacatatgtgaatatttaatgtccatgtcaaaaggacagaagtaactagtttttttttctattacaatttatataagattcatgatgtgagctactctgtgacactctatactcaaggttctttgctaaacattcaaaatttactagatcattatttttaacaacaaaaccttctgtggtagatataacagttagtgccattttatagataaagaaattagaatttaacagtgtaatctaggagtctcacatccatggtttgtctcctactttactatgtataagtaatacctggcaaacatagtttttgaatgacaaaataagagaacatttgtgcctatagttacttctatacaagaaaaaatacgaataactaaaaactatcacaagtagcattttttattattgcacacctgaaattaggcttaaaacctgtatacattaaaagttaatactggagaaatttgctaaacacagcaaaattaacttcactttaagtaaagtttcccaagcaatggtagcagacactggcaggtttgggactctgctgcaagccgacactttgagggaatgttcttagcaaaacactctcttcaacggaaattaggtcagccttctggaacatttatcatgtgtacctgtcaccagccagacccagtcctaaagtgaactaagatcccacgcagtggtccttccttctctgagagctgcaaagaacaacataaaccaatagttctacaaatatgtgagtttggcagacactcccataaaacgaaggccaacacccatagtgttgctctggggattgaattccttaatactctgtttatagaaatttgaaacagtaaatggattcggtctgttctgaaaaacactctgtcccatggctcctttggaagaacatgtacagttgctatagaagggtgtgggcagatgccccaagtctgagttggaagtccaagccatcagcccctgtttgttccacaccactcagccaggtaggttttgccagacacaggtgactatttgcatagttgcaaggccacctctgctgaagctatgtcatcgctaatttgacattgcaacaagaggaatcggcaaaatccagagcagtggaaggttcagatggagcacattgtaaaaaccagaacagcagaagtaagtcatagcaccgtgtgctttcagccatcgtgtggcatcattttggtggtgtcagagcgtctgaggagtgagaatgtacctgcgtcaccatgtgtgtgcttcagcgtgtgtgtgtgtgcatgtgtgtgtgtgtgtgtgtgtgtgtgtacttcagtacacagcatgagggtttcatgaacttaaatgaccatatatctgagccaccatcccagtatcagccagattatgttaacctctttggaattcatcttttcatatcccgatgatgtagtgaacacacacacagacttaaccttgctaacagattcatgaagtaaggtaaaggaaagggtgacatcatgaaatacttaactcagtcacaggaatgtacatggcaagataaaaaatgacaccggtagacagtgttcattcgtgcgcacgcaccgagcggggatgtgcggtatgtgctgcactgttaaagtgatagaggaggctgagagagtgacgctttccagtttcttccccattccatccacaatccgtgccactgtgtgtgcaagtgcgctcgctcacaactctctctggtagttcaccatgaaatgcccatggtagacattcttcaaacactcaagcagagcattattaaagttttgttgtctttgaaaatcaatatgcaaaaacaaaataagttttaccatgtctttgttgtcctgtttcgtatgagaatcttaaacagctgggaaagaaaatgggggataaagaaatccatccatgattccttgcttcaaagaaaaaaagaaaaaagaaaaatgaaaactggaaacaaaacaaaacaaaataaaaacctttccaactttcttgatcacacactctattaagccaggaccaggaaacaatttctaatcagtgctgtgatctgggcccagatcgtgctggccttttgtatcgggcctcagatctgtactctcttcacacttactcacttccagctgttgtcattgaaatcccacataatcttccaaggtcgaagggcagtcacccatggctgctgcagttaaaaggttatgctgatttctgttgtcaaatattggcccttttctcttccaatcactcccatgctacttctctttaacaagaagaatccagcctagaattgtattacatgactttaaagtcttaaaaagtgttccttcattgtacttacccggtgtggcctgaatagtctaattcattctgttatatttcacaaggagctatctagtgcctctaaaatactttgtgtttgtgctaggccagcaaattcaaagtatcatggcctgcatgatttgtaacctgtaatggttcctgcaggaatgtataatatagactctatgattgaataaacaccacaaattatggcattagtgatagtgtgattcttgcgagaattgtacaaagcaaaatgcacaggcagaagaagctctttgtgatcttaagtattacctgatgctatggtatttggaaaactacatatccctatgtttaaaatatctctttagattatttctctctgtagccttggaaacgtaattgaaagcattttttaacaatgtattgcttcagttcatcaatgattttctatccatgcttagtgaaccaaaatcagttttgaatgtcttaaaattggcacgtagctgcaggtcaccatctctacctgtcattgcctgtgtcttatgctggtttagcaagctgagctctgttaatggtttcagagccacatgaattagacccagaaaggaaaggcagggcgatgggccatgaaggatttctgctgttttacactcatgaaccagggtagccctggggtgatccagttccatgtctgtttcatttaagataatcagtttcggatgtattcagggaataaatttccttatttttccctaatatatgcatgggttcatagtagaggctggagttacttcaaatagttccagccatttgtcaattaccaattgttactgtccatgtgtgtagacagttttgatttagaacatgaaagcagtaagtttggtccaaacccccccttttacttcaaaacaaggttaatttcaaaataacctgaaacccatcaaaattaatttttaagaaatcaaatgtataaactgccacttgctctatgctaatgatagtggcttgacttagttgacgtgaattgttctccatttgtttacatttcaatggcatatttgaaaacataatcccaaaagttaatatttctctgctcttaaacaagttttcacttgaaaaacactcatttatgttgtggtctaaatgtttagggaagacagggaagttaatttactatcataaaaacaaacaaacaatggatggaagtgttttcagcctggaatgggtggcaggatggaagacagagatttattctgtctttacaaaagggcaacattgaggtgttttgaaatttaaggagaagaaacacatacttaatggactgttttaaaagcacttggcttttattaatctaaatatccttgtcaaaacatagtattggtcactccacttggccttggtgttttcttctgtttctagggtcatccatgatgtcatgcgtcaaatattcacaaacataccaataagttaaaaagttactctgaattttagattttttgctaataaatatagtccttgaattcagacaataaagtctatctgaaatcctcagccaattaactttagtttactaaatgccactaatagttaatacagaagttagtaatgtgttacctgtgatcgatttaaaaagaaaatactatgtagagaaaattaacaatacacattcttctccaactctcccaccgtctcaatgatcttaggaaaaatctttgaatatctcaaattttcagcttttacttccaccaaaatcataatatttccaagcacacagttgcaatattatgtatcttaaaattagtctccaacaaagtaccaaacatggcaaatactagacagattatacacttttgataaaattgagtactacccacagaggaactacagaaatattcttcagatagggcccttgctttgtaatagctgtgtcttgctgaacccatcttcctaatgtagacacggtaaagtgattgcaaagtgtgcagtgtccttcagtcctgcagtgacaacgttcagtcaggttccaggacccccttagcacatggcctgtgtgagggagagatgaagaggagtggtggacttagagacaaacatctgccccgaagaaagcccaccctgccagatcaccgggagagagaaagctaaagcttaagaagggcgtttattgcagaaccagagacttgaggttgcaaatggtccttgggaatttaatagtgttttccaccttcagttttctgggcaaccttttggtttatagatatttggtcattgtttttacttctgatagaatatttcagagggctgttcttcataacacattttggggaacactgataggaaccccaatatggagactagaacacaacaggagtagcaggcaaggcacttttgcccacaacaaagagagtgtatgtttgggacatattggaaactaatgcctaaagaagattctctgagaggctttaaccatgtggctaaggactctaatatatattctcaaatcacaaagtaatggtggcttttatttagatggaacctgactgtcatacactgtccttcctctactatgctagtaatcaaataggaagttgacacttagcaggcatcacaaatacttatacctacaagaccttacagcctctatatgtctgagcagatatgtatagtagaaaagtctagggggatgtggtaaatctaaaagctcatgtccaagtacaatcgtcccatctaaaatatgacaaaagtcagaacattgctagtgaagcagatgtttacagactgggactagtctatgagccctaatttctgatattttgaattcagaagagaaaagtcagtagttatggcttgggtacatgcaaagttactatagcaactagaatatgctttggtttgtttcaactaggttactttcaatggaaaataatgtgtaatatcttttctgtgtccttacagatagataagtgaattcttcatatttttaatacaaggaattattccagaaatcagaaatatcacaaatttctccaataaatggcaaataatttagttatcaaacaacttgccatatgaaatatgtcataatataaattatgctaaggttaaaatctggccttacttgaagccatagaagtaaacacctccatttaactccataaagacctgttttctgagatacccaaattgagtacagaaacagctattactatgtcagtaataatatagtaatttacatgcggcaatagaagcccactaagtaaggctatctaagtcattgaacaaatagggcatagatagaagggagttgtgctgggccttctgacgatccaagttcgtaagctacaacaatgacattctggattattgatagagttcagagatgatgtcaatgaagtgcgcagtcaacttacatccataaccagacgagacctaatgattcaggacagggagggccttggtatctgaacttgagaaacacctagtctcatatgcagtctcgactgtatcctccgatacagacttccctgtgtggagacagtcagcttcctctgatggccagccctcaaaaatgacatgtctctggctctcttccccatccactgggcagttcagcaaggttgccacatcccagcatatctagcttttcttgccctgccttaacattcaaaggtaggtagatgttcagtcctcttgtaagataagatttggtttccagagaaaggtattttctgaaatcattgctaacatctttgaggtaaaagaaccactgcttctaagaagccatcaaagaatttctctttacattcagcctctccagaaaggcccctccccttacaccgagaatggctgactcccgggtctatgaaaccgatgctgtacttgtgaagtcactgaacaagggtacaggaactctttagtcataaaatataaaaaggaaagagacctgctctattcaagtctcctatacagttctgaactcagctcaggactttgagtcagatcacttaacagcatactgctgcatgcatctgtactttacagaagtctgtgttttccagttgtttctaagaggccctgttcaaaatagaaacctcaaagcctttctcagtttgactgaacttactcagttccagagtttacagagctctccaatgttaataacatctgaattttgaaccactaacacttaactctgtgttttgtttctaccccttcttcatcttccaataaagccaagcagccatcgtcatttccttgactcagtgtgtgtgaggacatgaggttcagcttcttgggttgcgtcataactatgcccaccatctcactttcctccatcattctaggggcatcctgtctgatcgctgcatttgcccaatcatatgtctgtcggggacagattataaataaaacccgtctgataattcagttatgctgggaggagctgctaccatgagagctcatgaaatattcagtgctctttgttttcatggtctaactttgaggcattcattcacacactcaccttctgcttcacccggagacagaggctgctgatagaaggtggaattatcttcgtagtgatgttctcagccatcacgatccttgtttaagtctgagactggatttcttaggggtaggtgtcagtgtccattgcataattccactctctgactctcctttttgttgctgtcccagacagtggactagagtggaaaccatagcacatacacaggcatttcttagcagagagaccgacgatatcccctccagcagaagccacattgattttttttttctgtgctgattctgttcaatttggaagggataaatgtggacggcttgactttctttggatgatttagtttctagggcttggtttatttcaaccctattacaaaacatttgagaaacaaacacgttctgtaactgtttttattcaaaaaaaacgaggccgctttgcgttctgctcactcagggtctctctggagtacttcatgcttgccaagtatcttccctcgagccagagcaacagtgacacagaacagactctgccagctcaaaaggaggcatgctcaacatgagcaaagagggctcaccatcttgtgtgccagctactgtgttagagccatgcacagtacatcgggtcagtgttacaaacagagaaaggagtccttccagaagtgaggtcagttagggcggactttggtagaggtgtcaggagagcttggtcctcagggacagatgaggaatgacaagcccaccagaggagttgctgctgcacatgtgggactcctacaaggttcctgataggccgctgaatacatcagatgttatctcggcgtcttctgcacctgccaccctcctacctccaagcctttgctagtctgccaacgagctcatctgctttctgtcccagttgtcttcccaatatgtttcagagagcatctcttaggaaagattttccctcaccatcctccctgatgctcttgctgtgagttcacttcctgtcacttagactgtctatgctttttttttttctattaatctatgttaaatggttttagctgtctctattgctgaactgcagactctctgaaattagggaccacagatctactacagcacctggcacatgctagccactcagtaaatatgtcttaagagaatgaatggtcagatctgcccaacattgagagggttcttgcttcagattagagaatggattcttgaggataccaacatgaataaatggatagtagacaagagatggtttgaagactctctgtcatagtggtgagaactgggtttgccctcaccttgatcacaggaatggggaaacatgcagagtgcaacagtgtagactggaagctgaatcaatgtgtggacacaaggggttagataattgtataaagccagagtaaggatgccaccaaaacatagaaagatgaatactttggctgtattggatctgaggctacctgagagatgtctggatagaatgtccagtagatgcttaatttaaacacttggaacccagaagggacctcagcagaaggaagcaatttgagcatcctcgattgaaaggttcacttatctattcacagatattcactagctactttgaggcatagagatcccagcggtgaacaaattaaacatgaaatctaattcccacaaattcgtttgcccagaaagtgacaacagaggtcgcactgccccaaaactggttatcaagatagatccactttggggtggcagaattaaggtctatgtttatatttactcccttcagagatgcttattagtcttttcctaaaatatggacttttggagtttggtattagagcaagtgtcagcctgtaattggtgggacaaagagagatgctggaaaactacacattccattgtgctgtgattttctggctgttgcatgcactgagcccacactcgtgtgcactgaggccggatttcctttgttatggtctgtgggatacatgcgatcttaatggtgcccagtaaaatagaaatgttatgatctgttttgacaagacctctttaagggaatttttttatttatttgctagagtttttgcttttcggttcttttatccaagagacagtgcctccagcacttaccaaacaagagtccctagatatacacccaactgtgggttgctttgatgagtaaagtccttaagaacttttaaggtgaacctttgcggtttcattttaaacagcaggttacggttgctatatatcctaatatttagacctacttttagtaccatagatattgtatgctatatcagagttaactgaaaattttaaactcagaaaaaaaaacttgtttattcaaaactgttttgtaattaaaagaactcacagaccgctaatggtcctctaaaacatagctgcttctgtacatttctgtacgtggcatctaataagctttctgctgtggatgttctgacacacatcagtccctgcccctcagcaatgaatgaataggttctatgaagcatgtacatcttatttatggcttgctgtacattcaagtttaccttttctcgtgccgaatttcttaagatatgtgtcttattgcaaagaacagtgatttgtttttaatcgctgcagttaacacttgctcctgtgcatcacacttaaagcaggtaaagataaactgactccacaggcaaatctctccagtagagtatgccttgtgggatacacagaatcaaagctataggtgcaagaatggaaagcgccttagactgtgcatcccttgccatttgtaagctagtttgctgagcacacgaagtcgcacaatgcttctgcatacacacgnnnnnnnnnnnnnnnnnnnnnnnnnnnnnnnnnnnnnnnnnnnnnnnnnnnnnnnnnnnnnnnnnnnnnnnnnnnnnnnnnnnnnnnnnnnnnnnnnnnnnnnnnnnnnnnnnnnnnnnnnnnnnnnnnnnnnnnnnnnnnnnnnnnnnnnnnnnnnnnnnnnnnnnnnnnnnnnnnnnnnnnnnnnnnnnnnnnnnnnnnnnnnnnnnnnnnnnnnnnnnnnnnnnnnnnnnnnnnnnnnnnnnnnnnnnnnnnnnnnnnnnnnnnnnnnnnnnnnnnnnnnnnnnnnnnnnnnnnnnnnnnnnnnnnnnnnnnnnnnnnnnnnnnnnnnnnnnnnnnnnnnnnnnnnnnnnnnnnnnnnnnnnnnnnnnnnnnnnnnnnnnnnnnnnnnnnnnnnnnnnnnnnnnnnnnnnnnnnnnnnnnnntcctcttccctcttctttctttatttcttttttattgtctctcatttcagacttcctattgaatttttttagcatctcaaaaaaaaaaaaaaaacacccagttgttacatcaaaacttctccacagcctccagacccaacccaaaagctatgtctgttaccaaataattttacccaccccccaaaccccccaaaaaaaaccaggagcacagagggaactgggtgtgtgcttagacctcacatgctccatcatagctcttaggcctcacatgctccatcatagcttaggcctcacatgctccatcataacttggtgagtatttatacttgttttgtttcaagttttcgttttatgacagttggctttcttctgtttttgtttccacaggacatttgggcttccaggacagctttgtcacatcaggtgttttcagtgtgactgagctagtaagagtgtcacaaagtaagtatagttttgctctgattcggtccaaatttgccttcagtgttacttctcatagggctttaacactttcacagcaccctttctgttctccttagaaaaattataccaactagtttgtttaaaagccagtatttctaggctaggaataattaagaattttaatgtgaggcatcatggtaaggactaatgctgaatgtctcacacagtcctggttacaatgtgtgaacttggctttagaagatcttgagtcttccctctggtttctgaggaattctgcatttaagagacattgtttctgacctttaagcaatgctaatgctctcagtatgagtggcacattacagcatggtcattaccagcttgtcgataacaactacagtggtgatggaagagttcatgccaccgcccagttctgttgatcaaaggcccattgattgtatgtttgttatggcataacccaaacagggcaaaaagcatgggagtctggctgtctatgtctctctctctctcttctccccgacagcccccacacttcacacaaacggttgccctccttccagaatgtctctgttttaaaagcattcctacagagaccgcctgctcttagactcagtttaaaagtgaaattaaacatcaaatattaaaattttacttttatctgactaaaggtagggaaatttatattgttaaacatgactttcaagcagcatcaagttctttacagaatgaaatggaattcgtagcccctattatatgtgttataggcttgcaaggatgcccgaggaaaccaatgggctgtgagatgccacagaagtcaagccagcctggtcttccaagcctgtattcttcatatcttgttttggtcatcacaggctgaaagaacctttagcatccaaaaaatgggatacgatgtgggactagagaaaaatccaggtgttcatgaacatttcccatttgctaagcactgtgttgggccttggagggaggagcatcattagttgatgttgatccttggtgtgtcttagctgtactctgagttgtgcaatctatactctgaagctaactaaggggaggttgagaaagtcttctgtttaagaccaggcaggttaagtggtggggaggcaactgtgcatgttagaattctgacagtcagggaggctgctattgatggtgaggtgctattgactgatgctacttctgggtagaagtggcagaatcctcatagggaagcaataggagtaacgggtgatagcctgcagtggggaaaatttggctttattatgaaaggtgtcccaaagtactaggtgagggggaactagatgattttattgaacaggaagacatgcgcctccctggctagtgcatggtggattagccagtccctggccatagacagataataacgcatatgtactaaaggtaatcaatattctatatttttcttattagcttactaataatagcatataaagagtatgtcttatcaaagtgtatcagtcatagaggcattagagcgaagtatatttattgaggctttattgagatccaagcatagccttgattaaaaaagaaaccctttttactctaagattagagctctagtccgtttccttctgccttagccactcaaatgcttgcattagtcttcattaccagcagagttccaaggtctgggggttgtaagaggccagacagctcagaaccatccccagcctcttgcccttcctcccttccctcattttcctttcaggtcttatatctaagattgattagacctccactcagtctaaggcagcatgattgccaagtgagttctacatgttccttcaagactgccagaagggatgcctgcccttggggctaagattgcagagtgtcttggattgtttcctgtgcctgtgtagggggctggttagcaaaggcctggcattgtgagcatccttcagcttctcaatgctttccgactctgcacactgctgtgccatcactccaggactcactcacacatggccttgtgctgactacaactgttcggtaagagcaggaccgggctgcatcagctaaaccatggcttcaggccaaaccggtcagctacacgccagagaccctctcttccttgtagacctttaatctaagtttgtcaaggtttatttttatagcttgccttgcctattgcaacagggattcccaagctctgtccttcgaccagaaagcctttctcaaaggcataggctctagttaggtttctgttcccgtgatgaaacactgaccaaaaacaacttgagaagaaagggcttattagcttacaggtcacattgtatcatcaaaaaaagccaaagcaggaactgaagcagagggcacagaggagtgctgcttactgccttgctcagcctgctttcttagaccatccaggaatacttacccaggagtgattgatacctctcatggtgagcatggcccacccacatcaatcattaatcaataaaatgccctactgatatgcccacgggccaatctgatggaggcaacccttcagccccataacttccagcttcatagtttgtgttaggatgacaaaaatacccagcacaacacaccatccgaactgcataaagaagttgagtctatgaccttaccacaatcacaactagttgtgaccccatacagtgtggagactccatattactcagaaacgatacccttgtcttaaactgtttctctttccagatacatagtgctagccttctacatgtgatagtaaaaatatttacttccccccaggagtccagtgaggttctcactgtgatggggtagggggagctgtttcagtatttgcaaacgaagagtcaagttaaataactactctcatgtctttgcctgggagagtatcatctccacagtggtggcaatgacagagcagctcagtctcacgagttcctaggtgagagttagactagacagccaggctgcttgacaataaatgcctggagcagatgctaggaactgctggactagggactctggcccaggagagctgcaggaagtcacaaactccctcacccttgcctcccgccagcaccctttaatttctgcctttatcatctaatgtttgtgaactgtagcaacggagacgctggcgctgagagtatggatttgttctgtggcccatctccacacgtggcaggaccatctgaaagcacttctagttatttattaccttgttccacgagagggagaaaacacagaccactgcaccctgggccagagaaaaagaagaattcagtacaggggagaggctcccaggagcgcctgcggttccgaatccctgaggttgttttagcataatcccatgaaggaggagacaggagccatctgttgagaggtgcttcactacacaaagccctctactacaggcatttccagataggcccctcccctgagctgccaaggagagcccattctgctggctgctgaacgtccctgcttcaagggctctctgtcaaacccactcttgtttattttgtgccaacgtttcctcaaagtacgtgctctgaggctgccaaatgtccctcctggtgtgaactcaaaaagttctgtcccaaactccactcctgctcatttccttctaaagtgctgagtgttttccttgaagttgctggagagattctgaaaccttaaaggcttccgtgggaaagagtaaaaagaccacagatacacacacaggccattgtgcctctgctccggcctgttccgattgccagcgtggtttgttacacccaaactggctgcaagggttaagtaaacttcgtggctcgggatgacttcacagccctggaattctgcaaagccaggattctcagtacactgtggctggccttagagtctttgggtgtgaaaaccactctcagctgctcagcctgtgctgagttcctgctacatggctgcagaatctattaaagtccagcagatgaattgccctggctctgccacaaagcctggctacccgatggacttcggggttcccaagttgtttgtcaatggagagtggcagtgaatggaacgggcctgtgcctcagcctggcatgaggtggcaccctagcggctgttttctgccttgggaacgtgcactgctgagattctcacacaggaatcatcatgggagttccgaatgcagtttgttctgaacttctttttcaagtccttggtatggcttccagcgcccatacgcaggcacttaggatttctgaccagcagttttgtaagaaccaatgaatctagtctaacctgacgtgtagaaagaagttctggggcaaaattaactcagctaagagaggcacagtaagaaaatgagacattggtagggctaagctcaaacttgaaaatacaaattgtccttatctggaaagactaatgaagaagcaggcctcagatgagaagtcccggggagggggcatcttttgagggttaccacttaaatagtggcggttctttctacctttattggaggaggatgacttaaaaacttcctagtctgagcaggcagcctgctggctctctcctctgttaacacacacagtaacaatgatcatggtacagaaattaattttttatacaatttatactcttaagcaagaaaccatttagacttcagcattaaaggaagaaacaaaaagacgataataaaacgtccactgcagcccagcccggaccgtcactgtgaccttgcctttgtttggcattacacaattcaatggcaggccactcaaactatgctctcgatcaatatcctattaaagcagcacaaaaagtctccataaacttagtggttagctatgtttataaatggaactcggcataattagatggtcaatagcaggctctactagtaattttaaaatgaacatcacacatcttatgcatagaagccagaatcaacccctctggaaggaaggtctggtgtgtagtagacaataggttggatggcctttttaaaaaaaatcttctctatgtccaaaatgcagcttctaaagaaaatctgttaagtaagccatataatagaaaattctaatcggtcccttaaggtttttttcgagtctaagtcacttcattctaaatgtattacaccatgggatatgtttcattttctagttttaatcaagcccccacacagagaggaaataataaatgttgccacactcatagaaaagggaaaaaaaatcagtctatctggcttaactaacagatttcctcccagttcaattcaatacaattttaaaataaatgttgaagttgaattatttccaaagaatgctttgtcatacaatttttatttccttgattcatttggggtgagtgtttgaacagtaaagcaggaagcaaatggagtggaccagctgcactagggtttctaccattcacatttgggtggctaaccttgatgtctatcccttcccttcctcaccaaccaaaagacgatgagctactaagaggacacccccacccacaggctactttatccatagctggtcccatccgaccatgagatatatgtgtgccctgtgttgaatatatgtcctgagcagtgtgtgtgagctactgtgtaggtcacacttaggtcagagggagtgtgcttttgacactgggtagcactgtgcatgtgtgccctgtgctctttggtatatacatactcctgccagtcctggttagagctgctcatggctgggtttgggccatttatctctatcctcaactgaagggtctgctaaatttcccagactcatgagcactcttatgatagacactggatcttggaaaaagaaacacacactatactttgatatgcatactaacttgttgtcatggtccctgtttctctaggtccatctactgctaatcttttctaagtaacttctacctacatagtgtgtggttaacacagactatcaaacacacacatgcctgtaggatgccaggaaatagttcaggatttataataggggtgaacatttgaaatttaatagctgtgggactctggtcaatatttgcagtgcctcttgcctgtgttttcttcgtaggttataattatttaatacaaaatatttaaagtaagtcctggctataggctgagcataaatctgagtgctaaactggggagacctctcaagaacacagaggtaacataacaggacgcctcatgttggattagtgagagctcaatgatggtaatcaccttgatcattactggcttaagcctttgcccttgatcatctactgtgtgttcttgagctgatcctggagctgaccactatcagccaattttatttaaaaatattcacatgtgtataattatgagtgactgatttgaggactgtgtcctaaagcttggtttattacagccatttagtggtcccgtcaggtaacagctgtgacagaagaaaacatactagtactgttcttactcatctatctagaaaagtcttattcctcgtgatttttagccaaatcctacatttctgccaacattctgggtagctaatgggaatttagtgaacaaaggacataatcctattctaacactgacattttccaacattaaatggtcagctatgaatgggttaaccatatcagtatttcaaataatacataattctacggtgtttttaaaaatgctatttatgagcaaaaattcaagagatcgctactgataatgtaatcttcactaaatctttatttgctcgtaagactcacctttaagaacagatattaatatccaatgagtaatattggggagcttgcaaggccttcttgtgatctccaaatacctgatataactcttttttgccccacaataaggatgcaaaattattgggatttgttctggagtatgtgcttgtagcttaccctcatggattggagaggctgttggtggcaccctgtagggatgtctgcgatggctgactgagcactcagcaaaaccacaccatacatcagacgctgagccatccagtatgtgattaatagagtacataattaacaccgaggatttctcaataagagcaggaggaaaaatcaagcagttctccctaaaaaatggttgttgttattgttgttgttgtatagataactaattaatgtgttattaggaagggtctctgttggtacagctaatggtcagatagtaccagtgtactcttggggaatgagcttatatgtagatgtccttccatggtttatagatcattgtggtaaaaagaccttttatgccatcaaatccatcctctgtcaagaagactgaatcccatggctgaagttgtatcgtatgctaaacgggtatctcatctgacttcaaccaaaagccaagacaagatgatgctctaaaatgcagaaaatcaattccagtcccaaaggcagaagccactaatgcaagagatcagtcatcatcatttgctgctcatggccactctcctggaccaattttgagaccctgcatctagaagagcagtagctacaactccttgtgctgaagacttggagaagaatgtaggggacatagcagccttgctacttatggtgataacttatctcatgagacacatcttccctgtaattatgagacagcaaagacaagagcaggaatgtggctctcctatttctttagctgatatctacagacacctgacatcaaatccctgtgctacacctgaacattttgctaaacatcacccttcattttctcatttgtcaatgagaataatgttgatgtataccatagggataccataggataaagttctatattttatttacactatctggtacataataaaaatcagcagaaagaagtcctttgctgttttcattagcatgctcatgattttagttcaattcagtaaacatttgttacacatgtaatctgtaagtaggagaggccctcctccatggggattatgcctgggtttctcaaacttcaagactttctatatacacaaaagtgactgagtaggactagcttagaaattcaacttatagtggttatctgttaaaggtgaaccttcataattcagagtggaatataacacagtattggtggattcagcctattttaataaaaatagaaacatctttcataaataaaattttctatgcttatattcctctttttcttcaagcataaccccctactgtcacactaacacacacacacacacacacacacacacacacacacacacacacgcgagcgcgttttcttaaccttgtattcataagtcatggctgtgtgaaggaggtgatctgtgcgtgctagcaactgccttttgtggtgttaaaagcattctgttggcttttggcacctagtgctacatttcagaaaaaaagcattgcttaaatcttttaatagcaggcaagctcatttcacatggagggaaacccatgttttagttcagtgccttccttttatgttcctgtttgaaaaaccctacttccagcctgcatttggccactcctttaaaaacagggatagaaagaggagatcagcacagggtttacagaccagaaatctgcttggcaaaggagttgctgaagactgtggtgtacaagctgcacagaaagtacctttatgattgatttccattcaagtcagactgactgcagcgtggtcatttttcttgcccataactgcgcacactgcagcagtctgctatctgcagggcgtctgaattatagcagtctatgtccgtgttacctcttacacaaattacttacactggtttctttttccatgcaaattcatcagttttacagcccttcatagccacagtcaggaaactctggcagagaacacaaattgataaaatgagttaattttactatacttttttttttctttctaaaagccctcttttaggcagtgttcaggaaacatattacagtaaaagggagataacaaaggagttggattttcttgccataaattactttccaagttaatttcctttaacgatgattccagattcgccagtattcatagcattgtgtgtcttacaactgagcctttgatggaaagaagaacaagtattttcccatgttcactccttttgtggcagtgacatggactttcttataggacctttgccaatgaaatacaaaacaacatgaaattgttctggcatggaactgcgtgctattgttggagtcctctgctcccagtataaggtgtaagctccaagtgctctgggagcagttttggtaggtcatacaattgaaagaaaaagatgtcttaatttttcatagttattttatgagctacaaattgagtgctgatggcctttggaagggatttatggccacattccctttatttccctgtgtatgttaggaatgggggaggagacatgcagatctgaggggggaggcaactgatccctagaacgtaagaccctcaagggcagaagtttttacatcctgtccactgtttttaagcatataaagcaatgcctaaggtattaaagggctctgtaaatgtgcattgcatcccaggaaatgcagcctctgtgtgccttcaagcagtaggctggccacatgggtagacattttgataatgccccctgccaactcctatcgaacaagccatcagctcagcatcaccatccacccaagcagaggagcctgaaaatttggatagaattttattttcccatagtcctctctttccagcaatgcaacccagagcagattgtctctggtggatggcagaagttcaataaccacagccctatccaactgctaatgtgtacagaagagcaggtcatcaagagggttggctactgaagtaacccctttcttccaatagcccgcattactataatgatgccttaatagcaaaccatttattaagaaatgacacagagtacattctactcatgacaggaaagagggggaagggaagatgcatgacttagaaataacatctgaaggcacaatttccaaagttaaccttttgataaaaactccttggtgaagaagatacttaggctacagtaactgcagtattgcttaaagaaacagggcccttttcctctatgcttatgcatatttatggaggacactttcattttgactccaaattaagggaggtaaatggggatgataaccatttccttaattcaaagcgtattgattgatcttcagctgtctacacaaagggtagggagctgtataggaatacagaagtagttcttggatcgggacaattttaaggtcaggtggtctgatttcgtcttcgtgacctagggaagtttttccatcatttttttgtgccctggtcccttcctagtaccactgtgagtattaaatgggatggtgggtttatcactgcatggcagctggcccatgaaaacatgcataatgatgtgtgctgatgacaatggtagtcctgggagccagttctgcgtgtttatcatagtcgttatgatgcatggctgtagtccttcctaggtacatgtacccactgtttctttctgctaccctgtcttcattgcttaccaaaggctctacctgttctctagatgggaggatctgagagtgttgttcctgtaatagggacattgtgatgtgaaacctgcactctaatgtgaggcattctcctcctggtcacagtacaccatcctaataatgtgaccctacatattgcatgggctgcatgcacaacagtaatggacacatgtgcatgcaaagagctcataaggtagacacagtttgcgtctcgacattgttaggattaatgagccgaggttgggaagctcactctcgtttctgattcaaggatgttttaaaatatgagatacacatgcttgctaacctctgaaaccactcaccatgagtccattgagcactctggaccaggccatctggtgcctttgctgcatcccacatgactgcaaactacatgatcattggaggtcaatgcagggcaggttaaggaacatgcgtgtgggctgagttaatttttaaaatccatatagaggtagagcactgtatttacatatacatgttccttccctcatatattctggctcccttgatattttacaaagataacaaaaggaaaggacattttcctagggtagatgacccagtgcatgaagtgtttagtggaaatgccctcaatgtccatgactgtggagatgccatagcgctccctccctcagcccagcctaggctttcctgcttgcccttaccctctttaacagccagatcagggggatctcaccatcctcactttgctcacgggtcagcaagcttcccaccaagccggggcctcaattccactctgaaatttgtgaagaaaatctaaattcacacatttgatgtggacaggccgttccattctctctaattaacaaggacacataacagtaggctccaggaggcacaaggccttaagagcacctatcatgttattatgtgtcaggtagctatggtaatgatgagtgatgtgggctgtcttgtataatggcccagttcatacataaaatattgtggaataaaagatgaaattatgcaaataaattgaatacaaaagcaaatgataggatgactagcagcattattgagcaggaatctgtttacactgttgtcaagatgagccaaaggccccccatttaaagcccatcattgatacatgtgtttgattttcagttctccatatcttaggaaagatcgtttttacatgacaatgatgcttgagatgtagtcactgctattagtcaactcattgtacattcttagaaattgttctattccttcttgtcgtctgcctctgaagtttctcacagaatgatacagctcgtcttgcctcccacgcaacaatccccagaagcactccttcctgctacagtgaactggcgacctattactaacacctgtcttctcccaaccatcctttggtgtcatcttacttcatcttcttgcttaaatgacatcactaatgcaagtcttcaaccacctcttctctcccaagcttggtttcatgagggagagatttttctagagtatagatgcaaaactgagggtagtatttccatagactacaggcccttctttgtctcagtacaaccacctgcacttatgaccagtacttattggttgccttctgctggcatgggtgacgcttagagattgggaatctaagtggagtgatttctactcctggggatgtaagtacatcaatggctcttgtggaaaaacttgtgatgttccagatttggatctgcacttcttatagaaaaataccaggtcctttatggcnnnnnnnnnnnnnnnnnnnnnnnnnnnnnnnnnnnnnnnnnnnnnnnnnnnnnnnnnnnnnnnnnnnnnnnnnnnnnnnnnnnnnnnnnnnnnnnnnnnnnnnnnnnnnnnnnnnnnnnnnnnnnnnnnnnnnnnnnnnnnnnnnnnnnnnnnnnnnnnnnnnnnnnnnnnnnnnnnnnnnnnnnnnnnnnnnnnnnnnnnnnnnnnnnnnnnnnnnnnnnnnnnnnnnnnnnnnnnnnnnnnnnnnnnnnnnnnnnnnnnnnnnnnnnnnnnnnnnnnnnnnnnnngtcaacagttcctgttgtcttatctttaggtgatttactctacccagaattcctcctttcttcccagttgcctgtcctttcagcatcctctcgaggtacattttctcaggcccttttactccttgagcctcctcttctcagaccagtttttgaaggcttccctgctccctgacccttagtcttccagattgccctggaatgtgtttgtaggtgatggctgtgtctctggtctacatcccttcttcttggtaatagacgtgccgccaaatcattctctgagtaaaatctggactcatagtgttcctcgttctcttttctcctgatagatattagtatattggatatatttatctatgctgattggcttaatatatacagtacatactagtgcacacaactactgttctgcttttacatatttcagaaagacaaccttaactggcagtctcaccatagaatttatacttttgaaagacgatgagcagatttttattaactcatttaaaaataattattaagctactgtaaacaaggcatccagagcctggaagacataaaaatacagataactacatctcagaaagaatccactatgaaggtaataggttaatgaaattgaatcagaagttggcagaatcttctctaagggtaagaagcaaatactttagcttcaggggccatggggtcccatggtagtcagagttctttctgttgctgacagtctgcaatgaaggtgtatgcatggaatctttctttgcaagcacacacacacaccaccaacaccacctacaccattaaaacaacaacaacaacacaaacctcaaggtccagatgtgtgcagggagttcacatgccacaaagtaaaaagaatgagagagtactgtgtgcatttcacatcactgggggcctagatggatgaattcatggaactctcaagaaaatgtggaacagaattccaaaatacagttgagaatcagctgttgtcatccaagtaagaaaacctgcagaaaatttgtggagcagttacttaaaaaaaaattaacactaaagtacgagaggtattttcatttaaaccatccagtaatgcttgttgacaatctaatctttaaaaaaaaaggagtaaaataaaaagataaaaggtacattagaaagaatatgcctttctaggatagaccatttttattgtcaatattcctttgaagtcatagtttattagctactattctggataatctttgcagataaatacaacagagaatgtgttccatactgcactaacattggttcttgatcactttgaatttacagagacttcatttatggtttgttttgtttttgttttcctctctctagcaccaatagctgcaggaaccggccccaatttttctctctctgatttggaaagttcttcatactacagcatgagtccaggagcaatgaggaggtctctgcccagcacatcctctaccaggtaattggattggtagcttctaaggagctaagcacagagacacactttgatgcttaactctgagcctgttggacatttagtaatgtgtccatagtaatagaggatacaaaagtcagcctcaataagctttcttattagggaaccagacatacatgaaacaaattacacacacagacacacacacacagacacaaacacacatataccagaaagacaaacagttacttcagttgtatcccatgaaataagcaaatttgaataggctttgtccaaaatggtaaggtgctgaactctgaatgctggtaagcttcaagaggagacaggacaggcatggtgatctgggagaggaagaatatgagcagagagaagaagaggcataatgaatgtagtgtattcttggggaaagatggatggatatcaatggggtagaagaggtgagtgctttggcttgattggcatgaagtaggcactgatgacaccagagtaagaaccctgcccacaaacttcttagccggctgggccctgaaagttctcaaatctagtctgtagaagttccccaaacatacaactgatttgacatgcagctcagatcgtgggatgaggccatcctttggatgcaagtggtccaaagcaaacgttggaactggaacacacagcctgctgtgagcatcaagcttcctggtccccttagttagctctcagagccaacatctggagagggctttctaagaccctgccttctctagataacctgtaccgggctaggggattagacatccatcagagccgtggtttccctttacatattggctttagcactggactgtggcaacaaagaacacagcagaagaggactgtcagtcatgtctgtgtactttgtaggaaaacgtttatcacgtgtggattctgttaaagtgagtacaagcatgaatgattgaaaagagtgctcggagtgcagacatgttccttggtgggcgtctacctcaccatcatgaccagtgtctgaaacatcagcttgaagatgaaacgagcagtcattttgaacactgtacaaacattgtttaaatgtcccccaccccaccccccagttcattagagtatcacctccacacaaaaaaaaatcaagggtctcaaatcccaaatgcatctataacagaaaagggggattttgaatacatttgagtgttaatacactgggaggattttgaatgtttactgacagaagagacagtatactcagtcaataataaaagctttgtaaatacttgcaggcagtgcttaatttaaaagttcatgggtggcttgtttttcatatgtgaactactatcccatgtatctctctaacagtgtctcttaccgcctgtccttgcatatactccagactggtttctgatcttatgctgtgacctgtggatgacgggctaattattgtcatttaagaggctaatgccattctccagtgcgaataactggtcctgataaggagttaattacaaatatcaatgtttgttttctcttgttgtcctattcctgggatgtttttatttaggtgtgtatgtgtgagggggggagggaagatcgagaagaagaggaggaagaggaaaaaagaggagaggaaagagagaataatgcaggtgttcacttgcaaagatgtctatggagatcaaaggagaacttttgggaacctgttcttttctttcatctttacatgggtttcccagaaggaacatgggttatcaagcttgcccagcaaacctgttaccttccaaggcatctcactgcccaccctacactgatttttaaataagagtcattgactatatagattaaaaggaattatgttacaagttagaaaatatgcctcaaagaataccacagattcacacacaaaaccattaccaaatggcggcggcagctactgctgctgctgctgctgctgtcaacattaatctgtctgtagctttttagttgtctttttagcttgagtcttagttttcaccaacaaactcttctgctattgcttcagtggaaccactagagcacagagcaattaagccacttgcccagggccacaggcctagtaaagacaggggtaccactcatattcaggtcttctgaaatttacaaaccatagttatttgcgctaaactgtcttagcaacaatgctgtacacaggaaccacagagtatgagatcctagcaaagcagtgtctcaaatttccacctcaatctgacctgtagtacccactgtctgaatacttttactatattggcagtatcttacctctcagtctgtctctatgtcccttgaaggacaatgtcttaactttcccaactcagaagcagataataagcaccaagtcgttttatgtggcactgtaggcacaaagaaaaatcagaggagctctgcacacggacaagtggaaatgttcagattggcttatgtgaatacttggtaaggggaatggcattgccttgtgaatacaaagcaaggcctggaggtctcacataataggaagcaagcaatagaatcatgtgttagacagtcaggaggaagagacagttaaggaccagttccaagaaataggtaaacggaatgagcaagatatctgtggtttctatatgctttctattgttccaggacctcaaaaatctttaaaaagatgggtaaaaataaagatatgggtttcattctaaaggcctttgtaaagagagtcatccatgtgcagttcatagagtcagaacactgtctcaggagcccctcctcaccatgcctctacttccctccctcctggatcctgttctctctctatcctcacttccatcatacagatgctgagcctgtgtccatcctgaacttcctcatatgtgaactcaggtgtcaactgtaacaatacagtgtcccacctgatgcaattcatacctgaattctattagagcacccaaagaaaatcaaatctttagaactcagaaaaatattaacagtggagggtcaacacacagtggaattggcctccgggattggttctcattgagtatagatgcttgggtggtcccttgtcccattcatgctgcagcttttgagcacttaaaacaaactgacactggagtaggctctaaagatcaaaacatgatcctaataaaaaggtggagaattcttgggttgtcaactaggatgagacagaaatttctggtgatgtcacccgtactcctggttcccaagaccacagaggtctgccagtctgattctctaacagcatcagtgttgaggggttgaatcctgggccatgtaaatggtggtgtctggctacacatgtaaggcaagacaatgagtctagggaagggtgcttaggatgacagaagaggcagaaatatcctaggaagttgatattcaactcccacagcactgtctgcttgaatccacgaacgctgaacacagctaggaacttgcctatcagtacgctccttgattctatatttagatttcacatacattgtaaaacacgtagtcagttgtgtaggatgcaaattagggaagaaattcaaattattccttgttggtcatcccagatacataagtctcaatgtagttaaataagaatcatggaaaatcgaggcagcacaattcccctggggaggaaaaaaaaccataatcacatccctgagggttttacagtcttgccagaaatttcaagtctgctctctgagtggctggagtatcccaggggatttcacccaactcacagtcctctaagttacaaatggctgacagttttgaaagacaagtataaataagtgtggaggaagacacctggttccatatggaaaacagggcactccttgttagatcaggattccacaaccaagagatctgctctaaattggggcccagcttcctgcttgcaaggtgtcttagtcagggtttctatcatgcacaaacatcatgaccaagaagcaagttggggaggaaaggatttattcagcttacacttccacttgcttttcatcaccaaaggaagtcaggactggaactcaagcaggtcagaaagcagaagctaatgcagaggccatggagggatgttacttactggcttgcttcccctggcttgctcagcttgcttgcttatagaacccaacactaccaacccagagatggtaccacccacaatgggcctttcccacttgatcactaattgagaaaatgccttacagctggatctcatggagacatttccccaactgaagctcctttctctatgataactccagcttgtgtcaagttgacacaaaaccagccaatacacaaggcaaaaaggggaacctatgtgttagatcatttctactttctgctaaaaggaacaatagaaatgcatttagagacactaggtttttctgatttttgtatgttggaattagtttttctgtgtgcattatgtaaatgtcaaataaaggacatgcattctctacagtttacgtaaaacagaaaagttcaagaaattattttttcatcaagcttcaagaaaaaaaagaaggccattcactaggcaatccaagacttgtccttgattcctaaattagcatggtcccataagcttgttcccttaaatctggttttaatgagaatataacctcaaacctaagaactttggaccacccacctgaaggatttgaatttcttacctaaattgcatgcatcctacgtatcttaaagttcagattgtgacagtaacattgtctgtctgccttcctttcctgctgccttcccaagtccattttcttccctcatactaatggtttcacaatgtaactcccacggcacaccaaagtagaaggcttctgaggtctctttgcttgtaggatgaaatccagatgcacagtatcttccctgacctgcatactctatttctgcggggtccctccattggtctcagcatctcagagacccagagcgtctctgggcaccatacctgacttgtaccactgagagacacctgctcctggaatgctatgcagtgtctggtgccctgtgcaccatgagctcacagtaagggagtgtgctgccctgttattcaaggttcagtagcaaccccagggagcagacattacattaccctttcaggttatgaggcatgagagagtcatggggcaaaaggaaaaactgccaaggttaggtggaaaagtatcttatgaagcttgagacaatatcagtttgcccaaaagtacagaggattttaatatttttaaaagcatgctaatgtctgagttgtgtattgatggagtaccagactcccctagccattgcctgctcctattgctgtctcacaagcacttagagactagtcacagttcaggagtcctctgctctgagaagtacttctcaaacgccaggcacaccaatgttcctccatccgcagcccatgcatggcttcttcatgacccctctgtttctctagggcctctccagctctgttcacagagagccccatctgattcaccatactattccacacttgagtcttgcccctggcatggaggagctacgcagccagtgtctgatgaatgaaaccctgggaaagttgtgcatcctaacacatggtcaggtttcccagcagtccctgcccaaggcagatcttccccgtgcaggactatgttgctggcattctgtttggtctgtcagagcaggaataagcagcaggtgctatctcaccgccttctaaccctcaggcttcactgtgggaggaaaaatgcagttcttcagctggaagaaaagagatacattgtgggagttcctaggtcatagctctgcagaaaaccagtttccatttacacaaatgaaataaaatgtcatgttgctcatctctgtgtagaaggacataaaagtccccagaccactgtatgtctgtgcccttgctggtctcaggggaatatcctccttcttgccttttttagccactctgtttggtattttatctctagtgtctagaggaatatacatggtgtaaagtatcttttttataatgaacaaacccaagtggaagatgggacatgcccccctccccaaaaggcagtcgaagcttccctggaaaggttcttgaaccctgctttttatttatctgtctttaaccttttgtggatgtcttcgtagatttgaataggcttctaggcatgccgctagtggccagccttgagccacacctgtggagataggatacctgggcttctgaactggaagccaaagcaggaactgaccaccagctccataaagcaaaaagggctccaaatgaatgtggtgccagcaacttgatcagaaaagatgaaaccagaacttgaatgcataggccaaggctgggcaccccttccagtgacttggccaactgcacaagagcctgcacagggtcctagaactgcacatttccccagtgaagcctccaggagaaaggtggcttagtgtgctttcaaatatgcatccctttctttttattttctttttctttcagctctacaaagcgcctcaagtctgtggaggatgaaatggacagtcctggtgaagaaccattttacacaggccaagggcgctccccagggagtggcagccagtccagtggatggcatgaagtagagccaggtgagcagagtcataaaagggaaggaaatggtgtgtgcgtgtggttgtgttgtcacggcagagtggtggaaagcagcagatacaacggaagtgcatgacagaatgtgtcggctcactcataggctgtcaccagcacttggagcccatgtgcatttcattctactttgttcgtttgttgagctgaggtcttactatgtcacccactgtggcctcaagttcaatgttcaagtgttcctcctgcctcatcttcttgaggcacacacacacacacacacacacacatacatacatacatatacacacaccttttgggttttggtttggttttgtttttcttactatactctattatccataggaaaaaatcatcagctttccccactttgtggatagcagtgaaaaagcagaacaagccccctgtgctgcatattataagtggatatttataacatgataacatttggggttttttccttttttttttttttttttttttgttgctggctatcatcataaaggctaccaattttatgtctgtctgcaccaacctgaatacagcccattggtcaaaccttggggctgtcatgtgacggctgtagaatctggagagtgattctgatagtagcactttctggagaccctaattgtctgacttccatggcttaggagaatggactccaatgccttcatcaatacaagtcaaactttaatgtctgacctccgtgtggcttgggggaacaggctccaatgactttgtcaatacgactcagatgagtaagaagtcagaggggtttgaggatcatctgaagccccgtcttcgagtcaatgacagggctatgtggttatagtccagactccatgactttcctgtaaaacgcagtctgacagtagtaatagctgtttcaatgctcttgagtatcgagtaacatgctcggtagtgtccacttaagaattatatccagcacagaatgatatgggggcaaaaaaagaacgaattctccgaccatccctcccccactacagtctcagagtaactgcctgtaagaacagacgggcatcaagaaaatcttggaactaacccctcatcttcaactctaacacctccctctcgtcctcaacactttctcagtatacaaactctacggctgtagatggctttatacggctataaaggagaagcagaagggagattttagggtgatggacccatctggatcctgattatggaacttaccataattgatataatgtctgacattcacagaagcacgcgcctcctccttaggcttgtcgcatcctatcctaattaaaaaacaagtaacaatgaagccccacaccctattggctgggtcctttctcttgttcctttatgaaaatgtgaacgtccctgtgtgattcccttctgcccagggccctcctgcagctcatccgttcacccactcagcactcttcagtggaactttctgtgagagctcacaggtagatgaggaggcagtggcttctgctttcaagggatttagagcagatgtgggatcaggagcgcagtgctgcaaccatctcagtgttgggtggagcacaggggtatgagagcctctggtgtcttcattttatcacatcacccatgcagcactccaggtgcggtcattctcagaaggctccgtgtcacctttgttccacagtatatcagctcacctaaagtgccagagatatatagccaggccaggcaaaaactcaagtgctgacttccattgccagtaaaccatgctctccgtgtattgctaatgaaaggtacatttgtattaaaatcaaataattaaaggatggacaatattttgggtcccctttaaagggctaattagtcctaaccaatttccctgcttcagtgaatcagaatcaagtatataggtgtggtacatttttgctggagtgctatactcacatgctccatgtattctaaagctggcttatgatgttgatggatattgatggacacaaagcccctctcagtgagcccagccctcccagccggccctgcctcttctctggcatatatgggggctataggggctgcctgaacagaatgctttgacctaggaattctttcattggaagcagtgtctgctcatgcctacacattatgacaagaataattataaattctaacatctgtgtctctgcaccctgtgcagtcatcaaataactaagtttaatggttaaatcctctttacatggagggatttttttttctttccttcttctgaaagaaactgtgttcctgaaagcattgcccattgtcttttcttgttccattaaagaaacatgcgatctcatggcatatactggtgggggctggagagcacagtggacaaatttatatttggtcgtagtcagcatagaaagtcataattgaaacagggcctgaggggacattaaaacacaactgagggatgttgcacacgttcgtggcgactttggtgtcattagctcacaccagccactctaaatggataatttatgctgccagatggtcctttttggggattttccatcaagcccaatcccctttttggcacagagaacacctttatgttgttcccacacttatccgggcctccatagcttgtccccaggggtacagttaattaaatgggaggcttttagtagttcactcatgtaaattgccttcagaaatatgttgggaattatgtatatcccaaatgcatggacagcctgctcttgggataattctctcaaacaagtaagaagggcactgggtttatgcttttgatgtgacacagaaagcaaggatgtactcatgcccccctcagagagcctggcatctaggggtctgccctcactaggtttctgggaccgccgaactacagaggcctataaatgaccagaaagggagccaggcgagacatccttgaacgacaggaagatgttggaaagtgaaacaaacggtccagacatccaataaactacatgcatatttttcaaacatatttcatagtgttccattcctcattagtttgtctctgcacttttggtgcacaggaaacattgctcatttcaaaccctaggcagtcttgggctgactcctgcttctcctggtgctatgtctgttccctccacttggttccatttcccagctgtctcaaaacttggttgggttagatctatatagccatgcactgggatatgagccctgggaaactacccgtcaaaaatcacatactctcaatggctgttaagctacacaggtgaaaagttgccagtgagccaaaaatgcaaatgaccaagaaggaaagctgcaggcagcacttcattggctgaggcaaagttctggttgcacctgagaacctgcagtgcatcaaggttgtttttcaattgatgccgggttgtttgtttgttttgagaacatcgcactgatggtgtatatgtgtacaggatctgtctttcaaactaaagttgactccaaagtctgagtttgcttttttatttaacctttttagcatgactacttatgctaatatttcaaggtcttattttctagactcatgtttaagtttaaaaaatcataataaagatagtaaataactcaatagaaagatcttaaaattccccattttccttattttggcctcttatcatataacctaggtcaggggaaaaaaagatatagcctactaaatgcacggagaagagaatatataagcaaagtattaactattaatggtgaaatatttgctgtgtcatccataaaattcaataatcctcagcccttaagacttgtttaaatgctacgtcagagaggcccgtagtgacctaaatagctgctgcccttgtatccaacacctcctccctcgtagaccctcttgccttgtccaggctccatctatctttctcccctagaatatgcactccttgagactgtgacttatcccatcttttacatggccatatccttaaaaccctcaacaatgtgtagaacataatagatgttcaataaatattgactgaatgagtgaatgaagcagagagatgggagctttcttatatacccagaagcagcatttgctgccaacagtcttataaaaaagtggtatttcctatattttaaacctgcaggcttccagttaaatctaattaatagcaaatagtaggaaggataatggccatggctcagccaagcatctcattgatcaggagtaggaccctgaactgcattccaactacccttctccttaacggatatgatacgtgatataagatgataatgacacacttaatgatatggatagctcaaaataaccaaacataaggagcttgcatgtccctatgactatgacaaagaaatggcaaatgcttgaggtgacttcctgactccatacatcaaaacaccacaccctacctccataaatatgcatagttgttcatcaataaaatatgtctatattgcttaaaagaaaattacaaaagataattcatgctgtgtgatacacatatcatgatctcaacagtgatctctttttatagggtgctttacagagtgagtttagatgatctctctgcttcactagggaaatttccactcttccatctccactttttctctttacaatcatatgtaagcaccaagccactatcacccgaagacccaaacctggtaccccaggccgtgtctcagcggtgcatctgagaccacccagacttcagctgttgagattgacgtcatctatagcacagctgtggcagtcactggacttcaaatgttatactctcaaatctttctccctatgcttagcagcaatctcttaaaaactatcacaaacgggtagaaaaacagccatttcacatggatcagagaagaccacatactgggcaacccttgaccctcagtacagtaacgaaaatcacccacttctttctcctcctcccctattccctcactccctcctttcccccatttaaatgcctctgctcatcttatactataaagtcaaatcaagtcatgggcttttattaagagtcatctgtgtgcagtactctgaggtagatccagaaacaactgcactgaggacctgtctctaaggctaaacttgagaggttaactactctacctaagatatcccagtcccgtctctgtctctcaagtcaagactatcagctgagctgatagaagccaaagtcctttgtaaaattaatcttctctaatcatgtgcactgttggcaccaggatcattgaggggacagacctcacccagctgatggtagttaagagagctgtaactctcggtggagaactagggtcagtttctttaaaaagtagccagtaagctgggttcaggttagaatccagctgagaaacattccccaacttgaaaagtctagccttccaaccattagaacaaataaattgagaatgcctttatccatatttcttctcagtatgagcagttctatggctgtcctgtgaacctcccttaggttctctgtgtcccaaaaatagaggactctgcaggctgtctgcttgcacagcctcaagatttgaggctgccctgcactgagtgtgtcactcaatgccagcagatctgaaggaaatctaataagaaactttaactcttatccatggaacctagtactatgtttagatgtaggattaaaaagccacttaaaactttatgtcactatgtgccgtggcatatgtgagtcctccacttgaaaggtagaagcagaagggtcaggagcatccttctacttggctacgcagtgaatccaagaccagcatgtgctagatgaaactctatcaaaaagcacacaaacaatctaacatgaactgtttgaatgttctcctatagcaaaccattcaaaattctaatgcactaaattgtgtgtgtgttatatgtatgttatatacattataaaactattaataagcaattgtgccagtcaaagtgatgtaaactccaaacaattaagtgcaatacttggagtcaaaattgagtaagtaatacatttaattgcaattatttttaaaatgctatcagagataaacttctttcagggataaacttatttccaggttaagttgattttatttttaaaagtctcaagaatttcctcttataaaaagttagtaagtaggtaaatacattattatgtgttttaaaagcatctatggaggactattttgacagtttacaggtgaccccagatttgcagaacgaggccttgatagctataagcacagttgaattctgaaagtagcattggctcatctcagctctgtaaatcatgtattagaagctaggcatggtggtgcatatcagtaatttcaacatctgggacactgaggcaggatgcttaaaagtgctaggccagcctgggctacctaatgaaaccctgtcaaaaatcccatgttgcgattgttcagtttcccacacctgccaatcctgatttgactgccagtagccactctttggtttccagagtagtagaagtttaccaatgcttacttgtagctgaggcatctaagaggccctttataggggctggtagaaaggcttcagactggtgacaatagtccattgatcacaggcactctgcagcactagcataaattaggggaaatgattaaatctcccacaatcccctgcagtaatggaaatagtcaccgttacagaacactgccgtgggatcaatgccttggcttttcttctacatttaggaacagtgggaaagcatcatttgtgacagcgttctcccaccattatctccttagtattggcacctgctcattagagaatgatgtgccagagagcaccagtagagtaacaagggtctgttcttaatgacccttaccagagaaatttcacctaaataaagcattacaacagaaaagctccattacaaaatgagtactctcatcacccttcaagaatttccctacctttccatcagggctcatttcctaatgtcagaaaatgctctaagccaaccctttctattaaactctaaaaggctatacagaagaaagatgtctttgcacatacacatacatgctgtattgtgggccacatacatatatgacaaagagtggtccacaaaattgctggttatttggttttttttctcccaaagcttgttacagtacctgataatatgacagacattcaatcaatatttgttgaataaatagatatgaagctggcgaccacatgtgtcctatcatgtcctttgaatccgatcaaacactttgacatcagagtgctgagtgcctgcctctgatgaaggaaggagaggagcctctttggccttggagaacccaggtgcacaattttgtaaatacagaaactcccaagaaaattaatgctgcatttcagttggtcttgtgtagataataaattacccaaatcaacaaatcctttaatttcatgcttaaaaatggggttatataaatattctaggatagaataaagacagagccagcactgattggtgaggctcactgtgaactcttctcacccttttcctgtcaccatgcccaggtactagtggctcaatgtggcccagacttagcctagggaaagggggagcattaaaggaaactccactctgaccacagcagcctttgaaggcttgtcggagaggagaatgataagagaaagattaaatacttttttaaaacaaggaagtagacattaagagttaaaaacctttttaaaatctcgtctcctgccataatcaaacctgcaatctttgtaaactgctccggattttcatttcctgggagaacatcaaacaatgacaggaagaaaacaaaagctaccattgattgactttccaccatgtgcaaagtactttgtctgtcattatctattggatgccttctgtatacatgaagtatacttaataagctgtagaccttcagtgaaatagtgtgtatgtcttttggtgaatacttgaaaaactttgaagtgttacgagaagtttgatactatgaaatttgatggcaaacacattgtacacctctgaaagtatgatgtgcaaagctctgtgaaaagtggaagatgaagtagaaaattaaagaggtagatgctggccctaagagactaaactcactagggtcaaaaggcatgaatagttaagtcagtcaggagactaatggggcatagaggataaacagcattagtttgggggtttactgattggcctgggccacaaccttccgctgcacttgttaagaagccctcctatgactcctggggcagcagtggagcctggtccctgtgtccttctcttcccaacaggcaagtatctcctgcccgactcctaaaaacatgtaggcatcatgcactctaggaatcccacaggaaggatgtgagcttcgaccatcctaagctagcaaaagacatcatccctcatacagaccaaaagctccctgtcttaataaaccacagagttttgacttatggatgtacaaaggataggcagatagaggtacataatagatcagaattattgcagatatgatattttgcatgatctgttagatattgttaaaattttcttgaactagtacaaggtagtttaaatctttcatataaaaactagacaaggtagtttaaatctttcatataaaaagaaaaaatctctttaagtagtgatcttatcttctcgactctatgaacataatgcagatatgaaccaggccataatttgattaataaagaagatatattggctaatacttttgtcactagaatgctgctggaattttaaacatataagtgtttcataagtaacagtggtagctaatagcaacatatattattctcaactatatatacacatacctacatacatcatacatgcatatgtgggcatacatgcatacatatatgtgtgtttatttcacatatacccatttaacttgtttaaagagatcagatcccagatcacttttggtagcatttacaggctgatttctttctcatttacctcttgtttctctaccacactaacgaatttacttaaatattaaatgattgagtttaatgccgtagtttgtgtagaaataataagggctactggtgctttttaacaaggtagctctttaaaactccagagcaagaatcttttctgtgaggaatgggaagagaggaagaaggaagtctttggacccatccagtcctgtgtctctgggatgtcagcttctcatgggcctgtgtgctcgacccctgttttcctgtagacgattacaataattcatccagctcatccgtccaccggcttcagttacatcataaactcatcaattaatcaaagacatggcacccatttggagatgatgggtgaagtgcatcctaggagattccgggaagtgctcccatgcacatagtaaatcagagaccagtcctgatagattcctgaacagcagtccaagtactccaatagagagggttccctctagccctgatcacaatgtatgtctctcaaatgagaggcagaaaatcaaacatacgagaatcccctcattttacagcatctcttagaggggaaagattaacctggattggagatgatgttgtacattaaaaagcagtttcttgctgtgacttctcagagccaaggattactgattccccctcccccccccacctctcttatcaactaaaaacctgtctggcgcttttggatttttgagtgtagggctactatgattcttggttctctgatttctttggtgtgatgacctgcttatggtccagtgccttgcatctctgtggagagtgggtgccaccaaccactatgatgctcagactcactgaaaccatgctgccaaccatgtttcggtgtgggcctgtgtcttcctgtgcttttatttttaataattccaatttcttggcatctccttttgtgcatgtaatgaaggatggattaaagttcctactggcataggtagaaaattcattgaacacattggaacttgtaagagcatcagctccttatctgagtgtcctatgtggtgcccagcacttttgtcatgttagcaagcctacgctaggagttgctcagctatcaccagcttccagcactaatgacttcccaataccagagttaacttggacttgatgcctgtcagagtacatcgtctgctcttcagtcacgaaatgaaaagcgtgaaagagcattagtgaacatgccttgcttgccttcagcacacctgaggctctgacataagccacactgtgtgttctcatgcccaacttggtgccacaatatgtgtaggatcaaaagaagtaaagaaagttgaacgtgtttcaagtccagttatgatttgatatctgtcattttgtggtggcgacacctgcttctaatttgaaaagtactttctatccgtgtgtgtgtgtgtgtgtgtgtgttttcttcagaaattttatcctcaagatacttaagtagtagtttttctcctttggtgttgtgcttgcatttgtgagtttatcgatcagcactgaaggcttaagacgcatttagttaaaagggaaaacctttcataacacagatctattaaatttagtttacatcagtttttgtcctggccacacattaggagtttgcagagaaattgtttgttacaggtcactactgtttgagttacatgatggttgtcttgagttgactaacaacagagttggagataaatttgaacagagcaggaactacttaaacccaacactcatatttagctgtttttcaccatcaagagcaagtgagaaaccattttcatgtgcctctgagtggaagaaatgatggaggcggctggcttgtcttctttgacacatgtagtagtcactttgttgggggatagccacttgtagtgcccagtgtcatttgctttgttgtttttttagcctgcatgaagaccttttcctcacaagtgctggataaagttcatcccatgagtagaaaaagctgtgaacgttggtgcacagctagcaacccattctgattggcctgtggggagttgtctgcttaaaattggatccttgtgttgagtttccaaaaaaggtgtgaatgtgaaaaacaagtgctaaatcatgactccagagaaaatgtcggccatgagcagtttttagtttaagcagaaaccaaactttaaaattcggataaataagacaagttgggggagagggtgagtcacttgctcccaaatcaaagcttcatggagaagcaagtttcactgaacttgaatgcgacactcaacagagacattgattgaatggaactgactcattttcttaattgatatgcaaagctctgccaagcatttacccttagtgtcagataagtaatttttaataaaatatttccaagacatgaagacagttaagaaaacagcacggtttttaataactgcactcgtaagtaaacggatctatcattatgttgtcacaaagaatgacagagagcagaaacatgctgctgatccctcacagataagtgtgtaatgtaattagacagacacccttcctctgtcgaatgcagcattaatcattagaaatgcaactcgctctgtttgatatgtcactgttgttagaaaggaaaagcaagccagggagatgtgtgctgcagtgactcatgtatttgtctgatgggtatcagaattcctcttgattgttgaatgtatgaatactgccaataattctgtggcatttttgcatgtgtgaaggtgtgtttgatatacagtgctttgttttgtttggaaaatatcagtgtcgtaagtattcttgaactcaaaatatttttaagctttgaaatggtctttgggctcatccaaaatgatggcacaatgtatagtcagattttccttaaaggggtgggctagaagttgtctgcattcaataatggtctaagagagaaactttctgtgaaaaactctgtgtccaaatgacgaaatgcattgcctttttccaacattcataaacaccgacttttaaaaaaaatccattttcttttaccatagagctccgtcttgaactgtgaattgctgaatagttataacgggttatcagcacaatttactgcacaagtctatcttctgactcgctcagtgactcaaaggcctttcagaatacagatgagggttattgaagtatggcaggcagatttcactaagtaacaggtggaggtcaacatactttatttgtggggatgagcaagaacagagatgaagcatcaaatgcttcgccataataaggtttagcaagaaaacgctgactgtaccaagctgagattctcgctgacagaaccttttcttgtgtttattacttgatttcacagttcaagcaatttggagaggcctaaaattatattccctttcccttatgaaatgtttgaatcagcttcaaatttttcacttcaaataaagtgataggtgctttccatgtgtccaagagatgttaaggtaaatagagccctcctgctgccattactccatgcattcttcagattacattttaccagtggaactctcaaatcgcaagtatttgatcatggtttaagtggcaggtagaggcatgtttgaataaacactaaagttcgcatcactggggctagggctatttgctcagataaagcatcagtaaggattttgatgaagcatgagcattgtgttgcctgtggcttcatgggggtgagaagaaaaagcctttgggcttgccaccctttcagatttgtgcacaggctttgcttttagaaagtgcacatgaccttcacgtataccacaatagcatccagagaagcaaagttgccactgctgtctgagaggatgagcaggcaagaagttagttgccactgcacacacaagagctgccccagtgaatgttcacctcaatgccagcacatgcatctctctgccctgggaggtgctgtgaccatcagtcacacatgactctggacacctaaactgtggtgatgctgagtgatggagtctgcaaatgaatgcatacacactggagtagcttcatgtggttggcctctaccacactggacaaggcaaatgcaaaccaaacacaggtgtgattattgaattttgcacctgtatatctaagaagaatgaataaaatgttttaccatgttacactgatttttttttttgcgggaaaaataatcatttgtttttctcatgctttttttttctttactcacagtccagtgaatgtaagtgattgctgtgttgagccaatgctggtccatcccataacatgtggtgggaagaaagactgggggcaatgggataggtagagaatatactatctcctggacatataagacgcacgacacacagccaggtggtggtggcacacgattcttagaagagtgttgtactgaaaggaggaagagttttggctgttcgtgttcaaagcctggcttctgtactttcttagctgtagccccttgccttctcagtctttactcccaaggcatcctctctctgagccaatcttgaacctactggactattcccaagcatgcctgacttgctcccacctacagaaagttctccatgcctccttcctgcccttatgtgtggcagacctaggctattgttgtgcttattgcaagttcaattacccatgatcctttgtactccagaatgttaatatgcatcttgattttcaagaagtagaaatcatagctgcttaacttaaattgctttgagtctacatataaatttaccttagcagatctttactctgtctgacaaggctaccatcagattctgtccagcctgattgtccagcaatttgccaagacctgggtgttaaaatgccatgagtagtcatgatcttgagtaaatttcttaacatcccttaagctctaacacctgcagtgttagattgtagataggcaaggataatacccacacatctgaaattaaagtgtaagaaattaagatatttgtaagtacacagcacatagtaggtactctctaatgtatagctttattgttttcagttgatttttggaaatgattaatatacaggaatttgatctcaccgggtgtctgctgagccaggaagtgaaggcatgtttagacctttaggcttggaggaatcctgacctggattgagggacatcgtacaggtggtcactggggattagaagctaaggaagaggaaggccagaatatgtcaagtgccatatagaccagtggttctcaacctgtgggccatgaccctcttggaggttgacaatccttttacagggctctcctaagaggatcaggaaacagatattcacattgcaattcaaagcagtagcaaaattatacttatgaagtagctatgaaaacaatgttatgaatgagggagtcactacagtatgaggaactatcgtaataggtcagagcattaggacagttgagaaccactcatacagaccagcctcacagcgtttggggagctcatcctgagcttaaagagcaaagtagcatgtgcttttagtttctctcaaacactctgtggctgtaaatgagagtccctgaaactcaacttcctgtgtcagttatgacactttgaagaaaggaatttgaatttcatgccccaaactccagccatgggcatatgaggcagtttcctatagactgtacctgggcaactgtcagagaaaaatgacagctcttcaatgaagtaagcagctgcactccgttgccttggtgtccttttaaaatgtctgtccagggactgtaggaatggctcattggttgagagcacttgttgcccttgaagaggacctgggttcaattcccagcactcacacagtggttcacaaccatatataaatccagctccagggactccaaaggcctctcctgacttccaccacacaaggcacacatgtggtacacatacatatgctcaggcaaaacatccatacacataaattaattaattaactaattaattaattaattacatggaaattttaggtttctggtttgccctccctcaaccccattgctcctataattcctgaaaggggcccttggaggtttcttaagtagtgaaaactttctagtgcctgtagcaattccttcccagcttctactgtggagttcttgatcaaagtctagggtaaagcccataatctggggatagaatagttaaaaatcatgattctcctattttctttttttcattacttaaagtaaatcttaatttatctaggagaacttgagaattaatgaattaaatatcatctaatcttatttgttgaaagctatttcttagaaaaattggggggaaaacaacaatttccagacatgtctaatctttttttttaaaaagcactaattatacctctcttcctcccaccccaagaaaattatagcctagccccttttgtatgaggtggtgtcattttctctgaattaagtgtattctagaggaaaaccttacaatttaggattagttaggtaaaagtaatggagacttcttgaaatctagcgagtgtttgtagcaggtgttgctatacataactcaaaaatcctgttggttcttattgcagatgataggttgccacatacgtagcaacggaaagcaacacacattttgtatgtcctatgtccatggtcagcagtctcactaccaggtgctcaggtctctcccaaggatgacagcatggtcttgttccatctgtagccctctctagagcttagggtcctccttcaagtcttcatggtcgctggcagaattcagcattatggctttaggaccaaggttttgcttttcttaagtctcattactctagatagtacactagaattaaaggttttgttcgttcacagaaacccctaccagttattatttgtgcagtaattatgtaaccctggtgcatagataactggtaaaagaggcattaataaggagttaatttcaaagtaatgtgaaaaagccaaactatttcaaaagcaaaagtcaaggtggatgtcctctagctttcaacatagaatattttacttgcattttgaaatttcactggtcaattaagtatacaaaacaaattaaccaaaacatacattatgcatgtagaaaaatattaaagtatataacaaggaaatgggctcaatataagtctttaaaaattgaaaacacaaagtaattttgagcttcatgacagccttagggttcacattacttaactgtgataaatttagattagacatagtctggcgtgttgttcttacatgctgactacgcttctcccctctgtaactctgtcaagaaggatttaaagtaagtgtgtgtgtgtgtgtgtgtgtgtgttcgtgttcacactacaatgtgtatgcagaggttaaacctcccaccttgtttttaggcagtgtctctctgtttgtgctgctgtactgtgtaatccaggctagccaggcagcaagctcctgctgtaggcatatatattcatttgtttgcataggtctaagcatgcatagctccactctgtcataggagtgcaaggactaagcatgcttagctccaccctgtcataggagtgcagggactaagcatacatgcctttaccctgtcataggagtgcagggactaagcatgcatgcctttaccctgtcataggagtgcggggactaagcatacatgcctttaccctgtcataggagtgcggggactaagcatacatgcctttaccctgtcataggagtgcagggactaagcatgcttagctccaccctgtcataggagtgcagggactaagcatacatgcctttaccctgtcataggagtgcggggactaagcatgcttggctttaccctgtcataggagtgcagggactaagcatgcttggctttaccctgtcacaggagtgcagggactaagcatgcttggctttaccctgtcataggagtgcggggactaagcatgtttggctttaccctgtcacaggagtgcagggactaagcatgcttggctttaccctgtcataggagtgcagggactaagcatacatgcctttaccctgtcataggagtgcagggactaagcatgcttggctttaccctgtcataggagtgcggggactaagcatgcttggctttaccctgtcacaggagtgcagggactaagcatgcttggctttaccctgtcataggagtgcggggactaagcatgtttggctttatgtaggtttgggggggttttggatgcagaacctcatgcttctttggcagtactttgaccactggcctttcccaaaagctcatattttgctgtttttaaaaaatcacttagcagcttgatcactctctacctgttactgccactctctacctgttactgcccaagttgtacttaaagttccattcttacacaccgcgcattgaggaaaatgaacattttgaagaaatcccagctttcttgaatcagtcatttgctcccttcagtatagttggttcaatgccatgattccaacagtgatcccattgttcaaaaaactgaaataaaaatcttcattcttcaaagttttgagatttttccacttctgttctgtctctgtgtctttcctaacatgtaattctggcatttgactgactttaaagtagaagagtaggtagctcaaaacttcctttgtgcaaaagaggtttgaatgacttgggagattggtcaacacttaaacgttttattatttatgtttttatttgaaggccttcccctactgtagttgaatcctaagaccttgcttgggtcgttgtcagtgattgttcacctatgacctcagtgtaccctagctgttagcacactggtacggtatggcctgtgacctttgcaacaaatataatggatgcagctacgactggcagatttgtttttaattcagatcgatcaaacaggggttgacctagaatggatctgacttaggagtatgaacagcatgaaatcacacagctacccattgtgtacttgcatctgactaggaatatactaactaatttgttcttctcttgagatgaaaatcatgagttttgttatatcaaagcatctgtgtgtgaagtcacaggtaaaagtgcaagccgtacatggagtttaaagaagagagagggagagggaaggagagagggagggagagagagagagagagagagggagggagggagaaggagagaggatattttgggacccttcggtacattttagactctttgatcaacatatttatattagagaagacctaaacagacacacttcataaccagatgcatttagataacattttataggataatattaatctctgattttaaaaaaaaccaaaacatgtttaggaatagcctctctacataaaaatactatagttcatggtactaggaattactcactgacagttacatactaatatcaatagaccaattacttatttttctagtttgcccaagtaaatctcagataagagtagacaaaacataggtatacatgtttaaatgactttttttttctttttctgatgcagtacagaccaattttatgctggaaacttgagatcccagatttgtcctgtgataaggagatttgacgtcatttcctttattatatgtccaaacttctgttgtcttacctggcacgcccccaaatgaatagatgactccagttgtgcctgtcagcacagttgctgagaacaccacaaatccagtaattacaagggactgttttcccattcttcccccagtatttttctttccaatgcatttcctaagtttaacatgctgtgaaaaccctagacactgtagaaaatgctattctttaagacacgcttttcttatgttttcttagcataagggtgatatatgttcatcataggaagggcaagtaagcaaacggaagccagcaaaccacaaaaagttaactcactgaggagccgcggttacagtgtacgcacggcttccagttctttctctgcatagaaaaaaggacacaaattatgttgtacgttctgtgattgatgtactacaacaccccatgttgtaattggcttttcagtcaacattatattataaatatctcccatgttgttattcttttacagtagtcttttcattggttaaaccatatttactgaaccagtcccaattgcttgtattttaaggatttggggtttttgtttttttttttttttacttttatcttttcttttcctgttctataaataattcactgaaagaacatctgagctgctattatcaagggcatttttatgttaaaaaagctaaattatttaaagtgtagaaaaatgctttggtgctgaaataaggttactgacaagacaaaatgattgcatgcgaggctgcctttgtgtgcctaggcagcctcctttgtaagggtcccaaaggtcacagacacgtgacagagtcactggaaaagttgaagcgtgtggaagtcagatttctgttactataacaagtacaaaaaaaatggagctttcgaaaaggtcctagaagatctagttcatgatcaggtagacctcccaggtcgtcccaggtagactcactagtgcttggcagcaaggcagggagaatataagtaaaactgcttgtctttagccaggaagcaagagagagcgagagagggagggatcggatcccaggaactcactcagtagtcaaataacccttgacctgcctcttaaaggctccccctgctcccaggagaaccactttggatgtgaagattttaacatgtaacacgcaggtcttttgcagaggacactgaagactcaagatacagaacccccccccccaatagagagaacaccaactgtccccaaatggactacgatttgaaacaataaattaaaataacttacagaaccacctgaaaggggggccattctgttactgatttgctcctgtgacaaattcaaagcaatttaatccaaatttccaattgcagatgatcccattttatttcttcacccccccccaaccccccgccactctctaagtgttgtctttttgggtcacacaagttgttgctctgtagagtaaagttacctcaccaatcacccccttcttgccaggcttgccatctccaagcacactgaagaagtctgagaagtctggtttcagcagcccctccccttcgcagacctcctccctgggaacagcattcacacagcatcaccgacctgtcattacaggacccagaggtgagtcgcttccccagagatccatagggtctacatcataaccttgagatcaaagtagcaaagtggggagacagtgaggactccctgtaactattctgaggcaataagtgatctaattcttatatttgagaatagtcttagaattttagggaccaaagagtttttggcatccaatctattgctctaaagttaaaagacacaagcctttttggtttgagggacagtagaccaaaatcaaatgtgccctcaggctatatgtgtgcacgccttgtgtgtaggtgtttggtgagtggtttttccatgtggccagttgcctatttttcaagtgacaaatgtgtttcagtctcctgtccttactgagtctctacagatatgtggcgttctgtgttgaggttgtttgcgtcagggtgctgacgagtcatcttcattccctccttttgaagtggtagatagtttgtctggttttcatggcaatgttttccttacttcagtctcatgtgcttttaagtttattattaaaatgtgtccacaagaaatatgatttatatttcacattaaagacaagccttaaaccctgaaaggatgtcagcaaatcacttagcttgatcctattgcaagatgaaaatatttattagtttatttatgaaactcagacagtaggaatatggctaactgtcaccatacttgcacccctccatcaggttgtcctttaggttcgttatctactagctgacatcaaaaaaaaaaaaacccctggaaagttacggtctaatatctactttgtcatatacctgggtaaactgatttttcttgcattagctcatgttaggcacgctgaatccgtttgtgaatctgaatccatttatgaatactgtcatagtcccaagaaaggaaatatcgttgttaagagggatacacaaagtacatgtgaaaactctcacttagaaaaaaaagtgatctgccatgggaagcaattactatgtcaagaaactcaattgcttcatccttagagatactatggtcattaatataatgtgctcttctggatctctgactgttccacgtttgtatctatggtataacgacagatgcttaccatatatacaaacatgcacacacacacacacacacatatatatatatatatatatatatgcatatatatatatatatatggatatggatacacacacacacacagtcttatatcttacacaatatatcttatacacacaacctgcaggcaattttagcacatgcggtcaagtatactgtgatgaacttgtatcctgtcagtgttcagaaagtctagggctttgcacatttcaaccttgctgcttttagactatgggtactcagcttgtgcttctttggacacaaagctgccttagctatgcccttcctgtatcccttcctgcttcatggcctcccacagctctacagcctgcatctcctctgcctttgtcttccattcttagttaatgttcaagtctggtccccatctggaataagattatctagagacaagcatctctcacatattttacatcttttcccctcacctagtgggctttaacataatgaataaattaaaggaagttgaagttcatgtaaatacacactcaaaagaaatccaccccctacccccatcatcacacacactctgataacttctcgatgcccccgaagaaacagcaagcacatatgtaaaatcttctatatgcttcgttaggagcaacaaaactggtgaagggccccagcctgtgatctagagaaaactgtgtgtgatgatctaagtctttggtactagatgctagggttggttttagtttatgctcttctgaccacttcactgtgtgcattgtaaacgtagagacatgtggtttcctaagtctaatctcctctctgacagtggctttctttgtggctttgatgtacattgcttagccttgtggcctcagttggaccatccataccctgggaataatactttgacacctatatttctgtttagttacaatcatgtaaaggagttaaattgtattggaataacctggaacaaggaaagttactaaatttcaatgaagccatttttgtcatttttgtcactgtaacatttactgggcactttaagctgaagattgagcctcccaagactttcttttgccattacttaaagtcataaccattatgatgtatccaatcatgacaatgtagtttatccatagtaactgaaaagaaaacctttgctcttcgctctgttgcttcaaaggctgtgaatttgtctagggatctaattcagttctgaaacgtgtttcactcacagcctgcttttagctctatatcttgggtcgaagtctaacagtatctgatgagaaaccataaaaattacttaaaacaattctttagttaatatattatgtattatataaatataatttaaaataaataaaatatattaaagaccaaagcaaatgtgtcataaattagatggatatgtttattaatttttccacatagaattaaattttggtggagtatttgactcttcagggtataaagcatcttcattatttttagagtgaatcagtattttaatgtctatcagtgcaaagaatgtcacctcacactttctctctttcacacacacacacacacacacacacacacacacgtatatacacatatgtgtatatttagtacacatatatttaatgtcattccacagattgttaggaaatttgccctaactttaaagcaagtcgttaagttaatttttatatagctcaagtcagacattcaaacaacttttaaagccaaatattccaatgtaatccaaatatttattaatatgatacctacatactgagaaacaatagtaggaaaacattctttgtctcccataataaaatcattttgcttctgaaagagcagagacctttgtatataaaaacatttcaattgctgacattcaacagtctcagctcagaactgaggtgtcgcaggtggcattcacaggtgtgtggcgtagatgccttgtggaatggaaagcacatgatcactcagagccaagtctgcggtagagtcacgtgattgacccaggcgaacattgcagaaacaacttgggttcgttgcctatctgattttgagttagctttttgctgatgcagatcttttagtactgccaattttgcacaacccccacatttagccatatgattccacatgcggatgcaacacacaggttaagaaactaaaccctcaagcgtttgtcccactctttttgtatttattcattttgtatatgcctgcatgtgcaagtgtgtatgtctgtgtatgtatagctatgggtgtataggtcaacagtgacttccaggggtcagttctctcctttcacaatatgggatccagatattaagcccaggtcatcaggctgaacaacaagagccttcactagctagtccattgttcaaacctttgtctgactccatttaagaattatttgcagtaatcatcagtgatattttagagtttcttaaagatatgagagttcttgaagcttatctttctgcctaaagccttgtgttttcaaaagtaatgagaaatgacactttaatatttcacaccaaggaaagcaactgtgctttagagaaactgggaggccaaatgcaaagaactgggctctaggaatcatttggcctaatgtgtctcaatataacctaacaatgtgtctacgggtatcagaaagataccattaagtcatgacttaagagaattataagccaggcttggtgatacaggcctagaatgcagcaagagacaaagagaggagaatcttcaaagctcaatagacaatagaatgtgtttaaggccagcctggataacttagtgagatcatattgtaaaattgaaaaataaatttaaaaaatggttgtggctatagttcaatagtagactgcaagtctcccgtgtgcagggcatgctggcccaggtagattccctggttaaaaaaaaaaaaaagcaaaaacaaaagcaaaaaataaaataaaataaaatttaactgttagtataattctatgctattatgacaccaaatgatatcaaggaatgaaaagtcctctttatgatttggatatgcatggttccctaaagtttcatgtggtagaacctttgtccccagtgttgctgtgtgtggttcctggtacatttaagagatgaagtctagtgcaaggtaattatgtcaggggctccttcaagagtaaactaatactgtctcctgagaaaggtcaaggtctggttggtaggaatagattcattcctgatgatgggttgttataaaaggcttaggcctgattcctcactggtctcttatgttctttcttataaacatgacacttctgtatgtgatcatttctctcttagcttctctgtcatgttatgacagagccaggggaccttcacctgcatggcagtcactagtcatcagaatctagaggcatataagtatctcttccagcacccaaccttagatattttgttatagtaactcagaacagactagcaaagccagaagtcggaaggagcctctgctcagtatgaccaccacactccttcttgccttccatcgacgttttcagctaaaagaaagattatgaggtactagctcataaccacttataattcttctcttttcacatttatttattgtggatacatgggcatatcatgatatacaacatgcataaaggttagaagacacattgtacaagtttctccttctgccacgttggtctcaaaaattaaagtagggtcttcaggcttggcagcaagcacctttacccattgaaacatctcaccagccaactgttaccttttgtatggtcccatggtcagaactatactgtatgattggctctagcaacaagggagggtccaaaatatagatgtcaatttttagctgaatgtaatcatcaatatgtataaaattggggttgtatgaattagtagataatgaagtaatatattaacaagcagttcctgatgaacttggtatgacttactgatagcaatctgagctggccatagccaagaccagaattcatcttatttagtttcctgttcagtatttcctaaaatttactctgccactaggggttggggaaagccaccttcatttaaacctttagtttgtcctctcatttaattagtccaagacatgatgtggccatttaactattttgataatcatgtgtagcctgtgttaacagtctgagttgttatatagctaaacttaacaactcatgtatcttccttctttcttcattagacttagcctgtaatcccttgcttctagcgaaggcatggtttctgtaaggcaaaagtcacttcaaacattttttataccattctggattttctacatgttaaaatcaacttgaaaactcctggtaccatctggtgacccattactttttcccacaaatgtttaccaagtgctcacaacaaacaaggtactcttacagctactggacagagggagcaagtgcagcccgactctgatccccagagtacttaccacttggcagctgagggaagagaagagccagaagttgtatggtggtctgatcaaccctaatcggaatgcctgaaatcaaaaatgctcaaagtataggcttttgagcacagatgagatacagcctgtgtatcaccttggtgctcaatatttggtacatttcacactctcaggttagggttgtttcattggtaagtatatacagatattctcaaatctaaagcgaaatccaaactcaaaaacacacagtgccaagcattttagaaaatggacttgacctacactgtgctaggagaggcaccagatgccaggcaagacaaagaagggcatcctcatggggaaataccatggcatttggcattgtcagagcacaaacaagcatgatgcttaaccccatctcaagccttttgccatctgtttatcagtatgcaaaatagagagctactgaaaacaaataattttgttagataactaggtactatgaaattaaaatgaagtgattgcaggtgtggctaaacaccacatctttgtgtgtgtgtgtgtgtgtgtgtgtgtgtgtgtgtgtgtatgcaagagagagagagagagagagagagagaatagtttagatgccaaatgattctgagactattcataacatataccagagcaatagtcacacaagacctccagaatcaagcaaacagaggagagcaaatcaaagccaagggaccccaccacatactcgtcaaaatagagtgctgttcaattgtattcatcaaattaaaatagtcatcataattttgttttctatgtaaacaaaaatgaatgccctgtgcctacatgcttaagtgatgctatcttctctaagagtgtggcactctgcgtttctgagtttggattttattttagatttgagaatatctgtatatacttaccaatgaagcaaccctaacccgagagtgtgaaataacttaaaaatagaattcaccaggctgcccatcgtgtattcacgactcctgtgtttattgagaaactgccactgattttctaggtagatccattacttacatttccaccagtgaggcaaggtccagttgctccagactctaatcaagcctcactactatcttttttatcccagttacgaatggcatcccattgtgtgatccgttacactgccctgatattaaacaatgctgaccacaaaataataataataataataataataataataataataataatagtcacacaaaccaaagatttgttgtgaagctatcaaagagtcatgctagtctctgtttagggaggtcttccaaactttacatgctcgaaaagatttctaagtccatgatcctcctgctccttgtgatgaaacatctgaatggctaaagtcaactctatctcccagtttggccaagaaaaatacactgcagagaattatgagcatgaagaccatcttcctagaaataaaggtcaccatgaatggttgaaggagtatgggtttgtagcatgcacagacagtaagaaagcaacagggaaagagagattaatatgaaggcagtggtttctaaatggcagcaaccatgtctttttctgctcatcactgaatccttccctctacctcatgagcactcaataaatattcttcaaataaatgaatgaatgcatataggaactaatgggatgtccttcccaccacatttggtggtaataataataatttattaataatgttcaggaacatgtattttgaagtatttgtagaagtgccttgaatgtgcaggtattcaatatttgtatctatttggtttcaatttagaatttctaccttggacctggaaagatggctcagagtttaagagtatggttgctcttccagggaactctagttcaattcccagcacccacatggcaggtcacaactctctgtaattccagttccaggagatctgacagcctcatacagaatgcatgcaagcaaaataccactgcaaaaaaataaaaaaaataaaaaaaaaaaaaacctttctaccttgctatgtattaggaaaaattagctcaaaattttgggtctctttaaaaaggcacatatttgcctatagtactgtgtttccatccactgacaagctagaaggagagatataccctggggtcccatcactgtatccatgaccctgcactgttggcacagtctcccaaggggtaatttctcaggctttcccctgtcatctgcaaacttcttggctgtttaggaaagcttcatgaacttagctgtggaccagttagctgatgctcaactgaatctaatttgtttctcctgggttactgcaattgaatcatctcaagaaaatgagaagtaattaagtacctgttgcaaacatggtgccgacatcccctgccagcagacagacgcacggtgtttatttattattggagtttgtcatctgggagaacatgacatcgcccttctccaggaggaattactccagttgctttgcaaattcaggcatcacagacctaacaagctccactctggggcctgggcaagacaggaaagatttgggaacacagagtgagccacgtgcagtgtccagcttcctgggaaacctcgtccaggggcctgggagttactggacagcggagaggaaatgcagcattttcacaaaggctccttaagtatcagttcaggaaattattaaattcattagccagatacttacaaccagctattactgcccagccaaaggaaaaaccagagccagcaaatgttttaaaactacagctaaacaaaagtcaggaagcgtgtaattaaaactgtacctttattgtattgtaaagagtttcactgtgacatggaaaatatttaaaggagaaggctgtttagctaatttgtctgcaagtgagctgcagaatggagaaccatcctaaattaactgtaaggccacccactgagcgatcctcataaagggccagggcagctcagcttggttttgtgtaactgttcaataattaccagataaatgcataactcaaagctctattacactaataatttgtatgaagatagatgtgtgggacaccctgctgggttaatttgtcatcctgcaggaaactttaaagagagctcctctgtagtgggctcatgttaatatgctgtccagggaggacaggttagagcaggggaccacttggctccttaatcttttcaagaggcacaatgagaatggggtgattagcttagtggaccccacatccacactcattccgacaaaggaagctgcctccacgcatgtctgtggcaaggttgtgtgtctgaaggaggaagagggattcacggagccacgtccacatataagtggtagccgtggccaaccccccggattgattccagatacatcaactgtaactggctttatagtcagatgagtccctgagcagccctttctttctcgtttagcttaacctttccttgattccatgcttaagaatcattactagggttttttgttttgttttgtttttcagcacaaaaacaaaaatttgaaattgaacttttatcttctctttatgtgaaattgtctctccctccctctccccttccctttttctgccttcccccaactgctgtttcgaatataaagctcacatttaggcatcagtgcaggtttgaggctcctctattgacagaatcataaatcatgctcaagttaagtgcattgcattgcctggagctgagcttctgcagtgtttaagtagtccagcctatcacgcacgcacggagcaagggaacacagtctggaggactcttctgtcctgtccaaaggactgcaagaacacagtcactcttccgggctgcgtcctttgtgttgggagcgctggtgcatttaatcatcagttgcttctctgcatcttcccgaaacttctgtttgcttccacgaaaagcacgtgtgagaacatcagagctgcctggttctccttcagtaataaaaggcctggaacagaaggaaggtctaaaaggaaacagaccatttgacctccgaaaaagtaatttaaacagaagcagggagtgcctagccaggtgctgtgcctggcagtggagttgaccacaatagagttcaagtccttcccagccatgtggactctatgtaagcttttggatgtcgtttgtcctcagtgggcctttgttttcccacttttgcataattggaaagcattggagtgaggagagtgaattgcctgtcctgtggaaggagggacttggaatgcagtgtgtgtccagtaagtggcatttttctcccagacccccacccctgccctgagaacttccattgctctctttgtgtttgcattcttgaaatgatctcacaccctctcgctcctgacctgccatctactcttgatctagaagtaacctagaacaagctggaaaagaaaaatggtcttgggaaagatagcagacccgggttccctgtgctgcccccccccaaccccccccacacacaccttatgtggaagaggagtgaactcggaagtagagcaggtagcccatcacttcatgtcagagacttcacctagaggagccttctttatctatggctctcactaaatgtttgttaattggggtctgctgcttacagagtcagttcagcaaataatagttgagcctttgtctggcactaagaatagaggcccaaatggccaagctcaaaaggccacccctgccagtctacctgatagagcagacatcattgatggggaggtgataaatagccagaggacagcatcagcatcaactgagcagctggtggagatcttaggctatgattatcaggttccgtgggcaccttctgttgacatagttagaaaaccttgtcgtctttagggaatgtcaccagatcttcctaaacccccagattcctgagcactataataaaagctgattatagctaagtactagacagtgaactgtgttaataaagactctgagaattccaaccaaattgcttaaccacccttccattgactagccacagagataacaggttaggttaagaactgaaaaaatctaggagagtgtgcctttgagtggacacacatcaagtatacagatcatagcttgccccctccagccctctcattgtgagccccattcacagactatgtgtcctcatgttgtagcacacaaagtgtggacaacttcacacttaatttccactaccttggcaatccaaaagggaaaagaatggcttttctacaacacatctagaaaagcgcctaccaccagattagtctctgactggcctaatcaggatcatttgctcatcttttagacaatctttatacctgcaagataacaggatgtctcattgtgtagcctgttgtctataaccaccatcagaaccaggtatcaggattgctaatcacataacctgaggctgagggagaagagctctccaaagaaatggtagcactccacttacagaagaaaggaagaggatggcagggtgggcagaaaaccagacctgtgcattacaggagggagagacaggagctaagttgcttggagagataggcagccagcagccatgctcaccagtccacgagttggttctgcacttagcacttgcagagcacaggtaaaatgcaagctgagaaagccatcatcagctcatgctctgaaccttgtattagtaactttgtatcagttaccttttcggttgctgtggggaaataccataagcaaaaggaacttaagaaagaaatggtttattcttgcttcagacggatagagtccatcgtggaggggaagacatggcaggagcaagaagctagctggtgacactttcatacacacagaaaacagagtaatagaaggctataaacccttaaagtcttaccctagtgaagtactttctccagcaaggctgtacctcctacggctctataaccttctcagacagtgccaccaactggagatcgggtgttcaaatacatgaccctgtggaggattgtcactcagaccatggtgtatgcgcagcttcattcgtaaacagttcaactcttgagtgtcagtttcctaacaccactctatactctgtattacatttcatatttctcattcccagagatatctgaaggataataaatatctccagtctagtttgaatcctgtttagcctgtagcagattctcagtatgtttgttgaatgtgtgggctgactaagtacctctatatattcattcttaccctcagaacagtcttctttttagtgctattacacacttataaaaagaagtgtgcccgtttcgaaagtttaagcagctttctgcagattatccaaaactgtgcagttgctttctataatccacatagaacagaggatacccgccaaaggaaaggaggaccaggagaggctggcccagcacagtggatattagagccagatggtaccagactttacatgctggaccaacacttcctcctcttgaataaaattcactaatataaggaagaaatactgtaattctgcaggataacttaagagacttcacattcaggagggcattctgaagtaacctgtagcaatcacattcaacagcacaatcttaaagtgtggtcagcctgatagttggcaaggagaagtgctaaaaattagcctttggctttgcagttgctgtgctaccttaatttctgtgataaaacgccttaatcaaaagcaacttggagaggaaagagtttatttcaccttagagcttataatccaccattgtgtgaagtcgaagcaggaatctggaggcaggaactaaggcagagactatggaggagttctgtatactggcttgctctcctaactgcctcagcctggattcttaaacaccccaggactgctcatagggagtataactcagtagtctggaccctcctatatcaatcactaatcaagaagatgtcccacggtgttacctatcggccaatacaatggagacagcttctcaattaattaaggttcgttcttcccaggtgactgtagcttgaggccaattgacaaaaacaccaactagcacaaggattttccttgcttttcattaacatggtttacttgcttcatactgaatggagataaagacttgcaaacatcacgattcccagcacctgtcatccatgcagccgtagcttctgcacagatatggttgctaaagctttcttgcaacactcaatctgccactccaggggtcttgaagcccctcagaagatttccacctgctcctgttaaccacatattcatcccttcagtgatgggatgggctttttttttcctcaaattgtttcgatgtatttgtcattcttcatctcttgtctcatagtctcacttgcatttgacatagaagtctaagttcccttcatagagctggattcctgtcaactttgcctattaaattatcactcttcatatctgcgctagccacagctgtagggtgctgtttgaacacatttcacatcagccaccatggtagcttatgcaattaatgtgggaatatggtcagttcagaaaccctgtcaggataaaggctggggctctacatcagatcttaacccagaatactccatgtctataaaactctggatatgctagccaacagaccagatggtccctgtagcttattttttaaatatgttcttttaaatggctcatgctctattgctttccagtcttctagattttaattttattactatgaatcaattgtactcagttatttgtaaacataattgttgatactgaattccatcgacccactcaaaatttaaagtggatgggcctccaagtattttgtgcaagttctgtttcaaaatgagagaaccaggggagggtgcattcttgtcagccatatcggagcagaaacttaacacccggtgtctaaatagaaagctgtcccaaaatatgcccttggtcacaggaaagccaacttttgtagcaagcttgtgttaactgtctaactagcccacaccctggggccctccatgggcgtgatggtttctatgttaggtggcatgcccagaatctggatagatcagaaggcagtaggaatgacagatgtgtctacatggagaaagaagaggccggtgtgaacagtcagaattaacacccaaactcagagttctaagtagaaaagtgtctacagcaagatggccatgtagttgtaaacatctatgttgtctcacagcctgtgtcttaggcaaaagtaggaaagatttttttgttcagaaaagaaacttttcaggttactgaatatagttcgactctaagatcaaaggcatccccactgctaattttgtatttgtatttggttatttgaaaaattagttctgagatccttatgtcatatgaagtctgaagctgctcttttaatatccacatactcctgtggagacaggcagagaaaggcactctactccctgcccctaactcccaacctcctatatgatacagtctgtgtacagccagcactgatctgaggacatgggaataaattccagtgtcgtacttgcctgccagcatcctctcctgcaatgcaatataacagtagcaaaaaagagtagcaaaattacaagatgctgtttgtggatcgtcatgtgaaatggtaaagcttccctctgaagtctatttatgaactggtcactgtgtgcaaagactagcaacctaagcttcttcctcccagatgttgacagacggagactgctggcatagagagacctctttctgagattagctaacccctccccaagtgctgtacctaataaacacgctgaagttctgggttgtggcagtgactgatcccagatttcctgtacatgtatctatgtgtctgtcctttcttcatcctcttactgcccttcctcggtgtactggtatgcaagctgcattagcctcagacagtcaagtctattattctaagacccatgagtcatatcctacgctgcattactcttctgacatatatgcttgggatgacatagatgtaactagctcagaacaaggcacgctaaataacggtgaggaagaggcatggaaggtgaagaggaggtttgtggaggcatggaagccattccgaaagccttgagagcataagaagaccaggacctgacaatggcttgtaaacaaagcacaaagagatcagtgactgaccggttccctgcagaggtgagagggtgtgagaaggactagaacttctgagtctataccaggtcaaacccaggcctggcctatacttttattgagattattaagattttattgaacatagtttcaccattttgctaatagcatgtctgtagcaacttctgcagcacagagtagaatattgccacagaccttcaacatatctattccaccagcatttctcaacctgtgagtctcaaccactttggggactgacccatcctttcaaaaggattacatatcaaatatactatatgacaaatatttacattataattttataacagtcacaaaattacgtttatgaagtcgcaacaaaaatatccttgtggttaggattcaccacaatttgaggaactgtactaaaggggcacagcggtaggaagtttgagagtcactgatctccagacagggcgtctccatcatgctggagaccaaaacccagagctttggaaaaacacagaacattttcctccataggctgtgatgtactgcttgtttggttggttggttggctttgtgtgtgatatgggggagtggtcacctaggagccacagcctgcctgcaaagttaagaggtcaacttcgtggagtcaaaggaaacagttaaaattaattaaaattgataaagaatataaaacaactttggcctctctttgttggaggagaggagatctgttttttttccaagaaatgaacactctgatcttcaagtgttgtagtcaaaaagacggcttaaattcaagtagactcactcaacatctccatgttgggacaatgcagtcgcttactgttaccgcatctgaagcagtcgtacagaaatactgccgtttcgcagagcatcacgaaatgtgaggctttcccccctgtgcctttcacatgcttctcggtgacactcaaggtatggactgagagtcttggaaaaatctgaagagccttagcttgctttgagtcgcatgctttgttacttaggaaaggctcagcctcctaagtgccgagtagcagttccaattcctccctccctctgtctgttaacataaatcacgcagctccaaacttctcggctttcgtaaatggcaggcctgattcatgcatgatttatcaattatagctgtgggccattaggatagatttctcagcttcaggtaggctgctttcgggggttgtaggggttggtttagaatttctaaagaagctcggtagttgacaacccaaacaatataacttccgattgcccttgttgggggctttttggttttaagtaggattttttttttcttataatttcttctccttttggagctttgccttggtatcaaaaaagaaaaaaaaatgttttaagcaagagtagtcgggagtgctcaaagccactctttcttgcaaagagctcatctagatcctgcagacagacgggtggctgttcctcatgacagcccagcagaagaaacaacttggaacctcacctgttgcccctaatgattaatgggcagaagatgacgcttggcagattctgggcttgggcaagcccttcattcttgccagggaagaaacctctatcttgaagcacttggaggagtagattttatggctgtgtcacctctggacgtttttttttttttttaatgtatcctctcctaggacagagtaggatctgaaggctgataccaaaaagcaagagctaatgtctctatgtaagctgtgagaacctacagtggttcacagatgaggaataagtcaggacagtggcagagctgcatagaataacatggttcaacacatggttcttggaacttggaaggctgatcctggaaatcatgagaagaaatggcattcttcctgagattttaataaagcataagcatacaaggtctggccaccccccagtaccatcctgtttatgtactcacatgcactctactaaagcatgagtctaagaggtctctgccctgacactaggctgtgacaccaagcatcactagcaaatggcctgtccctctatgcagtaattactttggccttctcctccctagtcctggtcaactccaatttaaagggtgggagccttttttacttaaacatatgttcagttgtgttagacttttagccttctccttcttcaaattaaaagagataattttatataattagaaatttcttggagactggggaggagggaggccaggacaatctgcctgaacataagtgattgctggaccttgaggaaatcctttctctaaatgtgtttgtggtaactttgtgtgtgcaatcacagatccatttccttcctctccatcttatttgtattcccatgaaaagcccaagttgttgttgtaagccaggttggctgctagctaacggctacgctagtagtgagagccattcatattggagtgttcccaacagacactgtgttgctcctggcctggggtattgagagtactagaccccaaaagcagccaattggtggtgtcttttaattcacagtactatattaacatcaacatggatccagatggatgctctgtaataaactataaccactggagaaaaggctatattgactctcaagtaaataatgcacattttaaaggatccaaatatgcatttacataatgtactataattttttattgtgtcaactattcacacacacatccatcagagatgtttctcctcatcaaaaatttggactcataacactctatgtattccattaacatcatgccagcttcataatggtagtttctcttcaacacagcttgccccagccatctcaaagaacatctaataaattaattgtttggttgatttcaccccaataactcctactaaaatgatttgagaagacttagataaaaacgtaggtacactaagaacatcaaacccaagggaaaagggaagaaaaaaagaagaaaaagattcaatcttagctctggacttttagtggtcctcagtgtccagtagaagaagaagattatccagagaaacaccagggatgaaatggtaaccaacagatctttgtgatgtctataacaggttctctctgaggaaattaaaggtcatgatctagaatcatctgcttccgtctctacagtgactttctttcccaagcaagagaaaagatgcttgaagaagacagccctacaaatgcagactcagcagatgtctgatttagaatctcaggctagatgacttcctggaattaactaagaattaattgatcctaatcaatcggccattatagaattaattctataaagtaccatatagtctttggtctgcaatgagtttgacaccataaggaagagatgaatacactgctgttactaaaacgtaataaagaaatgaaagtctacactttgttcttccttcttcttgagtttcatgtgttttgcaagttgtatcttgggtattctaagtttctgggctaaaatccacttagaagagcaaagtgtgaacaatttgccccttcttagaattgggaacaaaacacccatggaaggagttacagagacaaagtttggagctgagacgaaaggatgaaccatccagacactgccccacccggggtccatcccataatcagccaccaaatgcagacactattgcatacgccagcaagattttgctgaagggatcctgtctcatgtgaggctatgccagtgcctggcaaacacagaagtggatgctcacagtcaactattggatggaacacagggctcccaatggaggagctagagaaagtacccaaggagctgaaggggtctgcaaccctataggtggaacaacaatatgaactaaccagtacctccagagctcgtatctctaggtgcatatgtagcagaagatggcctagtcggccatcattgggaagagaggcccctaggtcttgcaaactttatatgcctcagtacaggggaaacaccaggaccaagaagtgagagtgggtgggtagggggatcagaggagagggggggagggtttaggggactttcgggnnnnnnnnnnnnnnnnnnnnagggtataggggactttcgggatagcatttgaaatgtaaatgaagtaaatacctaataaaaaattggaggaaaaaatgaaagtctaaatttacactgctaatcattttcttttacatctttaataaaataagttcaatggtatttattaacaactaatggagagagcgcatggtacgggtgaattatttcttctgtcatgtttctttaacttttatctacttattctttgctcaaacctgtgtttttccttgggcagcatactctttgatggctaccactatttcttatctaaaagccatttatcactttctgggaggccatgaggcaaagccacttgatcctcaaggtcattctcaggggactctggacagtggagtggtcacctttgtgtttgaggtgctgcaacagttgagtctaaaattttgttcagctcagtgcattcctattcttgtttgagaaataccacctacctacaatgctaactagaaatgattctgtcagaaacaggtctctctggtcagcgtttcttgctaccagtgaaaacaactgaatctgtgctggaagaaagaaaaaaaaagattcctttcattctttaaatccagcagcacaatttgtaggggaagagcaaaccaggagcttttaactctttagcttctgagttttcactcagataccataatggattctaaacatgtatctcattctatgcagtcttaacttagaaccaatttttcaccatgctctctggctcttcatcagggggcaaaaacatatttttgtccttggaaagttttatgcttgttttttcttaatttttaaactcctttactcagccatttattgtgcaatcaccaaatatatctcaagtgtcaggctccgttctgagtctatcacagtgagtgtgactaagtggataggaatctgctctaccaagacaagattgtgtagaagagtaagtgaagagtctagaaaattctgatttcagtcattgtttgtgatgtcctcagttgaatgactaagggtaaaactttacctaggttatcccaacttggtttcttcaacccagagtggaagcctgtgaattttttttctttctttttttttttctttttcaagacagagtttctctgtgtagccctggctgtcctggaactaactctgtagaccaggctggccttgaactcagaaatccgcctgcctctgcctccctagtgctgggattaaaggcatgcgccaccactgcccgcgagcctgtgaatttttattaaatgaattcaagtggcctgaaagcaatggttctgcctaattatctgcaagacctgggttggagtcctgcttctgctccagcctgcatttttactctaggatctacgaggattgctcaacaattgtccacaaaaccatagacccttacgctattagttaaaaaaatactgtaatcctaaggaggcccccatatcagtaggcatctcaatcattccaatgggatggtgagagaaaggcagagagaacagactgaactttggcttctcttccatgttatgcatcactcttggtattcagaaagatagagtccctaaaactgtggacatgtctaggtttttccgtgtaggagctcctgcagcgtaaagatttaaattacaaaaggagggaagggaaaaccatatggatccctgtctggagtcttttctgccctgacttgacttgggatgagtgttgtcagtccttcacgtgcggccattagcctctggcgggtcttggctgtcgtccttccaattcaagaacaaaagcattcctggaaaaaaaattattatgcatctcacataagctttttttatctaatgtaatcttgtataaatgataattatcagggttcaagtataaaggagtcgtcgtcgtcgtctgactctgttatcagatttatggagagaagcagcctctcacaacatccctgcctgctcagcctgtggctgccttggctttgaaagggcaacagagaaaaatgcaacctgaaccttccactgtaaagtacagcatccaaattgcatgggttcattaagtgatcatttactacggacttcagaaaaaaaaaaaaaaaagctctagtcctgaattagtccctagaaatttccttgaaaggagtataagagctttaacaatgaattattatctatggagagctcagcatgaaaggggatccatatgtgcaaagtagaatttgtcaaatgtaatgtcggttaaatcaggtctaatctaccaaatacattttttattgcttgcttcattaaaaaggctcttaaggtaatgaataatcttcatcttcaacaaggattattaatgcctttataactcacgtccactgaacatggagaggcaacttgaaattctatcctcctctaacctacatgtttgtcttagcgccttaaaggaacaaatccatcagaactgcgcagtgtgcgacatcctgtcgcatgagcagcaccgtgaactgggccagcggaagaagtgaacagaggaaactgatgggctcagctgtggcaaaccaggtctttttctccaaacccctgacggttgctgttttcttttgtttcttgcagcaagtccacatgcgacgccatcgactctccactttccaacgtcacccatcatccagcagcctgggccttacttctcacacccagccatccgttaccaccctcaggagacgctgaaagagtttgtccaacttgtctgtcctgatgctggtcagcaagctggacaggtggggttcctcaatgtaaggaaaccaatttttttcttcctatttctttagaaatgctaagcaagtgtgaaaataacaagaagacactttatgatcatgtgactttgggttgtaatgtccatgctgactgactgcaggcaaatgtcatatttattctagattatgggaaaatgaacttgctgtaagagggattggccgggatttaaaaacagtgtttgtgttaagtttgcaactgtcaagcttatggatataaattgtctggagtgtgaaccatgtaaccttcccagttccacctcctgcattctaaccccaggatcatacagttaacaaaatagaaagaccaaataattttaaataatggttcggggcagtcgagagaggcagagagcagagggagacagatgtttcagatcaaccaagttgatgtttaaaaaaagaatacagtcttctaacactttagatcaagttgaccagtacttgaacttaagatgctagaggcaacatttactgtagtttgttatttctgcaagtagttatcttttccacttatctacatataaaactaagccatgttcaataaccataaatgaatgttttcatttttctcaaataaaccaaatagtcacaatttgaaatagcactccaatactaaaagttattttataaaatcgcaaattttattacaaatataaaagctatagtttacaatgaacgactatatcccaaggccaatggcaataataataataaattaagaccagcagaaagccatatttgatttccttttctcataatatctatgcatgaagccacagattagccataattattactgcctggtttaggatgttatgtcacatccctctgtcacaggttttttcccccctgcagaaagacctgattctgcagatctgagccagaatgggcagctttgactaatgtctggtgatatgttcacagatacacttctgtctagacaacaaatcaatatggtgccttttttccattttgcttgtatattcatttgcttggcttattctaaaatattcacttatggactctcagtctactcagaaataatctcaaagattctgtagccttctgatcaccagacagcatctgaggaaaaaaatactaaaaataccacaaatgctaatggacttttactcttaaaagcccaggacaatggaatctcctttgactgaattttgggttggggctacagtctacgtacaggcagttactagctgtaactcagtatggaaagccacttgggaaacattgaaaacccgagctgattgcaagtaccaggtttgacttctgaataccaagtgtggttttcactagtcatgacatcatctcatataactatcaaatactctgttttacattttgatcaaaattttacaggtttcttttttaagacaagtttcttcatacatctattttgaagatcttgaaaatacatgtggcatgatctcttctgagggaaacatgcttttgttagaaagctgctatttgtccgttccaacatcagagaagtataagtctcatggcatctgctagtataagtcaaatcaggagtgcaatatataggaagaataattgcaaaaataaaagcaaaaatctgatagccaaaagcttctgtgcctaatgctatatgatatgtgcaaggaaatatccttgttcagtgaatacatttattaactgtattataaaatcaactttaggaaatgaaaaaaatatcatttggtatattttatatacagatgcagggatcatcattttacctatataagcaaacatagtgaaataatacctcagtctataagcatggagatactaaataagcctttaggagtcatgagaatgttggtggcagcagcatctgatatagcactgagcaagaggtggatactcaggtagacaaaagaccagagtactccggacatggcaccctgggaactaacaatcactgtgtttccaacggcctgaatattagtgatttgtatggcaggtacctaacgaaactctcccttttggaaacagctggtggctgacatctgtttctttttcttgtatgtgttttctctgaacccttgcagcccaatggaagcagtcaaggcaaggtgcacaacccattcctccccaccccaatgttgccgccgccgccaccaccaccgatggccaggcctgtgcctctgcccatgccagacaccaagcctccaaccacatcaacagaaggaggtgcagcctcccccacctcaccgagtgagtatggctgagattaggcgccggttacttaccatgctccatgcacttgagttcacacctaagccttgtccctggctgtgcaggctccagcaataggcccagatccccacccccatccccacccctgctgccctgttatgtctatagcataagctggagcccatatccaagagcccatatccaagccacttgtatgcatggtcaaactacaccagatatggaaatgattgggtgtaggtggtagattaaaatagtgtaaaggcatgctgaggactgggctaataaattttgtgtatttctggagtggtttgcatagagtgctattcccatgatgttctaagagtatctccttatgtctattcttaatagcaaaaggtttcatgttttccctagaaacttgacaaggaaaaaagtatatgcctggtatataagatagaaaatatatcttgatcaaagtgactactcaaaggtatagtaagaagggccccaaaacagatcagagctagaggccatgggggctgcatgagaagacttaggaaggtaagggactagagaaaaggactgaatggagaaaggaccttttggctcttctctcagcagtctgaggatacttgatcagaaaataggggattctgaagtctctatgattgggaatgatgcaacagtgggcaattctccaaattttctttgtattttggagctatcagggccagaaatggtgtgagcacacaactatggcctctattcatgtctgcaataaaggtagaaagagtgatggctggagtttccaggtgacctggcaacctagccttaagagatggtgtgatgggccttccccagtgctgcagagaggatgaaagtgtagaaatgggggcagaggaagagcctggggacagcggggacaggggtcctctaaaagaagtgagaatgtgaaaagatggaagaacagtgtggaaaagaagcatttaagtcaggaactagaagaacactaacagcagttgaatggaaggaaactggggaagagtattttgtaaatataaacaagcatttaaataagaggcctttggctttcttatatttaacattttaattaatgatattggatacaggagagagagggccaaagagggaccacagtcctctgcttagatcatagtcactggaatcggttctggggacacagaatctaaagtgacttgcatccctcttggacataggtcagagagcgaactttgcatcatctagtgtttatgtctttggataaggggatgacattgtgtataaattatacagcaaaaagactagaatccagagtcagttttgggagacagacctacttggtaagacatggttcagtctaacacctagcagccaaagagaaaaatcagtgtccattgacatgggaaggaagttgcctaacggagttgttggcactcctcagaagcaagctggggaaaggcttgaaaactaatgttagtactgggtaaaaaattaaggctaaattgtgcttttgagaaaccatgtgctttcttagaagctagaatggcagggtggtttgatctgtttatccttagcagtttataagatctcagctgcagcaggaagcagggggttagggaaagatagacgttcagcatcccaacagtgtgtccaaactgaactgaaacttgtttcaaagaacagtggcacacacttgtctgtttaggggtttgggtttgcttgcaataaaataagaatattttttggtttgaaaaaataataaaacatgaaatcaagccaaagggcttctctattaccaacttttgcaagacctcaatttcctctagaatagaaatagcattagcttctctgtccactctcacagcaggtgatcaggagggaataggctaatatgcaggctatgtgacagacaaaaggccaaggcatcattgttaacatcttctgataatgaactacaaatagatgccagcctagagcagaatatgtgttgcctctggcactgatactaaacttttcagcatgggggggaaagccatgggcaaggcagatctggaaaaaattacctataaaataaatgtatcttaatgggaaaaatctgttcccttcccttaaagatcaggaaagtaggaatgggggaaagttgtgctcttccctaaaaagaacgtttatattttggtatgtgtacatgaccattggctacagcgtgcaggactgttagaatgtggtagataggatgtttgacctgggagagcagttcacacggtgtggtccacacacactggagctgccactgtgggtttctatccccactaaaggaaacctcatttgcattcatgctcttgagcatcagctgtgtgccaaaaccctcctcagcacctagaagagggaataaacatgatttagaaatcatgatgttatgaagactttattccaaagaggaagagcaagaacaaacaacacaataagttgtgaaaggcaggcaatgtaagacagggatccctgtgtgtgtgaatccaagaagcagtaagggtgggatagcatgcaagcggggagcaagacttaccagccctttgacattaggcaaaggccctgatgggtgggaccagatgactggtaggcagaaggctcaggtaacaagcatggagttaagcccttgggagtatgaagcttgtaggcctgtgtcaggacttgtacatttcctgcaagtggaactctgagcagaggaatgcttcctgaagcctggatgttagtagagaattgtggagggctttgttgaagtaggttctgggggtggggtatggggaacaaagaaacagagcatgatgaatgcaatgggtttcttgtacacgtcagcccccattagaaacagagccataccaaggcaaatgcaaaagataagaacttccatcctggtggccaggaagcttaaaacaaccaaacataagtgagttaggaagctaggaaccagtcaaagaaattaagaaagtagaattgtgcagagtatgttgaggggtgccatggaaatcacccagtgagttgtctgtgcactgacctggggacagagtcagtagaggctgtaagaagctcttggactccaagaatattctaaagatagagttagtaagctttgcaggtacatctgatctggtacagaaaaaggagagacatcagtaatgacccgtatgtagggttttttttttttttttaccttgagcttttgaagggagggagataagaaggttctaagaggagccattctgggtgaggggtgggcactggaaggtggagtccatgaggcctcccagtgctcaggcttagcataacttgctgccaatgtcagattacagagtttttcagggtgcatcttcttaataaagggcttcttttaaaacagacagtatagcataagagttttttaaaaggctgcatgtggtggtgcataagtttaacctcagcacttgagtgacagaggctgctggatcttatgagttcaaggccagcctgatctatagtgaattctaggcacccagaactacatagtgagattccaccaccaccacccttaaaaaaaaagagttttctgggtcctcatgtcatgggttgggactagctcataccacaaaaatggaatttcccatatatatttttttttctgaagtgaagatcggcatcataacatggaattataatgcaaaggagaaaacacttttgaattatggtaggagataaaatatgcatattttcctttgttaattaattaaaaatcaatttaaggtgcataaaaaactcataaacatttctctcttccattccttcttagtaatgaactcttgatttctttaaactaaaattctattaaattagaaccatgtaatagcaagttacatttattgtttatttttatgtctcaaatgaatcttgcatccatttcattctgtaaatgaatatgtacctataaccaagaacataacaatgatctaccaccagaacaaacgtgtttaagtctaacaattaacatatgttcaaggccttttgtgagcaaactccacacctgcatgcattatcttccttccactcccttgaggtcagtatttcatagacagggcaactgatatgagaaatttgaggctaccttgtccagtacaacactccaatcctggtgtggtaagacttccatgctcttctgactactataactgggtagctgtctcagttagggtctctgttgctgtgacagagcaccatgagcaaagccacttgaggaggatagggcttatttcagctcacagttccacatcacagtccatcataaaaagaagtcagggcaggaacttaaggcaggaacctagagctagactgaagcagagaccagggaagagtgctgctcattggcttgttcctggtggcttgctcaacctgctttcttatgcagcactggaccatctacccaaaagtggtaccacccacaattggctgagcccccttacatcaataattaatcaaagaaatgcccccacagactcagtcacaggcccatctggccgcagcttaggaagaggtgcttgaaaagaacaatgcagaagagctgagcctttcccagagtgctttgagaaatcttgtttgtgtagtacctcactttagcctcacattaactctatgaaggaaagcctcttgttaaagtgatcaagacagagaagacaatggattgataaggtaactttctgaaggccactcagtcaagtgttataaaacatgattcacactcagccaccttgaacctggggttcctgggattttctgtggcatgaaactgtgcaatagcccaaaacttcttttgttaagacagtaaagactcgctgggcatggtggtgcacccctttaatcccagcattcgggaggcataggcaggtggatttctgagttcaagggcagcctggtctacaaagtgagttccaggacagccagggctatacagagaaaccctgtctcagaaaaaaaaaaaaaaaaaagacagtaaagactctgtgggaaaatataaaaggtattagtagttgttggaacataagtatgaatatgacttattagcagagaagagaaggtggaggtttggaggaaggcatggtgatcatgctccatctttcagagaaatggaaggtatcaggtatcggaaattgaaagacaggttagaggcttcgtatcatgaagcacttttttcacagcagatgtctagacagtatcaactgatgtctgaatttcaaaatatttacttaataaaattctctttggcatagaggcctatgaactttcataataccgcagattcttgaaactgtcaccataagcaagagacagaacaattccatagaactcccttgccattcttgcttcctctcaagtaggggtctgatgtagagcaaaatttattttgtccctattccagattaatttttatcactttactaggcagctgttatcaatatgtgtataggacagagagagagggagagaatgagagagagagagagagagagagagagagagagagagagagagagagagagagttccaattaactaggaatagtatggacttttgaaacctcaaggcccacctcaagagacacacttcctccatcagagccacactcctaattcttcccaaagagttctgccaacagtgagccaagctttcaaatatatgaaccattctcattcaagtcaacacaaggcccgaatacatatagtgtttagtctatgaatagagtggtatccagagagaaaaaggccagtatccagtagagtataccgagataatggagtagccatctggaaaaatatttcttccacaaaaataaatttcatctgggaccaaagcaagaaaaaaaagttaaaagggttgacctatacatattttaaaaccatggtacagttttgtttatagtatatgagagagaaaggcctctctgaaaatatatatatatataaatctcctagcatccatcgaagaaaaacatgacatgttctgacctaaaaatatcaagaagttatacacaagggaaaaataccaggagcaaaaataatttaatgtaaagaaaatatttgtagcatttgtgcaaagggtgccaaaatacttaatctaagctttttaaagtcaggatcaaataactacacgaagggacagaaagaaagagaaagaagacattcgaaagacttctaactcatgtgatgtagagccaggtaaatgaagactctaaaggtttttacctaccagattagcaaagatcaaaaagtatcttaacatgatgttgacaagcatattcttatagaaaacaggcccctcccagggcattggaagactataaatggtttagccttttcgcagaacagcactgtgtatataaagttacatacaggatttatgctataagtattaaacatttctttataaaaccatacacatatgcatatgtcttaaatgtaagccacacatgtatacttggacatatgcaccaaactatatcataagtattcattgaagcatcagttatattaggaggctgataacacaaatatctaccagaataactgctcggcacagggactcctgaaatacagacaagcttatttagactcagggaatagcctttgagaggcacttatgtggtaaggagggtccagaggggtgtggcctgcactgcatgctgcagaggggatggataggactcaggaactgagttgactggcaagagggagcagggctattgggagtgcctcctctgatagaaacaaatgacaccatattttgatttgctcttttataaaatataatgatttctttatgtttaaaagtacttgcctaatgatcttccagcaatcttgctaaccaaatcctttgaagcccgagcgtaacagcagaatgtgctatctttaataaagaataatatttcccctcctggaagacttcagtgtaagatctgcgttccattcacagcaggtgttgtctagggactcccagcatacaaatggatatataccatcctcaacagtgatttgctatcctttttttcaaagcattttggtttgtatacagtttatttttaatgtttatatttgcaaaaagcggtcagaaagatcactcagtgggtagagatgtttgctctaaagcctgacaacctacgtttaatccctggtacctcggtgacagaaggagagaccagctcccataacttgttctctgaattcttctcatgtgctgaggcatgcaagcatgcttgcgtgcgtgcgtgcgtgcgtgcgcacacacatatgcacattaaacagatgtaattttttaaaatgtgggtttacaaaggaaaagaaagaaaatgttcttaacgtccaggcaccaggtaggttatttcccaaatgcatcaggtagttattatacctttaaggtggaattgtgagacctcttttaaagaaaatgacatcgagctaacattcaaacacaagtctcttgagctccaaagcccagtgctttctactctgccagaacatataatatggtgacaggtgtgatactgtgattttcctttgaacatttctaaaacaccccataaaaacatgtttttattatttcaagggtcatagcactgaactagacgaaaaacacaggacccagagctggggaaagacactaaggccagaattgcagggatgggcggctcagtaccagagtacttgcctgatgcgcagactatgaggccagctcagaggagggatcagtctgagaggcagaatggaatggaaggctaaatctacgtgaataacctccgacagttcaagtatatattttccatagctttttttgttttctttttactttttgagttgacatgtgagtattaagaatttcttattaaagataatatatggcattgcagggaatttcaaaagcataaaaatataaaaagaaaattatgtcctccacaatgagctacaccgtcagcaccttacttttccttccattctccttgggtgtatatttatgcatacatttcatgtgtagacagatatatgatatgtagtggttttgatcatagactatagtatccaggtgctacttcctcaactgaaacattatgccttctttatcagaaagttgacaaatgcaaatttaagtgcagtctgtatccatgtccctcccatcttttaaagcatccttatggactaggacccagcatatgcctggacccacattttggtcctcagggctaatcctctctacgggctgcccttctgaaagtgggattagtaagcatgtggtaggaacattcctcatgcgacacattagcaaatgtttgcaagatttatgtcatttctacccttgcagactgtgatgtcttattccaacactgcctcttaagtggtttgagtatggttttgattgttgagaaacaaacattgtgggtatattaaattccctctctctcaaatttgagaatcagggagcccaaggtaaatgataacactttttttttcttccaatctttgctcccaaagcacaaaggagtccagatttcctgtctttctgaaaatcttccacacattactctggactgatccgtcagaagggcagcctgttagacagtcacagaggggtagaaccccagttaaaagtatattagggtaaatgatatgtaatatcctagcttcttcacatacagatatttgaagagattaactggctacaaatatcatatttttatgacaccgaaaagggcaagctgagcctggtagtactcagtagactgaagcagaattcttagtttgaagtcagcctattctccacatggagactcggtctcaaacacaatcaaaagtcaaatggattccacccagcttttctggctcttacctttattttctctatctccttcccctttaaaaaaaagtgttaattatgggtttcaagtttcatttgtaattattttacttcagtttaaaaattaatgaaagtatcccattatattgggaaatgcccatggtcccagacttgggaccctgaggctaggccatcacaagctacaggttcatcacaagctacaggtccatcacaagctacaggtccatcacaagctacaggccatcatgggctggagaataaggctctaactaaaagaaaagagaacgacaaaagttcctagatggtattttaaaatatccatcattattttccatgagtagaaaataattactttctaactcattatctgtttgtgtttcagccctagttgagtataatacatatattaatgtgtgtataggtgtgtacatgaacgtattacagctctgtaaggtaattttatttcctactgcaagcatattgtggtgtcattagttactatatagagacacggatgtctctagaatgccccactatctagatgaggcataccttgtaagttggttccagtttgccgctcttataggcaatactataatgaacatcttggagcataaatctttatcagtactttcattggctgctgaagataaattcccatgagtaggtttccagagttacacagccttctgagaggttgcagaggcttttcaagggagaatgagccaatatattgatctaggttttttttttttttttagcaacccccagctgaatccagggtctgttccttgtgctgtttaataaaacttttacctgtgtctactcatacacatgctggccttagatcaataaatatgtcctatcaattggaaaaacactgctacaaaaataaatggcagttacagaatttagattagccatcagaaatgaactgaaaccaagcctcttctccttttaaattatgaccaaaaaagacagttatggtcaatttgagaaaaatggcactggaaacactggtgaggaagtgccacattttcacacatattttactaaggtcaggtcatagcatcttcagttgaaaagtctctctcggtatccatactgtacctgtgcctccgaccttcctgtgagccactgaggaggcgctgtacaacgtaaaatatcaaaagcaaagccatctgcctgagttgactctggggtaccttttgcgagctgttagccattacacctatcatgcacactgctcttgtacatactactgatgctaatagattaaagttaggattcgttagctttccaggaaggaagctggaagctatgttgctctgtaataacttacgagtgataggactctaatttcatgccccgagggctgtgtttctctgttgtaacttgtttgtgaagacaaaatatttgcagagataatagaaccaaaaaactgagtgcacagagatgatccaaactgtgagaatttggaatggttatcctctagatttcaaaaatacaagatgagaactaataatacccattctttcatataagaccacctctaagtttttgcctttcaaaggacttacgcatcctatgctatccccagctatgtgatattaatatggcaaatgcatgtcctgccctcttgctcatgccaaatagatttgttggcggggggtgggggggggagaaggagggctccaatatctccaacattctctagtgaccttggaggaacctgccattcaaatccaaaaatgaattcaatagtaatggattcctttagatattagctaatctcttttctagtagtttctgtgttctttttaaaatggaagttttcttatccccttcccctacccacatactatgaaataagacaggaagttaaagatttgtgagactatttaatgaagtgcttcagtttgcaacttatcagcatccctcatgggctgatgtcactgcgaatcatttcatagcgttgcagttgtttgaagacttggctctaagtctgtacccccagcttgctttggttacccttgttccagtaattagcacattctctggcccggtagggggaaaaaaaatcacacaagggtattttgagtgaaactgaagttttgagtgggagatccatactgactttctgaaaatgagggaatgtgagaggcgtgcactggtgtgggggataagaagggataggtcccaagtggggtcttatctgactgttgtgctagtaacctaaatgcattctctttgtttatgctagaactcatttcttccttttaaaagaaaattgactccatggacctctccccagcatttttttcccaaaactttaggttttcgaagctttcaatgtacggcttctatttgcaaaagacagcacatcatttgaggttgtaccctgcctctgcggcttatgctgctttctggggagtgccctgcctccaggagcctgtcaagcctactcgctcacacatatctcaaagccttccctgtctcctctaacaccgcttcctgttcccctggcagggtgtcactgtctgtatttaacagcccacaggttatctgtattacttttagactcgaatattcattttctactcttttttggttgactctgacatccgaggatagcaagtatctttgtcacctttgtatgcaacagtgtgcagaacagagcctggcatatggcaaggatgcagataagcaatggacgccagaggttagacttgggtggagctaagcaaataaagaaagcgtgttcaccacttccatggagtcggtgtctttgatgaaatgagacaagtctgtctccatgcttcccagcaaagagtaggcaagggttgattctagcatctgaaagtaaattcagaagctccatgttcaccaggtctgttgcattctttgtccctagccaccagagcaccaccctacaagcagctcagcttcctgggagagcataagaatacagaccaatctgagtaatcaaagaggggcccgattgcagtcacactgtacaaagagacccaggctaccttcttcctcttctccctgccttccatatcacatttcagttgctaaactacaccttaaaactgcctgcctagttccaaagaagcagcacaaattcagtttgataatcttccatattttggggtgatttcactcttgtggaatatccattgactttgctatagatatcctaatagcaacatcttcttcctagnnnnnnnnnnnnnnnnnnnnggtgagagacagaaaaacagagagacaaagagagacagagagagagacagagagacaaagggagacagagagacagaaaaagagaggcagagaaagagagacagagagagtcttgacccactttgcccatttgctctgacaatggcaagagaaagcatgtcctccataaaggagtgtgggattagccatgcatatgaagaacccaggagaatgtcactctggaggtttgcaggggaacaaccatgatttgaattttggtatttaagactatgaggcccaacttagattcttggatgatataaagaaatacaccagatgaaggaggaaataccgtcagatagttcagaaagagctggaggcagcttctaataagacagtcttccatggtcttaggaaaatgggccatggagatgtcaataaaatgtctgaaagcaaaaagtaaacactgaatttcagaagctgccaaatggataataatttgatattaaacaaggacttttaaaataagattctgtagctaaaataaaatctctgcagttgctataaagacagttgttcactagctacctctgggtctctccttcagaagtctcaagatgtctatagcaatccctcaatatctatttttcaggttccgtggtttcccaaagctcttcccacagcatctgacattagtcttttcaataggccaaaaactctgaagaaaactatgagtgttctatggcagcagcatgacccagttgtctgtagttaacgtccacactgcccatcttgtcctgatgtcctgttcattttggaaactcttgtttgtgtgtatataattgatttgctgtgacatatagttttttttttttaagctgaagttttgctcactaatgcaagtccctgactccatggtttcattgaggggaatcaaattcaacttctgtcatatcttttcaggaactaacatcctagtacagttgagtttctgcctgctgtagctattgtatagaaaaggcatcagaatctctccctccctttttccctcccttcctcctccttcctccctccctccctcgttcccttcttttcttcctccttccctnnnnnnnnnnnnnnnnnnnnttccttctttcctgtcttccttcccatcttccttccttcccttgctttttttctatgtctgtaaatgtgcccagaaggtacctttctgtagaatcatctttcctaggtataagagtacagcttaggctcataccattaggttcatacctcacggtaatgagtatgaacacactaccacttctctcaccaccactgccttttttgtttatttgtttaataagcagaataaactttggtgtttgagtagccctttggagcattaaaggcattctgggttgttctgaaaactagactgtgatttgtctaaacaaagggaaataaacagtgattcctttcctagtgattctggatagctaatttgtcctacctcattcttttctctgcgtcactaagcccagggtctgtctctttaccatggagttcatgtataacacagaatgtatactttgtaaatgtcctgcatcctttaatttagatgatggaagggaaaaaacaagttagaagtaacaatgtcaacatttaagccaagtcaaattaggtaataggacataataaaagacctttccaacccgagccactgtgttgtgagccgtgtatcagtgcacacatacacaccctagtaacatgcatgctgtggtcagttagtgtacttattggggatgtcactggtatggcagaatcatcctcagaaatattgctgtgtgcctatgataagcagctgtccagtgcacactgttccaccaggaccatcagactaagagcttgtgcttcagtgtaacatgggacacatagttgtagaacccagacatacatccgtgtacttctgtacctgggcaaaccacctgactgttcacaaatggcctgatgggtccgatagatcagttcagcattaccatcctcctgactctcccctcccttcttcttgtgtcctagaagcaggtaactatacttctaggtaactataatccacatctttcaatatacagacctcctttgatatttcctaatatgtattaaagtaaagccataggctaaaggtaaaagaaacacaaacttacctggtgtagtggctgaatgtagactttgctctcaactcaaacttcctggtgtagaaggtagcccagaggaaatggtcagattgccatggttagtatgacacagagcatccttgtccttttatacaaaactattagtggatgaaggcacctagaaaactcctaccctgccctcagagggcctttggcttcatcttgtgctcaacagtttaactgggttacaactataccatgtgaccatcacagacctgtctcttgccaccatcataaccaacaggatttgggtcgaattggtaggaatgatagccttatgtgggcttgaataagaagcaggagcagtctcccgagaactcaaagagaaacaggtgatgtcaataacaacacaattgccccgttagaaattctgagctgtctgtgttttctttagacagtgtgtatctagagttggtttttaagaagtcttttataatttaatattttcagactagctcatcagttgaggacatgtactgctgctcttacagaggatcccagtttcgtccacagcacagatgtcaggcagttaacaactgcctctagctcctgttccagggaaatctgacacccttttctgaattccttagaggcattcagtcacatgtacatatttatacacacacatccagagagaggaaagagacacacagaagagaatgaaatgaaagtcataaataacaatctagagattctaggacagagaaagaatgtgaactaaatttttggagtttgtggtaaagtgagtttagggtacagctgcctaaacacatatttgggcttgcagctcatgaaaagcccctgaacatctcaatgtgcagcctgtgaccttcatccttccttcatggtgtgagtcaggatcctttttcagtgttttaattgagtcattctccctatagggagcttttgttttctgtatccttatcctggatccattctctcatttaatgagggtttggctttatcttctttcagccagtgccttaatttttcatcgttgagataatatttcaaaagaacaagtgttttatttttggtgttcctcattctcattttttttcctctgattgctgaatttttgagtcctgtatctgaaaactttttacttgtaattttgattcttaaaaaacatttgccaatcatatcatcaagtccttgcaatatgaagctgggttatgtacaaagtgagattcctttggttcatnnnnnnnnnnnnnnnnnnnnataaataacaatctagagattctaggacagagaaagaatgtgaactaaatttttggagtttgtggtaaagtgagtttagggtacagctgcctaaacacatatttgggcttgcagctcatgaaaagcccctgattttcttttctctagcaaagaaactcctaaacacaaaatgacaaagctcccatgtccagtgaggagagtgaactctaaagtagtaaccaaggccccagagcaacagctcagtttatcttctgcagaagggtcctgggaagggacaagtggtggcatggaggttttaagcatacctgggcatcgtcaagattctacacgtgctgtatggcctataaaggctgcttgctctagctgggttttcacccctttcctggagaaccccttcattccttccttaagactcctctgccctctctacctgtggaggcctagaaatggtttgggactctaacaagcatagtggatgagagagcatggctgtaaagtgatctgtgttcccccacatcctaccctgttcctttctccctgtcactaagaccggggtctctctctctaccccagaactcatgtttaacatacaaagtacactttgcaaatgtcctgcatgttctaatctgaatgatgggaagagaaaacaactccgctaagcaccaattggatgccatttaacccccagcggttcccgggagccaatccctgcccgcccttcctcttgctagccagatcttttgctagctacagtgtttgcattaatcaactgcgtaggctcggagactgtgtgttttggtgttgtttgtgtgtgcaatctcgtgctgcttcctgaacgcatgtgtcccttcccttcacagcctactcgacacccagcacctcccccgcaaaccgattcgtcagtgttggaccacgggatccaagctttgtaaatatccctcaacagacacaggtgggccgctctcaacttttctgtatgtggtgcagcttgttttattcatcaggtgcagtttgatgtgtcttggggcacaccaggtcacacatgctccagctctctccagttcccttcctcctgactccatcccccgcagccccgtagccatgttctgtgttcttagaaaccataagcaatatccctgggatccttgcttatgggattggggtaggagaggagttcttctgggccagactgcttttgccatgacaaaataagattgctaggctggacagtgtgtattccctactttgtggcagccatggctctgtagttataagcagacagacaagcttccccacagaacctgttttccatggtattgaagcagccactgggagaccagccactcctctcattttatggccccaggaaactggtaaactttctaaaaggggccagggcctgggacaaacggtttctaagctctttattaagttcctagtgttaggtccaagcaggtgactgatgggaaactaaggtcctgtaactgggcagtgctaagcagaaagtcatatggatgtggctgattgaaagtagggtgcagagaacccagagctggctgagcacaggagaaagatgcttttgggtttgtgtaggctaagaagggctcttctaaaacaggtttaaagcgcctgctgtgagttgagatggtagcaagtttctgggccccaaggcacatgacttaggtccacgttcatagaacaaactactcttcaatttcctaaccagaatatgaccatgcattttcataattgatacaaaggaaatgattttgtcactgaagttcttgacatacattttcttcaggttgttctgtgcgtgagcttatcatgtcctgtcagctgcctagcttatatctaaagcgaagagcttcctgtgtctgctccctccacacagggctctgcttcactgtgcttgcccgcagcactgcctctgattccccacacacacttacattaagcagcaccccagaaagtccagctctaagtagaaaatggagggcccaagaagaggaaccactctcctcttgaatctcctgcttctgctgtttcttctaaatctggcttgcacatggtgtctgagattaaaattcctactcagtacctccctcccatcacattctttcacttactcgcttattttcccataccttcaaatattccaatactgtcctggtggtttgaagttgtaccattgtctgagaacacccgtcctagaagatgggtgtttagctgtgtgctttgggcttccatgttcaggctcagtgaagagtgagccagcaggcctcccatagctccatgcaggatggtgttgtttctttcaaagtttcagtttgctcagattgattcgttgaaaacccagaaagtacaaatttgttgaagtgtcttgtttgtatgttgcatggtattttatacaacaaacgaattcacctcatctaaactgtacatgttctactttgtttatctgtctataatgaaaatgtggtttttccagtattactttctttcctaagcgccttctttaactcaaaggctgtcttcatggtgttgaccacaaaaacttcaattcttaacaatccagattttgcacgcatctggatgaatgatgtcataaagatctggtattggcacctagaactgaattctctttgttttccattaaatatttggcattgtgatgacaatagcttaaatgtttcttaccacagtgacacctgtcacatttggcttaaagaaagtcattcctaattatttcatgagaaactaagaatggaattctttttctctgccctctatgagcctatctagtcttatatcttaaagtaaaatttatatcccccaattatttttattttatgatatagtaccattttaagaataaactgttcaaagtaagtattagatataaatgataaataataatatactttaaatacagctcccttatgagaagtcactatttgaaaaggtattttcttacagatgagtgtgtatgtgtagtgtgtgtgtatgcatgtgtgtgtgtgcctgcacacacatgtatgtggtgtgtgtggcatgtgtgcacatctgtgtaggtgtatgtgtatgtgcatatgtgcatgcatgcctgtgtgtggtactgggcttaactcacagatgctagattctactgctgatcccaagccctcttttgagataggatctcactaaattgcccaggctagtcttgaactcactaagtggttcaaatagaccttgaactcatgatcctactgtctcagtctcccaagtagttgtacttataagcctgcgccactggacttggcttacaggaatttttaagttttatttgaatacctgcacgttcttcatttcctcagcaagcttgcggttgttgttagatagctttgctgtaaggcatggaattgatgttggttgaaaattaggaaaacttttaaggctatcagaaatttgttctctgctgctgctaacccagtaaagtttgagtcccccatagagaacttgatttgctctctgcctctgcatgagtaaatgttggagttacctagtcagatggttgactttataaatgtgttagagccaaggatggtagcccatacctgtaatacagcacttgggaggttggagcaggaagattggaagttcaaggccagcctgggataggagatgagaccctgtctcagaacaaaacagaataaatcctgactgaagtccatgaacagattcgagataagacggtccttcacttccccagaacccaaatcctggtagaaatctctaagcgttccttatgctgtccaatagagaattgttctcccatttgcttgtttatttccacataccttcttattctgagattttttttcctggtgagtctgaagttgcataattgctttcaaatcatctgtatgaagatacagtttacgcatacagcagaacagtggtcattgataaaaacgaagagcatcccgatacttgctgcacgtggatgactctagatcacaatatgttaggttgcataagcccttcacaaaagaggaaacctgtttttaagtggtgatacatgttaattgtgggaaatacagatgagaaaaataataaaattcactaggagtatctgttaatatttctctataaacccacccttgactgttactacacaatgaagtatattgcagaaacaaggtcagattgcacccattgtgtagtaacctgccatttcttctgtgcagcaatgtattatgaccttctttccatgtaaattgaaaacattgaatattggcttttattacacctattcatcatctgcagtgattggtagggaaagagatcatggataattgaaagctgttctttcccgcctccacatccctccttcactgccagtctgctgttttctccagagaaccatcctgtcattgagggatagatgcatccctcttatgcttacagaagcccgtttccattcacactccttccagttgctgggcgcatcacgccctggcttctggctctggatctgcccgcttctgcctggatcttctgtttgtctcctctgctgctatcatttggccctcatcttgctcctccatgtctacaccgtagctgctcttactagagagatgtggccagctccctgtggattctcttactacaccctgacactcttctccagcagcatcccacgatggtcgatgttaactcatggaaaagtccttgagtgttttctctctgttgatgtgccctactcagccctgaatgatacagactcttcagagagaaagccgggggctattgtagctgatataatctaatctctgaaaacaagaacctttatgaacaggcatttgcttagagcaaaagaggtcacatttcacaactgggttaataaataggaatacctgttctcacacaggagagctgagcagagagctcatttgattcggttgtagtttaatccaaacattcaaataaaaatgtttgacctgcagaactttgatgaggacaaattctttacaatgaaaaatgaattctcacactattaaaagcaaacgttttctctccaccattcaagctgtcatcattcagcatcaacggagctgtggcatctgaaatgttatttaagccctaggagactagctgagctcggtatggtcccgatttgctgtaacttctgctaaataaatcttagctgcctcactttacataccacctacagtgtgactgcctcagctcaagttcacagcacatgactgagcctcacactcgtcctgaaaggtccccatgggacaaaccaaggcagtgacacatatttatctgttgcccacaacaccctctctgccaccttggatctgtatccacagagaaagtggagcatagagatttggagaggttctcagtcgacttccaatcttgttcctgaagtctagctgagaaaccacagtctaagcgatctacaaaaatcttgacaatttcaactacttcagtatttgttttattgcttactatattctttcactgcctaaagaatacaagaatagcaactgtcctgaagttctagaaagttcggtagaagaaacagacattaatagttcttacattaatcatgttgttactagtgcagtgtggccaggcataatcccggcacttgggagactgaggcaggaggatcaagaagtccagtcttgcttgggcttcatagagagagtgctacagaagtgcccctcacagaagaaaaacaaataactaaacgccatagtgattaggctaagaggcttcaacatcgcagaatgactggaagactccaaagaccagaagaagcaggagaggctgaggttgcttttccgtcctcatctcactttggtctggtgatatttttcttgtacattatatctaaacacacacacacacacacttttaattcttgccaatccagtgatagatgaaatttgagcatcccttttaaaaaggaaccaatgcaactctgacttcccagaccaagcagatacaattagaatccttacctgccaaaaaatataccagccaggaaccccctccccctcctctctgagaaatgccccctccaggcatggtgtgccctgctttgcaggaagctctgtgagactcattcccatgagctcaagactactgcctccctccctcccttgctccctcccacgtgacttcctggtcatggaagagaagtacagcacagaagttaaactaaggctcagctggagagttacaaaaggaacccagatttctcttagagagcaacacagtgcccagtcctgccccatcctgccccaccctgcaggtggatttgagcatttcctttagccgactgaagaggaacagcagataaaatctcctctgctcctgactatgagaagttacttattggctaagttggctattctgtattaaacactcaaagcgccacattggagagaggcctgtgctccttacagttctgcggctggcacttatgaccactttgcaagctgaagagagagagaactggcaccaaggtagtcagggagccaaggcttaactcagtgtcctcttaacgagtctgtttaccaaataccatctgatcacctagttgtacacagtgaagccttacggactgttttctcctaagctggttctatgtcgggcccgttctttctgggtccaatggaaataatgctgaacttgttgaagcctcttcggttaaacactatggcgtctgtctatctatctatctatctatctatctatctatctatctatatctttccatccatctatctatcttctgagagaggtacttttgtagcattctgcagacctgcctcagccccctgctagtctgtctgttttctcatcctgtctggggaaaatgctgcctataatgttttcaggcttctgtacgaagagccagcaccactatctctatcccaacaccactaccaggatggttacaagtgtgtgttttcacttcaggtcttgactaggaatttgttccatcacttaggagccaagtgtgtaatgttggtggtggccatggcactttctctttttcctcagtaattccatttttatagccttgtttcttacctgaagtttgtttctgtgtgttgggggggtgtattatgtatataatatacttacatatctatataaatctataaatatatttataaaatgtatataaatataaagtatatttataaatataaatatttatacatacgttcttatatatatatataagctatatgtaagtatatattattaagtatatatagtatactatgtagtgtatatatatatatgtatatatatatatatacattatatatgtatatatatatatatatatatactatatatacacactcatttgatctttaaagcattccttagaaaagatctatcattgttaaccctatcctacagtttaaaaacatagaaaattaatttaaagagggaaagtgattttctcagagcacattaccaagattgtagagccaggacacaaagtcatgtttctattcagcaaggactcagaggggcttggcctgtaatgttgcatgtcagataactccctggcaagctatatgactccctttaacattttttcaaccaatggaaacttcatttttcaagttttaatttggtggcactttcaaaaaaggcaaagaaagtgttcttctttttctcagctcttctgtgcctgcccacccattacctttgaatatttgtttttgagtttgttttatttagcattttgtttggagtatagccttgttccaaaacatctgggaatccagagcttgactcatgcttataattgcagcatcctggaaagggtgtggcacctgtctccaaaatataaagatggagggtgaatcttagctaatacaaattggtgattattctaagaattatggtatgaaccatgcaacatcacagggtcaatgtctagtaaatagtgccgccctttcccctccagcattaacatgaaatcagcagtaaaggagagtggaatgattaagagatgatttcacacacacacacacacacacacacacacacacacacacattcacacacacacacacacacacattcacacacacacacacacacattcacacacacacacacacacacattcacacacacacacacacacattcacacacacacacacacacacacacacacacattcacagaggaaaaagaaaatattaaagatgcgatgtttgttaagtgtggaagatggaaattagagaaaggcttaagagaagggccgtgccttggcaaacagcacttcgccgctccatgcttctcacaccctctccactcactcaacctttccacatgagcaggttctacaagacctcagggttacaggtatattagaggttcataaagcaggtgttcaaatcaagcatttacttataataaatcagagaaatgtactataaaataattttcagtatacatatgatttattaatgatttcagcaggtttgcatgctaatgaaatggattcaagcatgccagattctgcaggatatagacaatcttcaactttttcagagttgatcaatgttctggttttaaaattatcaatactgggaatattgattctaataaatatttattaacaaaatggtggaaggaagtttagggcaattttagaaattgttggaaactctatccatatacaaaggaaaactctcttagcaaatgttctatgaaactcaagtcaacaacacaaaaaagttttaattaaatgttctaacaacccaaagctatactaatttgatactagcatgctgacagttggaacactggcagggaaatatttaaagtctttgttttccataatgaaatcattatgtttctgtaagagcagaaagctttgtgtgattaataaaaacactacaattcataacctgcaatagtctcactctgagctgaggtgtttcaagtagcatgagttggtactgcacagggtgacaatgcatggggcaaagcacacatgcaccctgtgcaagcctgcaaagatgtcctgcagggcagcatgggccagtgctgcccaaacaccctggactcattactcacttgacttttaattaacttcttgtcattgcatatctagaaacatcctgtttactgtttccagtatttttgaaacccaacgttcagtttcacaactccatatccacgaccaacagattttaaaagtgggactacagacagcaggcaggagttagcgacacttccatgacagttttcggggaagaggaatgcctctgtcagtggaggttctgggataagggacatgtctttgacactctaatctgatttcacagtagaacaggcacaatgctattagctgtggaatgggaatgacctgttttcacatcctgcctatgctcctttggaattcagcttccatatctatttgacgaagtcagtaatagtgtctacttactaggagaaaagccagttacgtgttgcttaatctaatcaaggttatttttctaaaactatgagaacacagtttcggttgtcgttgtttcagcttttgcgggactccagcaggaacccatgctctctctgtcatcctcacaatgtcatctttctatcttggtgcttggggcccccaatcccagaatttctgcagcagctccaaacatcacccctatgtcatactccattgttcaagcaatagcagaaaaaggtaccatgttctacctttgtgcctggctaccaaatttctatttagctctcactagctgaaactgaatcccattttagcccaatatttaggtgttgggaaagctagcataggattgtattgtttggcttaaatcttgggccgttacccaatctgatcatgttcttatgtctaaacaaagtgaattccgtgaaagaagcagtcagtcatggtcaggctgttaacagtatctactgctttcccactctctgagaaggttcctgtacttttcaacttccctgattgttccctcttctctttcctaatactggtatagtttcatatagttttttattttcttcactccctttctgtatctcaaggagaccgtgtgtgtgtgtgtgtgtgtgtgtgtgtgtgtgtgtgtgtgtgtgtgtgtatgtttgtgtgtatgtttgtgtgtatgtgtatttgtgtgtttgtgtgtgtgtgtatgtttgtgtgtatatgtgtgtgtgtgtatgtttgtgtgtatgtgtgtgtgtgtatgtttgtgtgtatatgtgtgtgtgtgtgtgtatgtttgtgtgtgtgtgtgtgtgtgagagagagagagagagagagagagagagagagagagagagagaaatagagaggggggttagaattatnnnnnnnnnnnnnnnnnnnnnnnnnnnnnnnnnnnnnnnnnnnnnnnnnnnnnnnnnnnnnnnnnnnnnnnnnnnnnnnnnnnnnnnnnnnnnnnnnnnnnnnnnnnnnnnnnnnnnnnnnnnnnnnnnnnnnnnnnnnnnnnnnnnnnnnnnnnnnnnnnnnnnnnnnnnnnnnnnnnnnnnnnnnnnnnnnnnnnnnnnnnnnnnnnnnnnnnnnnnnnnnnnnnnnnnnnaattatcatctctttcagctgcagtttgaggtccgggaagtggacagggctgtcccctgatggaggacacatctctctgggttattgtggactgagaaagctgtctgtatagagggcatgtggctcagctcatgcaggttctgtacacagtgccctcctgtgcccccaaagttcacccagcttccagagtctgagccaggtgcttcctctagagaagaacagtgctgggctctgctcggcctgagtcaacagagcttaaagaacaggaaaccgagcccagcaccctccctgcagcatgacctccaggaggccacagcacagtggattctcacagttcattcagcctttgcaaggaaaagcccaggaccaggagccaatcccacagatgtctcctacactctaagtgatgactgtccacttgagggaaggattgagtacccagactttgtctggccagggcccttcgcagggctgctaatgagtccaagactttggcagaatgaaggacacactgttccaagccagagtccttggtctaaagtgagtctccaaagagctgctgacttccgctgactcttcctgtctcctcagcccctcagtactctcccgaatttgtactaaagatgaagagaaaatgctgtcattaagagacctctcttctggggatattgcctcacaatatgccctgtccgctgaagcactgtcttcagcttgtgcctctccccaatctcctgacgaagacggtctcaaaggcctctcagtgcatccttgcagcagagccaaagtgagttactgctgccctgatattttccacacacactcctgaggcacagaggctcgtgatctctaacacctctttgctggtgttcatacaagattagcacagccggtccttgcctctgtgtgtgtgtgtgtgtgtgtgtgtgtgtgtgtgtgtgtgtgtgttgccctcctcccaagtctgaggtcctcatgatcctgccttggatgatgcaggaagtgctcaagacaggctagataggcagcctgcctcctggtgccttaaacaatggaagaactgatgaccggttctcatgacctacagccatgacccttcagcatagtccctcatctgctaatgcctggtcatgtgtgtttacatgtatggatagggaaagagtcctacagggaagtacaaggaataggggaacactgaactatagggaggtctgagatgaggccagccatagatcagtcttgtacatattgggaaagtggggaaatcactgggccaggagtcagagtgcctggctgcccagctcatctctcccacttgtcacccaagtaatggatcttaaggagatgagggaagtcaggatttattgagtacctactgtattcctcataccatattgagctaagagaaaggccttgggtacatataatctcaccaccaccctacaatttgcagacttctggtggggggaagtaagcaaattccaataaagtctgatgaatgacatcatgggaacatgtgtggtctattagtaggacagagagagcaggaagaactctggaaggaaaatgtggggcgaggagtatacatcagaggcaatggcagagctagttttatagaagaagtatccatggtagaagagctttcctttgcagacccgggtggtgtgtaccaggaagttagattgtggggagagcagtgtgtgctctgtctgtcatataaaatcagcaactgagaaggcttgattgtgagtctggagtttaaaccaagtcatagtcgttaatgaacacacacctgggtctaggggagagtctagtcatgggtgaacatgtacctggatctgggggagagcctagtcatgggtgaacatgtacctggatctgggggagagattcttggactttattttgtggaacattaagatttgcaaaaaggcatagagggctctcagcaggacaagctcttggccttgcttggtgtgatcccccactgggcatggaatttgcaggcagacattgcatgtgaagacatatggtcttgagttttcttttttccaggagtcaagaaaatacaggctttggaaggaggcagatctgagttgatttatcatgtgaccatggtgattctgtttagcctcctgatcctcagaagtcacatttcaataaagtcatgaagttattccctccttccttccactggtatggcatacagatttaatctaagtagaatgagaaagcccagtctctaccgatcactttccttaaggtgaagtttggtagggctctgaggcaaaactggaatggtctcaattctcctccagacaaaaggactgtgaatgggaggaaatggaggagtgttaacagggtgagaccccttgagctgagtgtccaggtcagccttccacatcagctttccatgaagtgtactctagttggccaccaggatgatacaatttattaagaacattcttagtgtcttccccaggagcaagttgaaatgaaacctacagcctcagtttttgagtctaaggacaaatctgtcaaggaatgcagtggagagtttctgtgtataattccccattacaaaacggttaaactttatgcctggtgagggaaggaagaacaaaatctcagagcgaaagcaagctgtgaagaagctgggaggggcaggttctggatgttcgttttgtcagctaggttggctgacaagattagtcctaatggggtggcaatcctcattgaactgcagattctgtgagtgactgacactccctctgctccctctgtagggacccaaataaatggtgcatatgatattacttaggctgcatcctttaaccaaactgaaggctgaggctttttggttgggctttttgcttttttgttttgttttgttttttttttttttttctgacctttcccaacacatacagcacacctaccacacatgcttcttactgtcccagaagtggcctgtggagaggcactcacctgggacaagcaggttctcctttactgactcaccccccccccttttcctctctgtaccctgggtgtgctccaccccatcctctcgggcagataatggtgcatcagattagcctggctctgctgctgctgcgtcaagaccccgatcaatttattgactccttcagagtggctggtacagtaattgttacaagagaagaatggaaagtgagtgcgcgtccacgggaaaaataaaaatgacgttttgttctctgctgcccggccctggcctcgcagatccctatgtgcttacccagcagagagcactttacttaagttaatcagctccttctacattattaatggtgacagttagggtgccgtgggaaggggaccatacgggtgggaggcattgatctcattcagatggtgtggtcctgagcaggattgcagctccttccttatctcgctgcactggagccccatcggatcacatttccctgattgacagcacgaacgaccgcctcccgtcaataccattgatctgctgcgaaaggacaaggagcattctcagctggggatagaatgagttgtggtgactgtgaagaggatctctcaaaaggctttcagcttagaagtctaaactgaaactaaggtgctgttacctcccagatgcaaacaatgtataccccaaggagaaaatgattgtagaagaaactttctacaggtgatctgtcagtagattcagttgagaccctcagtgagccagggggtgtgatcactgtttcagggaggaaaaagttatcactaatttcttgggaaatttttggctaagtgtacatctttgaaagacatttcactaaagttcaactttcatggcttcaacctgcaaaccctaacataaatcctatgtgactggatgaagctgagtgggtgtcacttgtgacctggaaataaaaggtcaaccattgaatttatagctttttcagtgaaaagaacataaagattcttgccaactggagtgaatccatattttaatgtttcccagttaagattatgaaatctagggattaggatcatgcagttcagtgaaggtcaaaccttgaacgtgatgggctaagtgtcattcccttggggtagaagataaaaccgctgctaccctcagcagtccaaaatgactcacccatgcccattaactaaggtatagggattctaccatcattaccaaggctaatggtgattactccactaattaactatatcattaaccactctgctcttctcctgcaatgtccccaaacagtaatagtgagttgaatgctatcaaataattctcatatataatcaggagtgagcagagatggagagccatgtcatgatgaaggcctccttttgggagaagagactctggctgttggcttagtaggagtaacaccagagcagtctctcaaaaccaaaagctggtgtggaggcagccccacttgaactgtgattcagcaacacaaagttttttaattaaaaaacaagcatgcatttctcttttagatttttgtagttactttccctcttttagagcgtaaacagaattaattaattaattaattaattaattaaatgggtcattttgctagaactcttctatctctgtttcagggctctggatccatccattttggatttttatggaaagagaaagatggttttataatgtcttgatggaaatcacttggattgtttatttacctgtacaatttttaaatccatttcaagctgccaggttttttgtttgtttggtttttgtttttattttttaggctaaagaaataacatggaagctggtaattccctttaagattatgacacgtttcatgatagaaattttactgcatgttgagcagaatctttttcactttaacaaagcagcatctttaaataaagggccaaagccctcatggtaaaacgactcacaggcagagacccggagtctgactacagaaggggaaggggctggtggcttagtatgtggcttggtgacacggtttctattttacagaggaattttacaaaaagcccagtatccattagagcagttaccttcctaaggctgtgaccctttacagtttctcatgctgtggtgactccaaccagaacattatttccttgctacttcataactgtcattttgctattttcatgaatcataacataaatatttgtgttttctgacggtcctaggcaacccctgtgaaaggtcatttatccctcccccacccccgaaaaggaggctcagtccccacgttgagacccactgcactagcatgacccaagctcagtccccacgttgagacccactgcactagcatgacccaagctcagtccccacgttgagacccactgcactagcatgacccaagctcagtccccacgttgagacccactgcactagcatgacccaagtgcttgggaatcttgagaaatagaagcttttacttcagctcaccttgggagaattttattttcatagactaccgtagggtgtgtgtgtgtgtgtgtgtgtgtgtgtgtgtgtgtgtgtgtctttatgtccgtgtgtctgtctgtgtgaaagacctgtctgttctcctggatagcttcttttctacacagttttgtccctctgcccttcacagtacagacaaaggttaacatccccaccacctcacaggcaaagcannnnnnnnnnnnnnnnnnnnatcccccccccacctcacaggcaaagcactcgaaagggcttttacatgagctgaggaataggaaggacctttgatttaaagttcaacatttacatttgtaattttgactaatttccatgcttgcattcattaaattgaaattgtttaattagaataagatgaaaattgatcattaggattaatttgacctgataagctttatgtgtctttctaggcaaatattatgaaatgtggtaatgacaaaccactgggaggtgatgtcacagctctgctgtgtggctcatcctgtgtctgtcgttcttccttcccccatcaccatccggccacagacatctgtatatctcagctagcttcttccaaatattacctcctgtcaaaatgggcccaagaaccaggttctgtttgtacctcccctaatgacgtcatagttctccaacccctagcttcttcccagaaagctgttcgcttggctcctagccctgagctttgcatcacagtggcctttgctaaccaagggctgctcatagaagtccacatggagttctctaatgctcccctggcctgggatgagggctatgacatctagactggtcttttcctgttccttgctactttcttagtgtaggagccaggcaaggaattagcaagagttctcaagtgctggataaccaaggctaaggcagtggaagagccttttcctttcctccgcgtgcgtagattttttttacaggaggcagcttgctcacttcatccccttccttccattcaagagacagttttcagaattagccaggcttccttttcgagagagctgtttatagaagagacacaagctgagtagcactcagtgcaaacccacccagacacatgtaaacaagcagaaagcactcgtgaactatcaaactgttttgtcttcaaagcaattagcttcagattcctcccacccaccattttgcaagggttgcttggtgacattggcagctatgcttaatgcctttcgtggaggagccttcaatggcaatggcccattgaccatggacaacagaccaaaattattattagtgtttatgaaaaataaagaagagaaaccaaaaccaaacacaggaatgactacaactcacacatagactatcatcatcagtttgaggattgggagtaagccttgggtagagactaagatgctcttcagagctatgagcactgatgccatcccataggtataccccatagcgacaccccataggtacatgccataggtacatgccataggtacccaaagataaccagactcaaacccactttggcacaacacagagtctgcttttcttgtgttcacattacatagaataatcttacaaatttcatagcaaaaggtttaacctgaagtatattcagtttcagatactgaatatttttcagcatggaagtaaacggaggcagagtaaaatgtaacatagagtgactttatgtgtgttgttgctctgccaatccaagaaaagtccatcaaccagcacatgaaaagaagatggctgtctttctgcagatggagaggaaccatctcccctttttcttcaaaagcaaggcatcagctctaatcccctggacctgggaggacaatcagatgacaatgtttcataccttgtttcatttcatcctcatatccaccacgctagccaggtcttctcagtctcctctcagctggtgtgtaaaacccatgaaagagatgcctgtgactctgccctaatccaccctggctctatttcctcagccccacggcacacacacacacacacacacacacacacacacacacacacacaccagcaatgattcttgagctatttgtatagtttgtcatgggacaccttggagggtacagctgctgagcctgggacccagcagtgtacagtctggctgggtggggtcacagctcagggagaactgttctgtgtgaagagataccatgagaggacagtcactatcagtgctactgggtgctgtactcagctcctgtcttgataaactcattcagagagaagacaggaaacagattccttcattctctgtctcacacggcaggttttgaagaccaggacccttgattagcaaagagctcagggttaatcttggttagacaggaaccagctgtctccatcttgcttcctagggaaaaacttagaatctcaactataactctccctcttaggtgctcatttattgacttgtaactcccaagatattgttgactcaaatacctcttgtgtgtgtgttgggggggggtgtggttgttgttttgggttttgtttgttgttgttttttgttttggggtggttttttgcaaatataaaatgaaatttgtgggtgtgtgtgcatggaaacatttttctaacaacacccttcaacttcactcacaagatagaaatagtataagacaactcacatcttcatttctgaaaagaataaatgtgtgctggtcagttccaaaaatggctgagaaatgattgcagaaaatctaaagtcaaggctatggagttctagaatatgcatgtagaatccataactcagccttgctgagattgtaattcacatgcctaatagggaaaattgggaagacctagtcttttggttctgcatcgtctctctcttgtggcctgtaagagtagtctgcagaaatgttaatggcagctagagtgcggtgctgccaggggccctgagaggtctgctgtgcctgagaaagcagtccagatgccagccttaaagcattccttcaccaagccttggaaactagcacactgtgccggcagagttcagagagaacacatgtaaatgaggctgcgttgtaaactctagatgagcagtttatttagtttaagcctgaacttgaactcataaatgcgttcctgcagaacaatacaggaaagctgacgtggttgaacaagtcatattttgacccagacagttcgctcttttaacagtaagaaaaatattgaattattatttttaattggagcatcttctagaatagcacaatttggcctatctgcgggatatttgtaattgccaagtcagaatgaaagcaggtatacatcgtttgaagctgcagccattcttgtgaaataaacaattgattctcctcttagtatggtagcttaacagaggcaaaagacccttcaaagacctggcaaacatataatagccatgcactctgtattatttttattacgcaatagcacagtgagggtaggtgtgtgtgtgtgagccctccgtgctagcactggacgtgtgttctgaactgctcataaatttccatcgctaatagatcactaccaactggaacttagccacaaaaccaagtgagtgtaacgttgcttgcgtggctggttctatacaatacctttttgaatctgtctttgcttaggagatggattattcagaaatcctagctcagaaggtaaaaataaatattctgtgctagggtgatatttcttctctccaagtcatttctcttatcatatgtctaccatgaccaaatcactgctaagaccccctcaggttgacacttggggcacacctgtgaggcctgcaccttgtattccagctccatagacaagctgcctctttacaactcctggaaatacttaggaaaaaatgaattgtttgtagtaatgagtattgtttagttatgaatttaatctacacattcagaaggaaataaatctaaacataaaaggcgtgtgctgtttcagcattaagggggaaaaactgtcactgaagttgtaaactcccccatgtggtcccattttaccagtcacttcttaacaaaggcaagttttattataaaactctaaatcctgtcaccatctctggaggaggagatttcctgcagaggtggaccaactggtaacccctacttcccatccacactggctggggcttccctaatgatggctcacctgggaggccaatttagctgttttgtgggttttgtggggtagggtttagaggtttgtggtggtggtgatggtggttttgttttttgtttttgtttttaagtttattaagttaggctgggccccttgcatccagcagtactggggtgttgtttgccaagatagtgcttactctaaccttaacatggagcatgaatactctaatgcttcacaaaaaaaaatgactgccgaattgtggacaaggagatgatgattcctggaccagtggaatgtaaaaaagaggtgtcctggaaggagaagataggtacaggaatgacgatctcacagtgtaaccagagaagtttctaccccagccagtctgagttttagaccagagcccctgacccccagacccgcacctggttgtgctgcccagccctcccagtctttgttctcaagaattcaaaacctgcaacgctaaggcttcatctgtggtctgctcagactgcctctgtgcctgccttggggcactgcagaagcctccagctgcctggcaaaggagttgtggcttccttccctctttcttcttgtggtgagccgaggaggaggtagaggaggaggtaccatttgcttgaatagcctctgagagactggggtcatctgagattcttctgtgggcttaccacagggagagaaatgctgggggcagatgtaggaaaacagaccaggaaggaaagaatagagacagtgagtacagggcaaggaaagagtaagaagcaaagacctgtgtacaggccagacagggggtacctgctaggcagaaaatccccaaaatggctgaggagagtggagcaagcctgtgatcccaggtttgaaggggaatctataggcagtaggatcagaagttaggggtcaccttaggctgcatggtgacttcaaggacagcttgagtcacatgtaagtctgtcttaaaacaacaactatgtgttcaaggtgtagctgctgtacagtcacagaggcccagaagctgaagggtgagacctggaggttgttctgggcagatctcctggcactctgctgcagaatgcctgtgggagaaatcggaagtcacggggcttctgactgtcacgttcctgttccctttcctggctttatctacctacagagtgagaatagcaatccttgctgtgggtttgctgtaaaccccagccatgttcgggggaacagcgctggtagaatgattattaaaatgggaccacgctctactgagcatcgacctccaatcccctgcctatctcttcaaacagaaaagttccctccctaggccaccgttcagccaagtccaaatgtgactgtctgcccttgttaagacagaggcatttaataaaaattggaatccagtatgtagaaaacataggtttgtgttgtgttttgttttgtttttgttcattttgtagctccttaggaaatcgtgttcctttctcactcccactttacacaactttcttcttgcaaataataataataataaataataataataataataaatggggaataaaggatacttgattgtgaaaatcaaaacttacaaagggctagggcctgccttttaagacagacagtagctactaataaagaaagctttcctgtgtcttaagagcaaacctactttttttatgactaactttccctgtgggaaagggtttgtatatatctaggcattaaaatacaacacttaatgaaacggaaagaaaaatcatctttcgttttgcttgtatggaatagaagtgtttgtgactcgatgctccctggactgttggtctttgtagaatctaagcacaaaagagacctgatcattagcacaggttccagggagaaaaactcaccctcaaagccccctacacacacatacgcacacgcatgcgcacacgcatgcgcacccaaacgcaccacacgttctccaccccaccttcacaccacattttccaaggccaagctgtcgtgccaccatctcagctccgcccaacacatccggtactgtcgccccagcccagtacataggaactcaggacaatttcatcgggttgttgtcctcttaatctctacgccgcacctcagatctcgggcagcttccgtggcacggactcactttaatggatagaatctatttttcatgaaaaagcaggaaataagctgtctctttcataaaaagatttacaaaatgtaatcattgttgaaatattccctttgaactgccgtgtccacgggggtctccggctcccagaggccagcttcattagagcctcctcccaagcgctccagaagggcaggtacgctggtggggcctgctttgatgtcttccatgaatgaaagaaaagcacaataaaaaagagctgttgatcaagcataaaatactctttaagctgacagaatagcagcgttaacacaccctaagctgcttttacccccccccttttcctcacgttttcctgtgctttgtgtacagtgggggtttgtgttttataaaaagtctctgatctatgtagtatgccattcactaacaaaaaccaaaataggattgtttctgtcccacttggtttcctgactactccctgtctccctccctccctatgccccccatccaagtctggaaggcctgcagtttagcctggtgcttttcaggggcttgagccaatccctttgtgttgtaggtttcgcggctctgaatttaataccacaattaaagacagatttttattttctcaagaactttcccttgcaactaggaggaggagctggcccagctgccactcataacttagaaaattatatcatttaatacaagaaaatgcatggctgagggaccactttcttaggaaatgggtcttctttaggcccaagtggatccttgggccagccatatttaacagtaagagaacccagaactcggtttcccaaacttgttcccagtcaggtacctcatcaatcagtaatcaagtattacgtcatcctcaatatttctgcttcgtggagtcaaacagtgaggctctaaggtgccggcagccatgcctaagatcatctagtccacagaatgcaggtgccactgttcctgtgagattggacaccagagcccaagtgtgcaccaggggatacagccccccagtcggtcttcagcgtaaacacaaatgggacacagggcagttttgaacaggaaagtctttggtttcatgggggtgagagtatcagaggaaattataaagggagaatgagaagagactggacttagtggtaagagcaacaccagggtaagctggggtgggatgagatatcaaccgtggaacagcccgcaggactggcttgtgcatgcactctcaaagtttgtaggcactggatggtttattgggtaaaaagattagtgttttcccgtactgaggtttgaaccaaagcagaggtcttggctgggagcggcagagtcattctccagggagcagtggtttggacaagtgctgtgtatgtagtaagcaggcagaaggccatgttgcaaaactattgcacatgctcctgacgcagttggccacggttggccccattgcaacagttctcacatcggagctgcctggggcagccattagagacttgtgcctctctagggagggcgcctgtcactgcaggaggccaaaccatgtgctgggcgcatgtatgtggcctagctgtgctatggagacccatctaagatacggtacttcactgagggtgctggtgcctggccctgggaaacagaatcctgctttctttttttcctctacttaacccgctcgattcaacttaatctattcagtacctcctctctcacccactggggcaagaccgtggggatgccacacctgagaacatgagtagctttcttgtgaagaaacaggctgtcacagtcccaccaccatagtaacagacggagcctatgggtaaggaccctaagaaaggtacctcagtttaaaggaacatctggcaaggtggctcgtcggcaggtaaagctccttgctacagagcctgatgacctgagttcaatctctggctcccacatgatagcaaaagagaaccaacacctgcaaggtgtcctctgacctccatagcccactgaggcacacaaacacacacacacacacacacacacacacacacacacacacacacacacacacgtaatttaattttaaaaaaaaagaaaagggggtcatttaatcttagacctcagggaccagcaagtgttagcacagcacggaaaaaggcatagcctgtgcccaggacccagcagggaggaagcatttggctttgggagatctggaaggagtttaacacaccacaagtggtgagaagataaggctctacaaaggtaagcgaggccactcacggcccattaatgttttaatagtttcctgcacaataaacaagtcttggtttagagttattgaaaacaggctttctttaattaacaaaataaaatcagacaagaaaaatggctgtggagatcaaagcctgagactggcaatacccataactagcacctgtgtacagcatgtcaccctttccagaaactcgtgctgaccactgtcatcctctcatgcccaggactccagggtcacccagcacagagccctgtctgtcatacagagccctgtctatgatgtcatacaacccatcagtggaattcagtacgggcctttagacatttggcctcatcagctgagtttatcaagatcctttgagaagtcgtgaagggcatagaagtctaaaccaaacctcttcctgctggacactaaagcttctaaaggcggatgccacattttctttactcccaacattcccagaccctcaagtccacgacaccaagaaaactgcagcctcttggtacttactgaccaaatgactaatggctcccaagtggttgatcctaaaaggagaaaccaggaatgcacgcagaggtctgtctactccttctgtgtcagagacaggggtgcccccttaccccccccagcccccctcctccagcttttggctgatttgccaaggacaactcatttgtgctaaatagtaggcttagttcatgcaaacaagaacaggaagccagaaatgactaactgactggattcgtgtggtccaggagaggtagcatcatccccaggagggacaatatagtagctgcactcaatgcagacctgcttgctgggtcccttgtgtggctggtagagactgatgtgttggaggggagcttcctgtatttttgtgtttccgtttatatgtgtaaatgtccttaaataacccaccttgcctggagaggaaagctaagcgtcacacccacttctggattccacattaacaacctccttccgtgcagtgttaaactttgccccgaagggccttttgttcaactttttaatttgaaaaacagattttgctgtcacagcccagcctgccctccacagcatgcgtgcgctcacacacacacacacacacacacacacacacactgtctctctgtctttctgtctctgtctgtctctgtctctctctctcccaaagtgaaatatctcagatctacttcttttctgtttttaaaatgtatgccctgcccgctgcgtagaaagggagactgtaagaaaaagttgcgtgtgttagaatattggcagttgagaaggaaggtgagtcccttgacttcatcacctgtctccagtagactctggaccaactccattttgtaaggcacaagagaaggaccagcctgccactgtcacagtgcgggctgccatctcagccctcttgtttaggatacagtgggacggaggctgtttatggttcgtaaatcctgactactgtgagcattccagaatccccacagaatggggctggaactttcatggagctgtaaattaaggggcgggaagtgtgataaaactcctaagagaaccgcgctgcaatggttaaatgaaattttataagcacgtcgctgggcgcggagctgttttgcattacatgagttgaataccttagagacaccacatctgcaggcactttattaaatcctgagtcagcactttccaacctgatgagattacttctccatctgaccagctagaaggaaagctgagctctcggactgcagatttcttttgatgtttcaccttgaacactgaaagaggacgggttccccctcccacccctggttcatcccaaactgtggacattgagaatgtaactggctaatttcttgaaactagagcctttgagggagtgtggatttatgggccaccaaatcaactgtggttgaatgttcctgctgggggaggggcaatagatcaaagcccagtgtttactgcctcaatgtaaatgtatcaagataacatcctctgatgcagtactgtaatattgccactctcggcagataagggacagggattcctttgtagtcgcctggatacagtagggcagattaagggcctataaagtatgaaggcagaggccatatgaaacccaagcagatgtcagacgtgaggatgatttcctgactctccctccacagatgagttttgcttctcgtgtcagtatcttcccaatgacttgattcaatccaagtatttcccagattttctcagatccctctcgctctctgttctcctgtcccaagaagaaagatgccgaatcctcctttagtgagtgctctcagacttgctgcgttttcaagtaacgagattaaagggaaatgccacagcaaaggagcctttcctcctattgccttacccggctgaggcgattggcagttctcagaagtttaggaaaatccaggagcacctctgtgtgggcggttgtcacacctgtcaccaccagtgtcttcaactacaaactgacagatagaaaacttggcaaaatggagtaatttcttattgcttacaactgtttctctactatatttctgcagatcgtttactaagagacctcattcaaaaaaacagaaagaaagaaagaaagaaagaaagagagaaagaaagagagagagagagagagagaagttcgtgtgtggttccccctaactgacttcccattctggaagcccttggtcaagtagctgggttaattgtcatgaagattagtgagatgttgaaataagtactaatggtcaaattacaggagtgaaaagtgggagaataggttttggtttggacctgaaagggttaattaaggttttttcacgggttattaaagacccccaacccctgccttaggagtcatattgacagcccaccacagggcagctcagctcctctattgacatgttgctggtaggagcacaatagccccagtatctgcaaatcattgctaaaatcatctcaaggaaaaaaaagttcccaagctttaacattagacaaaagcccgggagttgcagtgtgcagctcaaaaacccagagtcagcaacttctattgattaaaaactaacctttaaagtaactctgagagcgtgtggttagcatttaaatttaaacatgtcgtgagttgatttgtgttactgaataccaactcagaaggagtaacattcacagtgcggtttttttttctttctttctttcttttttttttttttttctaactcccttaagcagctaaagtatttcatgaaatgtcaaaagggcagaaagaaaaaggggaggggccaatgcggggcctcatcgttttctttcccaggcaaatattcaccccccaaaagaaaagtgtggagagcgaaacacaataattagtcctttgtctaactttctcaaatgccaaagaaagacagattaattaaatatacaacagtgttggtttttggagcgggggtctagcttgctgggtaggtcataaattaggcagaataaatacttcagtgtgtttgcagtgggcctgctacgtcagagccactggaaggttggtgggaggagagtggcgggtttcttgctaatgatagtcacgtctgggtctgtctggttgctaagagcaaccagacatgatgtaacaccaggatgaacttgaacttgggggacttgaaaagagaacaatagcccagagcaatcaataaagcctatttcagtgaagggttacagagctgctctggggtaaccttgtgggcgaggcacacactgaatagtaagatgtgtgaagaaactttttttttctttgctttgctttgctttgctttgctttgctttgctttgctttgctttgctttgctttgctttgctttgctttgctttgctttgctttgctttgctttgctttgctttgctttgctttgctttttagcagaagtatgtacagggcactgctgatttttgtaatgtcctgaatgcagaaactacgggacggaaaactgctccccctggtgactcgccaggtcccaggcctttgcttcaggactgccacactgaagaagtccagaatttcacaactgccttagaaagcatgcaaacagattgggaacagcacttaccactcagtttgagactgttctgtataagagcagatatggaaagtggatctgcgtcagagatcaggagaaacttaacgcagacacggtttgcggtctgcttccctcccctttccttcttactgatctttcttttgtccacttagatttaggccatgcatacttgccagggtgatttcttttccagatataagcagctttattgggttctccgaagcgcatggtcagagagtaaaagtctacaggatgagtagttttgtggtttgagctaggagtttttgttttgttttgttttgttataagcgcctttggaaatcaaaggtaccttgtgtgaccaggaaattttacaccatgcctccatggagctatcacttagctatttatccctgggatcaaaggagtcccgactttcccctaattgaatctccccgacaagagtgagctttagccctcacctctggaatcagttccgactgactcaaaccctggtgatgttttcaatgcagaactcacagcctcgaagctggtaggttttctgatgaaaatactgaattcttcagaatacttagaagaaagttggcaaaaaaaaaaaaaaaaagtcatacaatttttagcctcacttgagttttgagattggtctatagttgctcattttgttaagcgaactctctgtgttgacaaagaatgtttctgaaagggacataagactggctccacagctggcagaaagctccaagggcacattgagtagacagaaacatgaacgagaactacagtggtttcatttccccatgaacacaatggtgcttcataaggtgccatcttattttattatgtatcttttctaagaaaagaattttaaatatatgccattgaaaggatttgcacctggccgggcagtggtggcgaatgcctttaatcccagcacttgggaggcagaggcaggtggatttctgagttcaaggccagccttgtctatgaagtgagttccaggacagccaggtctatacagagaaaccctgtctcggaaagaaaaaaagagagaaagagagaaagagagaaagagagagagagagagagagagagagaaagagaaagaaagaggaggggaggggaggagagnnnnnnnnnnnnnnnnnnnnggagaggaggggagggaagaaaggatttgcacccatcatgaggagcaaggggagaggccagtctgacttccccaccccccaccccctcccaggtcaccagtgagttttccaccagacctttctgttttaactgctatcatgggccacctacagaatgttgtgtttgtacatttagcacctgtccttagcacctacacctcactgagaaatatattgagaaagtcatggaaatagctatttgctgcagccccaagctcacacttcagccactccatcgaatttgcttgtctttcttgagccctcccaggcattaagctaggtactaataagatagccaggttccttgccctcttctaattggctcactacagggttacaaaacctgccatgtgaccagaaagacggcacctggtaagatatatgcaaagcattggcaaagcccacaaaggcaatgaattttaatgtcagaggaataagataaatttcagtggcttgggatttactgtcatccctcgaccacatgaactcccaaggtaaattctgatcccatggttaaaagagcaactttcaaaatagttttacaatattgaatgctttttgtttttgtgcactggatcactgtgggccttgctcatactagccaagagctacccacgagccactacacccagcactacacctgcattttaattagacttttctttttgtcttccagtcctggtacctgggataaaagttgcagcatcccaccatcctccagacagaccacctgaccccttctcaactctgtaacatggacgcaacctcaacccggcgcagttacaacttcactgtcagtggaaggggagcgaaaccaactcgaatcaacttatacatggaaacagcaaacatcgtggtcaaacagcaaaggccataactttttgggattcttttttttttctttttttctttttttctttttttttttcttttttaatactttagggactgtcgtaatttctcatggtgctggaaatggttgggctgtgtgacatttgaagtgtttcagtggtggcgtgagcagtaggtgaagtggttggtgaaggatgagcctcgctcgtgaacttcctgtggtaacacttgggagcctggccttttcccagtatttcctgaatttgcccgtgcaggtgtgtgaccctccctgagcatctggagacacctggagcatgaaaccttctgtaatcgctgagatctgtaacttacaggacactcaaagggcaatggttttttttggggggggggttgtttttttggtttttttttttctgtaacatattagggaaaaaatgcagttaagttgatctttcttttaatttggtttggttcagcagtcagcagttacatacataacacaacccgcaaggacagtgaatccgctcctgttgcagagcaatttccaaaaagacggcaaagactactactatcagtttggttgggtttttgtttttttgttttttttttttttgtttttttttgttttttttgttcttaagttttgaaatgctgcacttacatttaaaaaaaaacatttttcaacaatttcaacaatgacacaaaaattcacatggaaatggggaagatggtctgttttgacagaaactgacaggaatcaaaacaatcgaattttgaattgagtgaagtgcaatttcattggatagctaagtatctttgtaagatagagattgttgaaaattctatttttgtttttcaagtcctcccaccccaggactctaaattattggggtaaaaaacagccttgcaagaaaaaggggagctatttttgctttttatgttttttattgttaaacttgtatccctttaaaaaaaaaccgaaggaaaatttaaaaaaacaaaaaaaatacaaaaaaaaaatacaaatctaatggtgcttttaccacaatatgttaactacattaaatgctaattaattattttctgttatcaaagcacataactcaaatgaaatcatggtatctgttaattttataagctagaaatcactataatgaattatgccaattctgaaaaattttacacatgtatggcaacacctgatctatcggttatccaacgcttcattgtaccagacattgtccagaagtttcaaagaccctttgcaaaccctgaactgggctacgggaaaataacacgaatactgataaggacacaactatgtgtgcccattcagatcaaagtacttgttagggaaaaaaaaaaagttcacaccctccccgccccccccccccagatgtcttgtatcttatgtttaagggaaaaaaaagacaaaaaaaaaaagacaaaaaaaatcaaaaaaggaaaaaaaagcagaaacaaataaacaaacaaacaaaaaaaatgcaagtgatttttctaccagacagcgaagcacccttgcttcccatgcaatgtcacggtttcctatactatacatatatatgtgttctggtcggcaaagcctgccgaccagaggaagtctctctgcatgttctagtgttagtaactaatttttatatagctaatgtaggataaagtagagtgcattaagacaatattgtaaccccactctaggcacttgcctttaaactgtctcagcccttcagaagggctcaactactgtcctatacaatcaagtgactgaaattcctgggaagacactttgctcctcacctaaccccacccccatccctaaacgatgttgttttgtttttatttttttccttaatttgcacgaaaacagaaattccatatcaatgtgccttgccctggatagtgattatttgtggaattgttgcacatgctcctcaattgaaggggttttttccctactcaagcattcggagacactttctgtaaatgttaacctttatgtcagccatcgtcagtttcaacatctagacctaaatagaaagttagctgttccgcagacaggcgtagtcttgagtgtcctgtgtggtcagtggcagtgctattttgagctctgtagatgcttacaatgtcagtatttgggatgtcgctgcattttttttttcaatttatttggagtctccctttattcctgcccccgcccccagatatatgaaaatatgcaatacctgcttatatcatgtagaaaagcttagcaagtattaatttttctttctttctttttttttttttttttttttttttttttgtttgaccaaagtcagtgctgcacatgacgcagtgggttttaggtgtctctctttgtgttttctgtggtttgtgatgcacgtgcgcaggaagggctcctcttagagaagcagccaaactgtgaagcactaagctgaccctgcttcaagcaattttgtttttacaactgttcctttcacaagcaagccttaaaaaaagagaaaaagaaaaaaaaaagacaacttcctttctcttcagacccccacacccacttttcttagcagacggcagtcaatccacattcaataaaaagtacataatgcccatttttatatgcacgtttttaaacttccaagttctgaaaattgtttactggttatctctatttaaggaaaaaaaataaaataaaacattttggattttcatatgtgtctgataagtggttgtatagtcgtttggcgctgttgtatggtgtgattgtcagtgtatggtgtcacttcctatagccagcagcagactttgccttccctatagcacttagctgagcattactttatgatgacatatgtgcactaaaaaaaaaaaaaaaaaaaaaaaaaaaaaaaggagaaagaaaaaaaaagaaagaaaaaatagcagctttcagtgcttcacagtgaagggaaaaaagcctagacaaacattttgtcagaaccttgcgaaatgccaaggtattaccagtaaattggttgtatatacaataaaattgcaccctttttttaaacaaaacaaactaagcaatagtttgggcagttctagttgtttttagtgagcatgttgtagtctcgactgcaaagagagagaataaactgcccactcagaagatatgtaatttgtatcgttgtatagttttattgattacactgatttattctaccctattttataatgcaggacttttgtaatgttgtctaaatgaggaaacatttctgtcaaattagcctagtgaaatctctgattgttcattacaaaggcagcgttcacagcattgcttcttcttcttccttctccacctccttgtgggaacgggattaagtttaaaactttcccgtttcttttttgttcggttggtttgggtttttttttttctttttctacttttaaagtatttaaatgcaattatttttctgccaatggtatagcctatgcctatgcttgagaagtgtaggtctactgaagaaccattacaaatggacgtcagaggtgtgctgtacttttgaaggtattttattgtattaggtttaatgaagctaaaagtagggaactctcaacagatttgcaggaggaaaaaaaatgtttttaaaggctctcaaccactgtggaggcagcatagggtgacagcaaccaaggattaagtagtcagtacaccaagttctggtctgctcatgcttcattgtccagaaagcagcaggaaattgtagttccgttgtcatcaagcaggaagcaaatgcaacaccgaccaaggcagtttaggtcaagagctgagccaaggtgcttgaggaaggctttgctacaggagtgtagagacagacagccccaagagctgtcagcattggaagccagacttgattctgagacatgttgaattgctttttcctctcccatcaaatggcattaacacaattggtaaagatggtccctcaaatgactcccccccccccatttttgtctttgggaactgaagtcagaggcaccaagtctaactctcagcatttttccaataaatgttctcccttggcccctctcctggccaccacaaagctccttttctaaactgtcctgggcagaagtcttctctggtgcccttctcccatcctccagcccttcacttcccactgaggttgtctctttactgcctggcatgacatctaaaagctcactgcctatgcagggctcactccccaccatccggatggcctcccacaggccctccagcctcaatcctccgtgcttccttttttcctttcccaacagtccaagagcgcaggatccaactttctagtcacgctgttctgtattcagtcagcccacaagaatatgcaaactccatctcaaaactactgtctttcaccttcccaaatctctatcctcgtgtgcttcaagctctataacaaccatatcatgaggtatttgcaaaggaaaacattttctcccatgatttgttttttgttgttattgttgttgggttggggattttttttgtttgtttcattgttttggttttggttttgatggggactggtctttaagactgtcatttgatatttttttacatcagagtttatcccacagtcccccatctctccctcctccttccctccctgcctccttctctctttctcactgtctgtctctctggttttcttttgctgcttcttcccttctggtttctggtagcaggcctccattgaactgttgtaaaatacaagaagtgtggtcagtaaggagagttggggtggtgccttccagcctgcccgccagtccatcctagacactcccagaggctgctagctccgcccctctggcatggctttcctttcccatcgccttcggaggccattttgtcttgaagtcaatgcatgctcgtgctgttcgacagtaacctactctgccttctccacctccgaggctgtgcattcatccaattagtgtcatgaatgtttcccctttattttttccaataaaaaaaagcagtgggatgaaaattgctttgatatatagcaggtatattgaagctattccatagcacttaactgtagtgaatactgtgtcaccagttctgaaatcaatttaatgtttaatgcaaatccattacatggtgctattacaggctgacaaaatgattcacacgaatgtgacaactcgggctcagttcactctgcttcccaacagtgtaaatgcatagcagtgtttacctgcatgagaactatgcactaatctatctgaagaaaaaaaaaaactatatcaactttggtatctactttccgtttacttcaatccttgcctttttggtcattgttataatgccagctttaggacagaaagaattataagaaaaccagcataatacctgatatattaaaatgtagtgcctgtgaaacctgtattatactgctcttctgaagtaagacttttctacaccggtagccttcgctgtctgtcagtcaggacctctggtataggtgatgtaaaataaccgtacaatattatgcatgctatcccataatgcttagtgactgtatgatattactcagagttctgttagactttttttctgcctcggttcttatcggctaggtttgaggtatttcactgagaacgtgaactcggtcttccttccagctgtcgtcaggatcttggaggtgtacacttacttaaattcagtattacttgtgtgtgttttcatttttttgttgttgttttttgtttttgttttgttttgttttttgttttgttttgttttcttttgtttctcctaagggacaagcatgggtgtttgatttcagaaatcagtatctggtgagatttttgtctcaaaactaccatttgaatttcaagaactctgctgcaaaaccactctgagaatgtttccaagtgagagtcactttcttgaccctcaagagaagctagacgacacagaagaaccttaatggacagtgtacccatgcttgatctgtctcacaccagacttccttgtagtaaaaagaaaaacaaaacaaaacaaaagaactttaagaaatcacttagctgtttagttacatgcacagatgcaatattttcttcaaaaatataactctgtacaaactttgggcccgattcataagaaagaagtttgctattaacacgggattttaaaaaatatgctctctctctctctgctctctctctctctctaaatttggatatattttcttcccaaattgaatatttcctttgtttaactccccccccccccaatagcacccatttgcctctcattctcccaagggttgcattaaggaagttggagggatgctatatggggactggatcccagtaaggctcacaaggctaaggggaacttaagtatgggatacagcacatggatgcacccctctgtgtgtcaggcatcctccatgtggactcactgtgctgttgggactgaaacactaactttgtaaaatgtgtctggaccacaagaggatacaggagaagtgctacctctgatctaactagagcaagctcatggcagaaaatatcacaaactttaaaatgtgaagattcctgtctctcccgtggttttaaaggcaagtggtgtccaagaaacagagcatccttcctgccgttcaacgctcagcttttccgaaaacctaaagcttgtgttctctttgctttgactgcaaattgtactgctcttgtttttttaatttttttcttggtcatggtctgtaaatttgctttttttctttctttcttttttaacctgttattgtccactaaaggtcttagatgtctggccatgtgagaatgcagtaagggggctgccagctctcttctccctcagaccattgtctccccgctgaactcggctgccttgccaccgaggtgccagccaggctagaggagtgccagcaggtcccagtaggtccttaggaaggctgtcaaggcccagtccatggttccttctctgcttctcctacatacctttcccatcacacatgaaaaaagaaaaaaacaaatctgctcagagtgcctctggtttcttttcaaattgtggggggaaggattaaaaacttcaaatgatggaaaaagagatctcttgtgaaacgaaacgccccgtgttaataacttggtctgaaattgtttttatgagccgggccccctgtgcctctagcatatgtgtattgactctcatagttacccttttcgtttactgtgttctgtgaaaacttgtaattggttgagaatcactgtgggcgtccattcttatcaactaaatctccacagggtttttgtgctggtgtggattagtttaactcttgtattcaaccgttagtgctaccaccttctcacattacaatacaattactggaagcaagtactgcatttcctatgcaacaaaaaaaggaaaaataaaaaaaaaattgctaatgctacggaagccgtgtcctcttttgctgtgtacacaatgcctggggtgagtgagctgtgttgtgggctggtgctttccccacaagtcgggctttctgcgttcaccttgacagattctaggtgtatagggtctttcacagggttccaaggagagtgttgctggccttctacctgcctgggccaatgcaagcttgcagatcccacctggagcttcctgtgtgtctggtatgcttgcctatgtgatctgttttttgctatgggagtcaggaagtggatcccaagaggggagggggtccaaatggccctggactatataactagaaagcacagccaccagccatggatcccgagagatacaaggagacaggatcaggtactaagggtggaatacacatggctgatacttgtatcattttgggggatacaggcgcacaccatcagagaggaaatactatgtggctggtactaggagctctgggagaagaatggctagtgctagaaatcgggatgaagctgaggtgtctatggagtaaggactagctgaagctggggatcctggaagcagctggagaatgctgcacgcctctacctcctgtgacactgtgaacagcacactgttgtcaccacactgtgggcagcgagctctctcctctctctcctcctcttggctcacaccagtgttcctagtactagttccttgtttcttggctggaactagtagtagctagccatttagaaagtctggaaactgaaccaagaaaactatcagtcccagcctcaccagcagagtataaaccagtgagctaggcagggagagacacaaactaggagtacacacatttaacctatttttttaaagcttgatgccacactgtgaggcgagtctagtttttatcctcttatagatgaggctcctgaacagagattagtaactggaagccatacaaagaataatcatctgtgtgtgattctaatctgagaagtcagatgcctacattttcccagtaatcaccagatcttcattctgttaactgcttaccagcaatactggtgaagtgtctaccatgtgccagaaactatgccaatgctaagactagtaagtaaacaaaaactgggtatctgttcttctgagccatgtagtctagtagttaaaaaaaataaaataaaataaagtccactcaaatcagcccagcgccacagtcatgatgagtcttcacattgttctgaaggccactgaggccagtgtcacagataataactgacaaagcaaaagagggaaggagactcttgcataatgagcagtaaggaaacactatgtaaaatgtacctgcattcaaagggaccccagggaaggtgtattaaactgaagaaaggaaactctctggtgcaacagggagtctgaccttgaagtcaagacgctgcatgtgcttgcagcacataatgggttttccccctcttaaagcacactcattactgtcctcatcactttgaaatgacatgtggcaaaaacaggagagacttgtttgggctcatagttttgtcagggcttccatatgtcaaactgtggaaggcagggtgggactcttggtggtgggagtgtgtgaatcagagaccccctcgaatcacaatggaccaggaaacagcacagaacagcaccagggaaagtatagccttcaaagtcctcaagcatcctacttctaccagccaggccatgacacctaatgaccctggggccttcaaaacaccaagttcccaaactggggactaagtattcaaaacatgagcctgcaggggaacatttcaccttcaaaccacagcagcttataaaatcttatctattcattagatttgtgtatactatcaaagaaataaccccacatctcacagcaatgaagattttaatcttacttaacacgtctcttgtgggtagcctgagacctctgcacaggattgcctcattctaggacgctagacagaaaacagatagtgtttgaccattgcgggaggtattggcaggattcataatagcttttaacatctggaatagactcccaccactttggctcacatttcattggtcaaagccaatcacaggaaggctagagaacaggactagtcatgagctggagagacaaagattaagctgagtagagaagaatgttgaagtcagagtggcagagaggtgacaggcaatgagtgcaggttcacagtagagcacaagtaaacatagtagagaccaaagaggacataaatacctactaatcgctaaacgctcacatgccaagcagtttaggtgattgatttatcacctcacatttagtatttggctctgactgcaactattgaagaggcacaatcagtccttacgaagcattcctgactcaagttaattgagcaactttctagtacttgccttagcatttaagttaaatcatatcagtccccaatcacattgatctttataatttggcctcatgaaactgaaatctaagtcaatccaaatcatctaggtcaggtggtatgcaacacagcgcttggacatgggacaacattgtaaatcaagaccgtggaatcaagtaccaaactggcccaggtgactcctagctctccattttagtagctctatggcattggctggtgcctcagttttcctattggttagatgagaatgattattacaggatcattatagatatctgacgaattaaaatgtgtttagcgtagcatattgtaaatgccatcaccaaagaaaggacccctggtaaaggtttcagtgcacagtaatgcaagtcttcttcttgttcattcccaggctgccatttggctgaattctgaaacctgactcaactaagcaggaaaaggtatcccaagaaatgtcgtctagggtttacatcttgatatcttattttctgaactctgctatagtaagggcctcagtttttccatctacaaagtggaaatgagtgtggtgcctacggtcaaagaccatgagaaggattgaaaacaactgatgcaagtagatcacccagcagagtaccagtcatgtaagaacctagtatcatgtggttcatcctggaagaaagcagccttgacaccctggaggacagagatgttacagagagaagctaagcataaaaccagagtccccctaggtgaggtaatacaaggctgtagcctgtgagacagagacaggaggattatgagtttgtagttagtttgaactacacacatcctgtctcaagagggtcaatgaggagagggtgaacagaggaggaggaggagaagcaggaggaagaggagggatgagatggggagaagcaggaggaaaaaacagatcaaagaaaccaaggaactggagagaatcccactcccttctttcattggtcacgggatattaaacacattacttctcaccttgattttcagtttcctcacctgccaagtgaatacagtaacgtctctcttcctggagaaagaagtccaaagagtgcagtaaagtcaagtgagaaagcactgggaaaggcgagcatca

SEQ ID NO: 204 - DNA, 2962 bp, Mus musculus
gtgcgctatgcctttaacgcccgcgtacagtagacagtatagtggagtgtagggaaactctaggcggggttaaagttcagcgcgtggagcggcaagagcgctggctgctgcagttgagccgagttggaaatgtgaacgcaagaagcaggcttgattttttattcctccccccctcctagctctctcctcctctctctccctctcgcacccacactcacgcacacctccagcccgcacacagacgtgcacgcaccccccgccgcccggcagttatgtattctccgctctgtctcacccaggatgagtttcatcctttcattgaagcacttctgccccatgtccgcgccttcgcctacacatggttcaacctgcaggcccgaaagcggaaatacttcaaaaaacatgagaagcgcatgtcgaaagaagaggagagggccgtgaaggatgaactgctaagcgagaagcccgaggtcaagcagaagtgggcttcccgacttctggccaagttacggaaagatatccgacccgagtaccgagaggattttgttcttacagttacagggaaaaaacctccatgctgtgttctttccaaccctgatcagaaaggcaagatgcggagaattgactgcctccgccaggcagataaagtatggaggttggacctcgtcatggtgatcttgttcaaaggtattccgctggaaagtactgatggcgagcgccttgtaaagagtccacagtgctctaatccagggctctgtgtccagccccatcacataggggtttctgtaaaggaactcgatttatatttggcatactttgtacatgcagcagcagattcaagtcaatctgaaagtcccagccagccaagtgaagctgacattaaggaccagccagaaaatggacatttgggcttccaggacagctttgtcacatcaggtgttttcagtgtgactgagctagtaagagtgtcacaaacaccaatagctgcaggaaccggccccaatttttctctctctgatttggaaagttcttcatactacagcatgagtccaggagcaatgaggaggtctctgcccagcacatcctctaccagctctacaaagcgcctcaagtctgtggaggatgaaatggacagtcctggtgaagaaccattttacacaggccaagggcgctccccagggagtggcagccagtccagtggatggcatgaagtagagccaggcttgccatctccaagcacactgaagaagtctgagaagtctggtttcagcagcccctccccttcgcagacctcctccctgggaacagcattcacacagcatcaccgacctgtcattacaggacccagagcaagtccacatgcgacgccatcgactctccactttccaacgtcacccatcatccagcagcctgggccttacttctcacacccagccatccgttaccaccctcaggagacgctgaaagagtttgtccaacttgtctgtcctgatgctggtcagcaagctggacaggtggggttcctcaatcccaatggaagcagtcaaggcaaggtgcacaacccattcctccccaccccaatgttgccgccgccgccaccaccaccgatggccaggcctgtgcctctgcccatgccagacaccaagcctccaaccacatcaacagaaggaggtgcagcctcccccacctcaccgacctactcgacacccagcacctcccccgcaaaccgattcgtcagtgttggaccacgggatccaagctttgtaaatatccctcaacagacacagtcctggtacctgggataaaagttgcagcatcccaccatcctccagacagaccacctgaccccttctcaactctgtaacatggacgcaacctcaacccggcgcagttacaacttcactgtcagtggaaggggagcgaaaccaactcgaatcaacttatacatggaaacagcaaacatcgtggtcaaacagcaaaggccataactttttgggattcttttttttttctttttttctttttttctttttttttttcttttttaatactttagggactgtcgtaatttctcatggtgctggaaatggttgggctgtgtgacatttgaagtgtttcagtggtggcgtgagcagtaggtgaagtggttggtgaaggatgagcctcgctcgtgaacttcctgtggtaacacttgggagcctggccttttcccagtatttcctgaatttgcccgtgcaggtgtgtgaccctccctgagcatctggagacacctggagcatgaaaccttctgtaatcgctgagatctgtaacttacaggacactcaaagggcaatggttttttttggggggggggttgtttttttggtttttttttttctgtaacatattagggaaaaaatgcagttaagttgatctttcttttaatttggtttggttcagcagtcagcagttacatacataacacaacccgcaaggacagtgaatccgctcctgttgcagagcaatttccaaaaagacggcaaagactactactatcagtttggttgggtttttgtttttttgttttttttttttttgtttttttttgttttttttgttcttaagttttgaaatgctgcacttacatttaaaaaaaaacatttttcaacaatttcaacaatgacacaaaaattcacatggaaatggggaagatggtctgttttgacagaaactgacaggaatcaaaacaatcgaattttgaattgagtgaagtgcaatttcattggatagctaagtatctttgtaagatagagattgttgaaaattctatttttgtttttcaagtcctcccaccccaggactctaaattattggggtaaaaaacagccttgcaagaaaaaggggagctatttttgctttttatgttttttattgttaaacttgtatccctttaaaaaaaaaccgaaggaaaatttaaaaaaac

SEQ ID NO: 205 - protein, 506 aa, Mus musculus
MYSPLCLTQDEFHPFIEALLPHVRAFAYTWFNLQARKRKYFKKHEKRMSKEEERAVKDELLSEKPEVKQKWASRLLAKLRKDIRPEYREDFVLTVTGKKPPCCVLSNPDQKGKMRRIDCLRQADKVWRLDLVMVILFKGIPLESTDGERLVKSPQCSNPGLCVQPHHIGVSVKELDLYLAYFVHAAADSSQSESPSQPSEADIKDQPENGHLGFQDSFVTSGVFSVTELVRVSQTPIAAGTGPNFSLSDLESSSYYSMSPGAMRRSLPSTSSTSSTKRLKSVEDEMDSPGEEPFYTGQGRSPGSGSQSSGWHEVEPGLPSPSTLKKSEKSGFSSPSPSQTSSLGTAFTQHHRPVITGPRDHATPSTLHFPTSPIIQQPGPYFSHPAIRYHPQETLKEFVQLVCPDAGQQAGQVGFLNPNGSSQGKVHNPFLPTPMLPPPPPPPMARPVPLPMPDTKPPTTSTEGGADTSPTYSTPSTSPANRFVSVGPRDPSFVNIPQQTQSWYLG

SEQ ID NO: 206 - DNA, 400149 bp, Homo sapiens
  misc_feature (1)...(400149): n = A, C, G or T/U
tacagatgtgtgccaccaaacccagagaatgtttgtattgttagtggagatggggtttcaccatgttggccaggctgatcccgaacacctggcctcaagcgagctgcctgctttggcctcccaaagtgctgggattacaggtgtgagccactgtgctcagcctaatattgactttaaatagctcatctgtgtatctaagaatagagaaagaacagatttgggagtggggaggcaatagtctgccacaacttgcttatttgggaacctcatcaattcctagattaatttcgcttgtagtgtttatcatttatattgcaatgtgtgtcctttgaatgcctgtgttgattactttgtctaaaaagtgatttgaatgatctaggatttatacaggcaaatcaagaaaatgtgaaatatatctctgtgtgtcaacattcaacttcgttcacaaattaaaacttaagttgattattagaaaaatattgcaattttgaattatgtttctaattctgtaaaactctaacattctagtttccatatcaatgtcttgcaagaggattaagtttttatttgggtcaacaaagcaaaattcctggaagagcctactattttcaaggcataaagccaacctacacagaaacatgaggctctcaatggggttagcaacccaaattcaccctactagatttgcacctgatttccagtggcatggtggagccaaggttactggaatgcaaattcacaaaggtgggaagaattgatgtagtgtaaacgtttaagccatgtgaactactattactggtattattttaatattatttaatattaggtttaaggatattagaagcagcaatttgtggagtaagtagagcctatttcactaacagatcttattatacatcttctggctatttgaattttgagaagagtctgggaaaaatttactcctaaattgcctctgttgatcaaagtccccgaaaaccagtatcagcggagggtcttccttgtttccttacctctctttcatgctctactccttcttccctttctctctttttctcattcattccagcggtgccatagctcaggactgcatcttttctcatatctttctaaccactctctttgcctccactactagaatgatatttctaatttgtaaatcttattttgtatatctcttggttaaatacagcccctccagtgaaggttcaaagggttcacaatgctctccaccaccttggctctgcctgcctttctaaggtcatctctagttacagtaatactgtccagtgccgcctaaggacgtttcagtcaatgagagaccacagatacaatggtggtcctataagattatataatactgtatttttattgtaccttttctatgtttagatataggaatgcttaccattgtgttacagtagcctataatattcagtagagtaacctgctgtacagagctgagcctaggagcaataagctataccacatagcctaggtgtgtataaggttataccatctaggtttctgcaagtatactctacgatgttcttacaacgactaaatcgcctaacaacgtatttctcagaatgtatccctgtcatgaagtgacacatgactatacaagctaatcctaactagacaactagccacaattgaatacatccccattctttggcctgttgcatacactgacatcattgcgttttcctggagaggaatgccctgcccctcacctgtctacctgactaatgcatatttctgtcccaacacaaatgtctcttttttaggccttaatgactgtctctgccttaatgacccagacaaaatgaatcattctatcaccactgcccattttatacatatatatgtgtgtatatatatatatatatatatatatatgttggacataacgcttattacattacactattagttagctttatgtcttatctaccccattgcactgaaagcttgttagaggcagggataatgtctcattctttgctgtatccctagctcttagcaccttcaatgagcctatattgagcacacataatgtactagttaatttacatatgttatctatctcccattttccagatcagaaatctaaagcttgcagaggttttgcctgaaaaaaaaaaaaatacacatggtagaaccaacattaaaacctaagttgaggccaggcttggtggttcacacctgtaatcccagcactttgggaggccgaggtgggcggatcacaaggtcaggagattgagaccatcctgcccaacatggtgaaacccggtctctattaaaaatacaaaaattagccaggcatggtggcgggtgcctgtagtcccaactactgaggaggctgaggcaggagaatcacttgaacccaggaggcagaggttgcagtgagccgagatcgcagcactgcactccagcctgggcaacaagagcaaaaactctgtccaaaaaaaaaaacctaagttggactctgaagccaatgctatgttgtcaatgctatgttgttgttgactagatggagatataaaaggtcactttggaaatggtgccaacctaccatatcaaactgagttaatgcactacagacaatgcacacaaaattcactgttaccacctacttacaaggcctggcctgcttagcatcagagattattcagaccatagtatctacagagcaatgcagtacaggttgacacctcttctgcatctcaacggttcttaccttttgacaaaaccttccactctcacaataggttgatgtcttgttttacaggtgttatgtaaccatctcaaggtcacacagtctagtaccagctaaaccaggcccaaaacttttttttttggttacttaaaaaaattgttattattattattattgtatttttagtagagacggggtttcaccatgttggccaggctggtctcgagatcctgacctggtgatccacctgcctcggcctcccaaagtattattttttatttaaactgaagccgctacatcacatcaagtgtatttctaggtgagagtagtacaccaagtggaaatggatgctcagtggaggaggctaggattaaatgccacaggcttgctacagccaagagcatatctgcatctatgaggggcagaccagaacagcaaagctaatgccaaggccagccacagtacggctacatcagtcgactagttgtagagagcaagaccgaagcaaaaaatgtgattcaacataaaatatgaggtttctctaacctccaatttaactatgcaaggtcctgttattaattaattaggtaccttcaccaaggacagttaagaaaatcagacaactgccaggttgcttcctattactcttgacttcttactggatacttttaatcaagccaggtaagcacacgttttcctctaagttattcagcaaaatgtcctatgctccttaactgactcaaagcaaacacaattttttttttttgagacagagtctcgctctgtcaccaggctggagtgcagtggtgtgatcttggctcactgcaacctccgcctgctgggttcaagcgattctcgtgcctcagcctcccaagtaactgggattacaggcacgcgccaccacacccggctaatttttgtaattttggtagagacggggtttcaccatgttgggcaggatggtctcgatctcctgaccttgtgatccgcccacctcggcctcccaaagtgttgggattacaggcgtgagcgaccgtgcccagccagcaatcacatttttaaaaacaacaacgaaaaccgcagtagcctggttgtgtgctttccatttaaagagataactccctcccttcagagtcttatttccttgctctgcaccaatggctattttgttgtttaaaacaaacacttaaactgttgacattgaaatatccagactacatggtcttaaagagtctgggttaatgaaataaggtgagtcagtgagatgaaggacttaatgttccaataattatcttttaaaaccccccttttaaatgtcaaaactcttacagctcttctcttaggggagtaggaaggggaggggtctcctttaattttgtggaacccaggttttgtaaggatattgacaaattagatgcttggcaattaaattagaatttcaccgtatctcctgccttaaaagaacagctttattcttgagggagcccacctaacaattttatgttcagtcatctgcagagaatagagccactgtctttttctttcctaacctagggtagacgctttatttcactgcaagttccctgtgacattttgcactctcttgatttaatgcaccaaagaggatctttaactcttggtctacactagtgcaaataaaggttaaatctctcactaaccatcatgaactagcctaataactcacgagaggccctggaaaaagaaaccgagagagcaggtgtgcagacttgattaaaaggtgcaaaacccgcacaaccgcaggcaaaggtactttatcctcacgttgcccagtaccggctgcgaggtgcgcaagcaggggaacttgtactgcgccaacagaacgattccgagagccgggcctagtaacacaggggcttttcttcagaacggtgtccagaccggagcttgcgccgaatgtaggggctcctattggccacgcgccgtaggggaggagacgactggcggggagacagactggaggaggggagaagggggcaaggccttttccctgccccctccctgccccctccgccgcaggctgccgccggtacctcgtgcgtggttactatgcaaattgcagcgattgcggaaataaacaagggagttgggagaggagagagggactgccgaatcgattgcaacttctgcaaagtctcgtacaatccaaagcacgcaaggcaaaaccagagcgaatctgagaaccagccagcccgggttggatcgctttcaaaagagagagtgagagcgagcgagcgagcgagcgagagcgagacagtgagagagggagagagcgcgccttgcaattgcaaaagccttctgatttggagttaaaaaaaaaattctccaagaagcctgcaattggccaacagctttttaaaaaatctcttccgggttttcaacggttccaagtttatttagatattttttaaatgcaaaaaaaaggggacaacaaatgaagcaattcgtctgagcattttaaagtttctcacgtactctttttacattgcaatggtacgtggtacatcttaaactttctattttgcatttatatgatatgcgttttataaacaatggtagaatgattttgtttaatggctaagactaaaatttctctagctcgcatatgcacttaagtgattgctgggtaaatgtctattgtgatggttttgttttaaagatgtagctttgttgatggtgtttttgctatgtgcatcagagaccgggttttctttttcttttttttttttttcgggatttgaaaaaattgctgagcttgacagatttttttttcctcctagcgcttgctcggttccagaaaggggtggggggaaatcctgtacgtgctctgttctgtaaaagacgtctggcctcagcagtcaacctaacccgaaaagaaatgtctggacccggagaataattgacgatttgatcctctaatcaatgggacaacttgggagattgacaaaagctttatccaatcataaggaagcttgggtgtacaatagttctcaatagccagagggggcggggcagaggagatctgaagttctctgcagctctgaaggggatggtgtggttcaagctgtcaaagctacaagcgcttccggatttagcaagcacaataggaaagaattttcgcgtttaagaaaaaaaaaaaagctgatcgggggagttttgcatgaatcgtgtgccttcttccttgtcttttggaaaaagaaacattctgctagagaaataactttgtattgttattaactttgcattagctattatttttatgctcagggaagttggtaacttgtggaatgtgaagttcaactttaagaaacgtgtggcttaaatcttgcctgaattgtgggactgtagtgagctttgggaagtaatatattgcgtattcagcattacaaaacttcttactctgattatcttagaagctttggcatttcaagtactttgaaattaataggtaaacctctcttcttgaactctaaacaacagttttaaaggagagaatgtttcacatgtggactagcagctgtcttacacacttgaaagaaattaggggagtgttttttcttggctattcttgaattctgctttttaagtatatggtcagtaggaaataggacgttaagactggccaagttcacgtttctccttgttaccacaacaacccccgtggagagtgtatggaagatcgctgacttgctaactgttagttggagtctggcctcttggacaagtgcttgatacaaatccagtggaaaccaactgcagtagcttgtcttggagacagtaactggcagcctctgactaaaatatctccatctcctcctctctgagcagcgtagacacccaattctgttgggaagtgaatggaaaataatatgggctctttcccttctttggattaaattcccatcgagctatttcccaaggctttaggccttccagtcaaatctggcttggaaatttgatgtaagaattcacttggacactcacttcagcaacatgattcaatttaggattatatgcacataagaaaaatctgcacagaagtgaccagcaggtcaaaaaccagagaagaaaaaatgttgaaaaatgccagttaataaagttagttttggtaagaactacagagttatggtgttgtcgcttatgaatcccagtcctatcttcactgctttgggtattaaaatctaaatcatattaataagatctccctattaagtaacctccaaaatgagagctatttgagatgtacatataagtgaaaccttattgacgtaatttatatatctaagaggatttcactaaagctggcaaggtaacgtttctgcaaataaaacacagtaaatgcaaggctgggctctgtgccaggaagaatatggatagcagagagcatgacaggagcctcctttgcgcagagacaatcccatttcaaggcagcctcctaccacttggaaaataaatgattggagaggttatttccaataaggggtttatccttcctaacaatgggtcatttatatgattgcagtgaactagtttccatacttcacctgcgtttcctccactgctctctctactatcctttctttcttccctcctcctccatccctgctctctctcaagtgccttagtatctttgtgaactctggacaaggatttacttttgcaacttgggaagaggggagagggttggaaatgttttttacccccagtctgccctttgaggaacatctgtttctttgtgcgtgtgtttaaatttatgcctgttggagagaaagttaccagaagcctttctgtaactgtaactcttctactgtatttttctcagtcttgtttccaaaggctgtagttggaactgtgctttgtagtgttcccccgcctccccccctccctccgcgggggagggagcgggagctggcggagataggagagaaagcaggagcggatgtgaagggctttggtgctgaacttggatccagcccttgcctagagggcgcaaacaatcgtcccatatccaaaagtcttacgaagggcgccaaaagttacttaagataatattgctaaccgcagaaagctggaaatcgcggggcacatccactgctgcaacaaaagaagtttttaaagtagaaatatcagcattaaattacttcccccattaaaaaaaaaaaacagggcgacatgccagtcctttttaaaaaaaatcttttttttccttgagactcaaaagtaagaatctttgccgttttgaaaataggcagatgtgaagtgtatcttttaatacaccaaaagaaagattttaatctgctctggaagagagcttcccgagtacacactctgaacaataacttttcactgtgcctcagttacatgttgggaccgtcagccagaaacttctatcgaggaaacttggagcgcattgaagttatagatcccagcaaaggttctcgtggccagggatgttgtctctgtaacacagcttggcttttaggacattcctcccctactaaaatctgagaggaaccaaggaaaagcagtgggttaagtttgggaaaatggactctctcattaaaggctgaaatcattatttctcctcactccttagtaaataatcttgagagatttccaaggatgttcaggagggagggtgggagagagaatggttcttgagcattcgggaattattttggcaataaagtaactaaagtacaagcataaaataactttagacagatgcagaattatttcagaggttctcttttgctctttctccagtacagtatttcctgccccttgctttgaaaagaagtctgaatgagagtggccttaacacatcactcaccctcacttgttaacacatcacttaccctcactttcctacaggaatgtcccctctttagagactctctggttatgtcacctccaccgaagggcagattcccctgtgtgccagtgtctttcaacatgatacctacctctttccttttggaattttgagaagggttgtcaaatgcagcattttgcaaaccatcatgaggaagagaagtaaaataagggatgggggcttagaagaggcaggtaggctttcccccctccgagagaggagagcctagagagaaaatatgaggttaaaaaaaaaaaactggaaaagcaggcttactggcaacttgccaaaccctaaaaaccacccccctcttttctgccaaaacaatactttagcaaacctaaaataattgcaggaagctcttttccattttaagaactattacctgggggagggaaaaaagggattcttaaaaggcacccttccagaggtgtcccagaaactgggacggtaatgatagcctatgtccagttctgggcacgcgtttgtggatcagaatatctcccttccctaaggggacatccctttcacatatttttttcctcctaaaaagtaaaagatgtcacagctaaaccactgttgtttctgaacgtgatagaactttttctatggcgtctgtgttcaaacccactagtttcacagtcctgggagggataacgctcattaatctccgccttcttttctccagacccccgccccccaaatccggtgaatcttctgtgggcactgattcctcaccacccccgcttctgaatgccacaggaccgaagctgcacaaagtttgcaggattgtgtgcataattacctctgccgacgaatctattcccacagaaagcttcgctggagagattacaatgctttgagccttaccgcatttcagtgggggaaaaaaagttacctaggaggtctgatttttcaaagaaatttgcatacatgcaaatgtgccgcccggcctcctcctcggttctctacgtgcccacgcggtggcccggggggtgcggggcaacctggcaaagttgcccaagtcctccaccgaggtccgcggaggtctgcagcgggggtggggggatggggacgaggaaaagtagttttgtttgcttaagcacatcctgtggcagcctatagctgcccgggagtacagactgtaactgctcctcactgcgttacccagtaatgcgctgatcgggggagggggcggggggaccggggagcgagcgggagagcgagcaagcgagcgagcaaggagcgagccacggagagagccggggagcgagcgagccagcctgcgagcgcgagcggccgcggaggctcgggacccggctggccgcgcggcgccgcagccgccccctcccccacaccccctcccccccgcggcggcggcgcgagcgggcggcggctgtgcggtgcggtgcagagcggaggcggaggcgggcgcgcgggcagctcgcgggcacccggccgggccggcgcgggagcgggaaaggtgcgctatgcctttaacacccgcgtacagtaggcatgtatagtggagtgtagggaaactctaggcggggttaaagttcagctcatggagcggcaatagcgctggctggctggctgcagttgagccgacttggaaatgtgaacgcaagaagcaggcttgatttttttttctccccccttctctctctctctctctctctctcttcctctctccctctttctcctctctcacccacactcacgcacacctccaaaccgcacacccagacgcacacgcataccccagcgcccggcagttatgtattctccgctctgtctcacccaggtaagccgcggcgtggatgcggagggcttgggggccggggcgccgggggcagggctggggctgggtggggggcaccggggccgtcgctccggccgggcccagggcgtgcgtctcggtgtgtgtctgtgtctgcgcgtgtttctgtgtgtgtgcgcgcgtgtgcccgcgggtggggggggggatcccgcttaaagaaagtaactttgtttccatgcgggtgcattcctcttgcacggccatttgtgtgggcacatggctaatggcgccctcttattaatgcgttaattaatatcggggcgacggactgcggaacagcagtgttttcggacaccccgcacgtgtttcggcggggttgcagtccatgacacgcagaaatctggctcagcgtttctgctgccgggagcagggattccgtagtgccgcagcgcccggggagggggccgccgacggagcccaccgctcaccccgcacgctcgggccggctgcagtcctcgggtgcggggagacctcgggtgcctgcgcccaacggcccgctccccgcagcctgcgctgccgcagccccccgccgtcttcccgaactcttacttttgtttattgtttgtcagccttcggggtccggccgcggaaaggacgcgggctcccgtcccggccccggcccggacagcgcccctcggacgcgggcaggctgcggctagccctcggctgagcggggctacgtggacgcgcgttcccccgcgccggccgggtggagcctgcgtcctcgccgcgcgccggtggcccgttggctctcccggagtgaaagtttcggggccgagacgagcccacgttgtgcagggcgccgaacgccggaggccgcgggccgcgggccgggtagcgccgggcagagttgggctcctagccgggagccggagcggcggcccgggccggacacggctccccccgccgccgccgccgccaccaccaccaccgccaccgcgcgactccggccgctccgcgcgcaggacgggggcaacttttcccctccgactcaactcagagcatggggctcttgcgccccaccgcctctcctttccgtgcccccctgtccattcctcccttgtctacccacccccaggcaaaatattgctacttcgagacttcaaatccggtcccctttgaatatgttatttgttttccttgactaaaaggcttgaagtcaaagtggttttgcgctattttttttttaagcgtgagatttcatactgctttggtacattaggatctgaccattaatcacctacatgaagttatatgcttcacataaaatgtttattcacctctcccttaaaaaacctaccacttcttgccttcatttagtaggagataacggtttaaccggaatagtttctggaaggctaaaaagtatcagtagttttcgctctcctctctagattctggatttatttcccacatgacatcccttcttattgcaatatctaacagtaataataccgggtatttgatctcagaagactcttaaacgcatcttttatgttgaaatggtctgtttgggatttaggcctagcattaataatggatagcagttacttttagttactgtaaaagttttttttttttttcctaacaaacttccaaagttcctattttagtaacttgtggaagtatggaatgaaacttttccaaccacttctggcaaggttcacaattgcatatggataagatgcaaagtgtaagataatttgaatgaattacggactatagtgaaaatgctgagattcgaaggctgaagttctagctggcagaagtttgcaacacacagaacttgtagataatatcagcgagctgcaataaagggaaaggaccctaacagatacattagtgtcttctcaattgagctctgaaaagataaatttatatttgggaatggtgcatatatgagggcacctgtatatccatgcaggcctagggcacagtcaggtatttaacaaagttggcctctgttggttcatgaggtattatgacattaagagagtttttttttttctttttttttcggcttacatattcagcagcgttgattgatgcattcactaggccttcttctggaaacaccactaagagaaatgcttatttagtgtaacagtttgtaaagaaaatgtacaataaatagtgaatgagggctcatattttatgggttctgcttttaaaaatttatttacaatttatttaacttgctgggatatttataatgttttagagccagttttaggaagaagaacttcggtagtttattgctcattaaaaaaaatcagtaagcacagtgatttctatcactatactctaaatgaaactccatttaacttgtaggcaatttaaaaaaaaactttaccaagaaaaacctagacatcttattttaatcaaatatgggcatataatcaaatcaggtactgtccatataatgataacccagcagaaatttgtaggtgaacttttaaaaaaagtagtttccagaaatatcagcattcagtggttcttaaacttggctcactttcaaacagatcaatgtttaagatgctgattcaaagtaataccacttttgaaacaggttttcaggtttgtttttattggtggcctataactttctcactgagtacatatgtaaaacgttctttttttcctcttgaatgttatgaaatagtacctagcttatagcgatatgttcagcaacatgaattataagggcacactactttttttttttaactaatcatttatgctattcctggacatttcttgcaagctaatgatactctttagttttgatattctggaatattttaaatcatgacttgagaaagatacattagaaaaaatcaatactttaattgtgcatatgagtaaagttatacaaaatattgtggacttttactggcaggttcttaacctttggggagtaatacattgtaaatacttttgatgcaaaattggggacttaagttattcttaatgactaattgacatagttgttcttgtttaaggatttttatgatgagatatatgggcatttggttggcaggtaaacagaatcctgttggacacgaatgcatgcatgcagtttgcagttttttgaaaagcatattgggagtatctacagacacttaaaatgccatattagaatgtttattttaaatgcttattatcattaatcaaacttttaaataagataacattttaacatagatatgaatcgtttggagctaagttatactttgcattataaaatggggatgaaactttaaaatgaagtcctccttttggtgaaagctcacttggtagtttaaggtagactccaggagttttttgcataatacaacagagtcttggtccctagcatgtcttgtatatataagaaaatcagtcaatgtgaagttctgtttcaaacctaaaatttatgtattttagatcatttcaaggatgagctcagaatttagtaacgtttagatgctttgtggtttggcgtatacctttgcagataaactgtgacttgccccccatgcctgtcacctaaagtatgagaataagaaatattctcaaacatcagaaattttaaaaatgttaatggtttatggcaagaataacaattcctgtatttttttctattctctctctacttaaagaatgcacacgtgttacaaaagctgactacttctcttttggattcttttattgaaaaagagcagttttgaaagctaaacttgaaacatagaacctgaaatttgtgcagagaggaaaaaagtcagttattgaagtaatttattatgtattaatatatacttacttttaaaagctcagtcatatagagtgtttaaatgattgattataatttgctaaatttttaaacaacacgactattaaatattttaccttatcagttcacatttgaacatttaaaaatttagtaattgtgttaataataatattctggacattactgctacctgtgccttgaaagtatatatttagttagatataacaaactgaaaaagaatgcattttataatatttgtctgtcctacaccatttagcaaaaaagccatcgaatctttctttggtttctaatcctcatttatttgaaggtaatctatgttttggagagggggttatgtggcagagagaagttatgtaacagtgtggattagttaatcaaaagttagacgtactccgaaagctttgtggaggttactgcttaattttttaaaaaatatatttatatttcctaagaaaatgtcatgtataaggatcaaacattttaagcaaaacagaaagaaacatttaaatatttgaaactcaatttttttttcaattttaagaggcatctatgagggttttcccggcatcttgtaaatattgaaaataccaggttctgattccctatgagaaaaatcctgaaatagtatttgcaaaaattaaataatctattttttaggtatgattattactgaaagcacttcacaatcatattagtaaattaaatgtattcatgtatgcttttctttgtttttttttcctctttcttccccctttttgtttcattcccatagtattagcaattatgtcttgggcatagatcttttattttagcctaataaatatcaaattcaatccttcttttgtatatgaacctcccaaatttgtcctagtttttgactaaaaaaattatatgtagttataatatttaaaaggggaatttagacactagcaaaatgagtaagaaacatatcagaatctacatgcaatatttttagggggaaagcctttgttttcattgattgtagagatgattttttgctcctagacttccataaacattgactggcatctaaatgtttaggatttgccaatctggcggctgggccctggctgtactacaagtggtgaggtcaaggctgggacaaaattagatatgccttccttgaaatagggttaagattatacattgttataagcatttagataaacttcacttactatctaaaggatggggagctaggcccgacagtagtagctggtgtaccctggtgaacatattaaaacagttttttaattttcagcagtttttttatttccgatcataagaaatgatactgatagttttctctcccaccttcccagacttcccataggatcctgtgtatgattttggtaacagaatgctctaatcaaatttcaagtgaaatgaggaatttctttcttaaggtgacccgctgaagaaaagttgttttcttttgttttcattctacttatatttttctttttgttcattttcctaggatgaatttcatcctttcatcgaagcacttctgccccacgtccgagcctttgcctacacatggttcaacctgcaggcccgaaaacgaaaatacttcaaaaaacatgaaaagcgtatgtcaaaagaagaagagagagccgtgaaggatgaattgctaagtgaaaaaccagaggtcaagcagaagtgggcatctcgacttctggcaaagttgcggaaagatatccgacccgaatatcgagaggattttgttcttacagttacagggaaaaaacctccatgttgtgttctttccaacccagaccagaaaggcaagatgcgaagaattgactgcctccgccaggcagataaagtctggaggttggaccttgttatggtgattttgtttaaaggtattccgctggaaagtactgatggcgagcgccttgtaaagtccccacaatgctctaatccagggctctgtgtccaaccccatcacataggggtttctgttaaggaactcgatttatatttggcatactttgtgcatgcagcaggtaagtgcgatggtgagaattcctcccactttcttgtgtgtgtttctttcctgatggcctccgcgttatgccggattcttcctgagctccccaagttgcaggccacgtacatgaagccagtgtggtttcaaagattgagagaggtgccaccttcattcaggtgaaaaagcatagctttgagcgaattctcactaagttcagctcttttggtaagtagtgttttcagaggcgttggtaatcagatatgtgatatgtttaaatcacattttttgatgaggggatgagagaagcctcgtgaaaacccttttaataaagagtatattttaactgacaaatgatctagtttaaaagcatttattttggtattgaggcaatatttttagttggttttctgctgggagtgtttttaacctactgaggcctcttgaaccccttgccaattaagaagttggaggtagattactatcaaattgctgatcatttaggaaggaaaaataatcacattaatacgcagacttagtagctttgtatttaggaattcttagtgttgtctcagatagctaagggaaacaaaccagctctttcagtaattgatggagaggttaatattaaaaataaccaacctgtatattgcatgaacacattgaaaaattgctattgataattgatgtagtgagttgctttgattgtaaaatcttaaattttttttctgttttttcaaggcatgtcttacctgtgcatgtttcagtgtttagaatagcatgcaggataaaactattgaggactggataaaataatgcatttttactttgttcctttcgtcttgttttagacaaaaggctcattgtgctatgtgaacgctcaggtcttgtgtaacttgttgactttatatatgtacatatcggtcttgctagattaccttcatggcagttacttgagccagatggaagaaagagggttgtggaatcctaccagtaggttgttttggggttcaaatatttaacgtttttttttctttttttttttttttttttacaaaggagagatgttacctgtaaaaacactgcacttttcttcaaaacatttttaattctaaaaatgttagtgagtttttaaagaagccagctgatagcctgttctctattatttttctcaatatatgttttagaaagagaacttttgttatccatctgcccttacataagaaactggagaaattagctttgcaagcatgtcacatcatcatttgcattctgttggcaggggatagatgagtattttagaggatgtgagctgtaagtgtttcaaatatttgggttttcaaaaatgtatacttaattataagaattgccttttgctttagccaattctgggtagcaagaatgaaaagtcagcacctctcaagtgacctctaagcaggaataagtagcccttttttaacccactcttaaccctgttgttgttcatttgttttgtttactgaaaaagtaaagttaaaatttttaaaaaatgtgtctgcatatgttaagcacagcaaaacgcaaaaaaagtataggtgttacaggtgctttcaagaagcactctttaaaatcttgtttttaccttttagatatttagaaaaatataacctataaattatcccgaatagatgaccaacatcgaaacttgaaagtgccaacaggtgatgcagatcatgatgtgtgcttccatataagataacatcaaaatgaaatacctgtgaagtttttgtcggtgtaagcagtgtccattctaagttttcgtcttaaacatttctctgttatttaaagaaatgcaatcttttcgctgttctcattacgtgccttctttttcgtcgttggtttgttactgtgctattgctcccaatccttgaactaacacagttgttggttgttgcaatgcctgaaggggttatgttggtaaaatgacatttagaaggttacttaggagagttagcatccttattgcttatgaaagatttattgacagcagcatagatcagactactcttcggtttggttttcctgatgtatcccagaatcccttgttatgcctgaatgccagccaaatgtttggccattggttttcacgggaccgcagtaatggctgcttctctgtgcgcgcaacaggaagactgtaaaagaaaatattaagggtcttttgtctgaaaatatttcaaatttgatttaagagattcagagacctgttatttgtggaagggaagctgccaatacaaatatgaggtagatcggtcaacttacatacaactgatttgacaagcatctgttataatactgaagatttgtaaacactaaacaatgtttttacctccttaaaagttttgagaacttgccagtattggcaggaggcagagactctgaaacgtgcttcaagatacatgccaaaaccattgtggccttttcacctataatgcgttttttctcgctctttcttttaaattgttatatttttttcctttccagaatgcctttttttccccctagatggtcatagaaattagatcttcttttccttctgaaatttgtgtgtaataattcttgctttatgtgtccacctttctttggtaggaagttgaaatctcagaacatacgtgagaatactagaagcaaatgcagaatcaatctttttttttttaaagcggaggtgatttattctaagacttattgacatgctaaaatataatacataaactacattccagttttttccctctaaatccagtggcattagaactgtgaattttgtggctgataagcagtaacaagtgtaatgaaattggagtgatttcataagcctgagaatttcatcttgttaaaagaacaaaaccattttatgcccttaatttggtctcaatttgagttgtccttcccatgtatcatatgacaacttggggatactatggtattgtggcaaatggttttctttgtgggtgtgtaacagtaaagctaatttatgaccagtctttaccagatgatctgtatcagaatctacaatatacccggcacgtggcaaggtcacaatttaagttgttaaggtcataaccttagccaccaggcatttgaccttttagataaagttaacctttgttcattagtaggcactcaaccgagaagtttctggagagttgttgtttttttttttttaaccacttctgtataaacttctggtaatgtaatcagattctagaaagattctcagtcaaattagttagattttgtgaaaggttatactttttaaggactcatttcttggatagaggcaggttgctatttttaggccatagaatgacagtttcacaatttatatttgatattattacctgccatggggtagaataaaagcttggaggcagctgtgtggggacatttaaaatctaaaattaaacaaattaatttatgtttaattcaactaaggcctttgctaattttcaagtgacattaggcctaaaagctaaatcacagtgagccatcttcactttttgcagatgaggaattttctaacattagaagtatttttagcagtcttaaaattcagtttgaaagattaataagtgaccacaatttgtcaggtaattgctttaattgttaattagccagtgacaaagcaagttgctgttgtcctaatggcagcagtatgagtacttgttagttttaaggtagaaagagaacacttttgcacggtaatcttttagtgcagtagttactgattgcttccatgctgctaccattattacctttacttaattttgcttgcatcaggaatagcaaagatcctttcaatcactgaaggagctgtttcagtgtctcggaagcctgatacctgtcctataaacctactcaacagtattactgattaccacattacctgtaccatattgttcacttaattatgctgacatgaatgctcatttcaaattatttagattcttgctagttttgttctgctgtacctcatattattccatttcagccaaaagagagctactcccattcaggtgcattttagttttattttggcttcgtgattgccattccttcatatagtaatagagaaagccgtgatatgcagatagaccagatggtcatgttgacagattgagaattcacttcctactgcttcagagcaggtgtaagattaggagtgtctgtgtaggggcgtgtgtgtgcttcgtgtgcatgtgcgtgcacatccaggctgcacagagtgctgtttgagcaatgggaatgatttcttttttgaaatgctagtattttaaatacagtgtaattatacagataaggttttcagtgcatatagaatattataatttttataaataaatcgcattagattgttacagtttataattttatgccaaattaattatgaaaattattttaatttttaggtaacttcctacattagtttgaggcaacattgcatatccaaaatatattcaatatattcttttagcagctacatgtatgtgtgtttacattcaaatctaggactatacgtttttgtaattaaactttttcagtaacttaataaacaccctagtagaaagttgtgcagttacttcctgtgatttgtaattattaataaagtgtgtttggaaaaagaatatacactgtatattgtatacacaatatacacaatatacactgtatattgtaaaactaatatacagtgatatttaaattaggagagtaaggatcaccctatcaaactctagctttaagctcaaggtggattttttggctgatcaagctattgtaaattattgatatatggcatatttttagaaattttaatttatcttttaattcttcaaaaaagatagcagtagcagtcaacaaatttgagataaatattgattttacatccttgagtgttttctgtgtaacttgaggatagtaacaatatcctttacctagaatgtagtaacaaaatcctttatctggaatgtagtgcaaaagatggtagttctaaggcagagagtgtacaggaatagggagaaatagttgttctggagtaaacctttgaatggaagtcagttcatttatggctaagaggttgagtgtgttggtaagaaaatttcccaatgcttctggcttggattttccttgtcttcttttccaccctgtgatgaatagcattaatttaaacctatttaaggctagtgtgggagaaaccacagcctttgttgtggtcactgctgtacacagtaggactgggtgtttcatttggttaaggcctcaagctgcttccagaggacacgggacagcctgtcggcattttaaatcttgcacagaagcagcaacaattctaattgctcacaaatgtcaatatagatttttgaaaccaattttgaggattagactagaagaaaaaacataaaatgcagattgagttcagtgaatgtgctaaacactgatttattaccattttagtaataattttcccatggttatttaagggttagagcttgcttttgaattattataaattgtaaacccatgggggttgagtaagggaaggaagaagtcaggtggaggaggaagagaatgaatgaactcgtatgctttgttaaagagaaacataaaaccctgaacttaatcacaaatggagataccgtaaaagtattttggtttcagtaatgactgtaaagcagtcttgggcagtgagctatcaagtggagaattttataatttgtcttcccacaattttttgcatagcttttttcagactaagacactatttagagctttgggagtttttattcaagtttttaggaaaaggttttgcaaaaattctttttagaatttaggagtccagttagagacatcattgcacacttaagctcagaaaaggggccatggagatgtttattctttttactattttgctttctaaggtggcagttcagagtattgtcaaatttttggctctttcccagtaggcaacggtaagatactcattattgatccaaacttttgggtccctgaacttaacagaattatttagttgctgcttagacagaaatgacttttttccttagattttccccaaaatattagaaaacaattcctcatgttttgttttaactccacagcgtaaagcatattttatctaatggaattagtcctcccgttagtgttctagctaaataaacatggcttatgaagtgaagaaataagtccaacaaatgacaagttgcagcaactctgaagcagaagatatttttgcttttctgtttgtaaaacaagctaaataagataaaactgagaaaaagaagttcatttgtattgtgtattttggcaaatcttggtcttctttaaaatgttgctaaccctaaaacaagaaatgatgaggataattatgataactagagattgaagtggaataactgtaatgttctttgagaactttaaacttacttcttttcatgtctttcaaatacttccctagtggtagatattttggacctagatcaattgggagtagagaaaaggagatggaaggaaggaaaggaaataacttttattgaatgtctgttctgcagcaggcactgagtaaggtttgtcatagtcatatattgtagcttgctgtcgctttcatagcagtattatgaattagtaatgcactctctatttgaacggatgaggatagactcttcagagtggccaggttacatgtccagagcaagattcaaacccaggtcttctgatttcaaatcttatgctcttaaacaattcaaattcattttgtatccttctttatatcttattgtttagggttggatgtcgttttcatggtatcacacacctgtcttgaatcaaagggaaagtaaaaagtcaaaatccaaacccctcccattgagatatttcactgtcaaattcagatgttagccacagaatgaggccacacttgataaagagagaaatgatgttacacttgtcactgttagggtcaaaatctgaaatgatttgttcttttttgtttttataatgttgaaatttagtgaatagaagcattatgacacaggtttaagatttttagttgttgttaagacaaagttaaactaattcgttctagatgctttgagaagcctttgtgtattaaactaagcactattttaaaaactaaattgcatgtaatttttactatgcagatttttgtacatggttttatatgtacaagacataatatatatttctaatttcccctatacattacatatatttttatatatatatttacagacagagaaatatatatctatttctaacttcccctaatgattggattttaaaatgtaaaattcactttgctctgaaaaaatcctttggttatggctgtgtgtgtaattatttaaaataaagccaaaatcatgtttgagaaaagaatggaattttattagtttaaaattaaaaaattaaaataggaaaaaaattgaagatggacatgtttcaatttcgtgcccttaaattagtgaattagtgagcttttttttgttgttgttgttgtttgagacggagtttagcccttgttttctaggctggagtgcagtggcatgatctcggctcaccgcaatctctgcctccctggttcaagcgattctcctgtctcagcctcccgaatagctgtgattacaggcatgcacccccatgcatgtaatttttagtagagacagggtttctccatgttggtcaggctggtctcgaactcctggcctcaggtgttccacctgcctcggcctgccaaagtgctgggattacaggcatgagccaccacgcctggccatgagctttgtttctaactctttaaacttagtcaagattagttctttttttttttttttttttttttgagacggagtcttgctctgtcacccaggctggagtgcaatggcatgatcttggctcactgcaacctctgcctcctgggttcaaacaattctcctgcctcagtctcctgagtagctgggattacaggctcccaccaccacgccaggctaatttttgtattttgagtggagatggggtttcaccatcttggtgaggctggactcgaactcctgactttgtgatctgcccacctcggcctctcaaaatgctgggattacaggcgtgagccaccgcgcctggcgacaagattagttcttaatgatttcagtgcaaaaactcaaagcctcactcaacataatttttataattgtaaatagaaaaagatgaccaataagtataatttatactatattaagtcattatacatattaattcttctaaggtttaatttaaaaataagcagctgaactgaacttacagcaaagaaaataaaatagctttctttttaagaaatattaatgaatcttaaagttagggttgtgtagcatcagttatgctagaaagggaaaactgagtttgaggcatgtgaagaaaagtgattaaattggttaaaaaaatagtactcatatcctattgtcaactgtatctagttccatactgtatgtatttttatatctctggtaagtgcttatggtggtcccaaataacttgtgagtttccagacatagacagttctcagagcatgtgtattcatataaatttttaaatggctattgctgtagtgctctacaggttaaaaaaagtgaggcgaaattgaaacatttaaaaaatactgtactatttaaaaatttgtatgaatgtctgtgtagcagctgccattttcaggctgtctttgttgctatggtttggttgattttatttccttttgtaattttgccagccagtgattgggtagtacattgcattcatgctgttggggaagatatatctgtggtgagtcagatagcttgatctgagtagtaatttttagtagggaaaggtatttgtcagtgggtaatagaaactgtagtgttacattacccatcttcatttaattttcaaatttacagacatgtcacttaatatcagaaattcagaaccatctcttttgcagtgatatgtacttgcctctctccttttgtcctgtcagatgcacttagaattctgtgtagtttaatcttaaagggattagttatttaattttaagctcctacataaaatgaatattgtacatacagggtcccatcattgtcactttcaaatattccattgcctttcaaaggagctgacatgacaagtccttaggttgacaaattctcatcaacttttatgaaaatgttggctgcagaaggagtaaagtcaaaggagggccatagacagatggctttcagtgttgagatgacatcaagcccttcttcgtggcattttttaacattccaaatgaatgagggatggagatgcttaaagagcttactatagaataagtaattaagatattgtgtatctgcatgtaaacccctgttgcatactattaaacagagttgtgcaggctcagatataatagcagattaacaatgacaattgtaaatatcttttatgctgaatgtaactcataaataatattacacattaacatgttgctgatggaaaactgtgtacctgagaacatattttcaacattagataattgagaactaacgataagtgggttaccagtgtttgaaatgaagcaaagattctagataagaacttggcaaaagcttatttgcataagaaattttgcgtctttatatgactatgacaagatttttttggatggatgcacaccatataaaaattactaagttactaaagtttctgatggattcatttagttggctttcctccccctcttcttttaaatggtagaggttctcttttggagagtagtttcaagtaacttctgagaatgaagtctttgtaacgatgctgttcaacagcgtaactattgttgtgcattcctgtcagggaaagatagtcattgcagtacttttattgtatggcctcttaatatgtgacaaggacttttattaagaattcttttcttaacatacttttagaagtctctccttttcccacattcaatcagtaactacagttttaaaaaaatatttaaatgaacttttattgatttcttagcttactgtatagacaaaaatcttacgtttaaaaaaggttttaaaattaatgtattttagagtttcagtaaaatgaagtgggaacaaaaattaacaaaaaagtgccatctcattggatccaggatatgtagtaatacacacacacagttctatgtctgtgtaaccatatatatatatgtatacacagttctttggagaatgaggatatttcagtccaaaatgttatggttgaagaactaattgttctaaagatatttgcccctggccccagaaaagacgacaaacatgcaaaatggataaatgtaatcctttgtacttttaccacctacatttttaaactacagtaactctgatttctctagaaaggtcagaggtttcagacagaaagctttgtaattcttcaaagaaagacattttcagtttggctgtataaagactgattatgcatagctttttactttatgtgcggttgaatcttggaggtgctggagtggggtggggacgatgaataagtgaagctgtgttttgagacattagaattggagggaaacagacagattggagaggaacatagattcatatttttgggctttttactatcaagtcacccagtctaaaactcaggacagagcagcattaaccattcattttgctttgtgatagagcattcgattaccaactctttaaactcttttggcaattcaaggaggttgcctatctgggtaccatttcttaggatttgctttgttggattttctaaattgtggatgtgagtttctttggttttgcattttttaaaaaaattttttggtcctttttaacttttccaagttttggagaatttttcatgttgggcggtgttggagaagtagagattgtagatgaccttcgttgtggcttactcctgttatttgggaaatagacgttcagagagcatctcacttgaggccacaccaacagttaagaggcaaagccagcatttaagccaactcccttagatcccagacttttgccctaaaactatattatttaaattatcttttcttatgtgtttttaaattagcccttcatataaacttcaaattttaggtaggggagcttttatggttccctttatgccagtgaggaaacagccagagaggttgagtaacttgtccagggttatatggttaataagtggttaggattagtaactaggccagacccttctatggcctgtttttatctctaagatgatccccagtatgttagacttgaaactatggatggagtgaaaaatattctctgcaaatacatcaacactctgaaagccattgttttctctgtttagaaagtagttgaaaaagtagtgagaaactagagctttttcttttctggtgttagtttcagcttcctaccttgaagggaaccttaaggcccaaaccttcttttttacatttgaggattctaagtccatgcatctcggaaactatggagacgggaacttcttgtgtgagttggagagcagttgtagaccgttatcatttccatcggtgcggatgctctttgggtggtggtggcatagaagatctgttttggttacctttattgacaagctctactgtgtgactggcagttcagttcagcagataggtttccagcactaatcttaggcactgtgatagattcccgagatgcaaaactgaagaaaataccttgagacaagtcagtgccatctcagatataatttcctcagaaatcaagattttagagcatttgatgtttttaaattagagtcctttcaactaatagcctgtatgaagtttttaaaacacttataaaaaatttatggtgattattattattttgagacagggtcttgctctgttgcctagctggagtgcagtggtgcagtcgtagctcactgctgcctcaaacttctgggcccacacaatcctcctacttcagcctcctaagtagctgggactaaaggtgaatcccaacaccctgggctaacttaaaaaaatattttgtggagatagagtctcactacattgcccaggctggtcactgaactcccagcttccagtgatcctcccacctcagcctctcaaagttctgagattctaagtatgagctgccaaacctggcctatatgaagttttaaacatttgtagaaccagttgttaacattgctttttttttttttaccataaaattggtatatgtcgaggaattctatcgtttgactatatttctattgtgttaaattttttgttttcttatatcaaaaatatttttgtaaatgtaaagaaaattcaagcagacagaagatggtgcaggtgctttctattatttaatagttcacctggccaggcacagtggctcatgcctgtaatcccggcactttgggaggctgaggcaggcacatcacctgaggtcgggagttcgagatcagcctgacaaatatggagaaactccgtctctactgaaaatacaaaattagccgggtgtggtggtgcatgcctgcgatcccagctactcgggaggccgaggcaggagaatcgcttgaacccgggaggcaaaggttgtagtgagctgagatcgcgccattgcactccagcctgggcaacaagagtgaaactccatctcaaaaaaaaaaaaaaaaaaagtagttcgccaccatagcatgttttctctaaagaaagctggttgtgcacagaaaagttctattttttttaaagggcatccttctagtaatgctgaaatataaaacaaatagcgttataggaaaatgaaacagcaggagaacgagagagtagaaaacagaaaggaagcgaaggccttggagagcaggcggtagtgaattcatttggcagttcctaaaacacagccaagtcccagtagcatagccacctaaattccctattttgctccttcttggaaaaaagttagcagtctcgagacttttacgctgaagtggattttaagttgtcagaagtgtcaagctgatttgcctttttttctctcttttattaaaagaaaagagatacatactacattcagacagaaagcatgtaaggggtcttataagtgtgagcatgtgttagtggattaatgggacaatgtgtgtggatggtgatagaaaatatgagagaactattgcttggctgataaatgaaataacaacaagaaaaatctggtggcccaatatatattggatttgttgttattctctgttatatctgctggttgttcaatctgaaagtgaaatctgtttctccattcattaatacgtgtgcttttctttgtatagagcacagaacaaattatttgttccataattatttttaaaaagcagaaaatgtgtttgtaacatttaagaaatggcatgggattgtcatagaaactcattctgaacactgtaaataaaaatggttggggattagtcacagtaacatgtaggacatcatgaaattcaagacagatttctttgtctaacagtcagtaagagacatgaagcgaacttgatatagttcatgagatattagcagttcagttccttcagagaaagagaaaaccatgttgcttcatattaaataagccatctgtatacaaatctcacaatttacttgatgattttagcaatatttgatgtttcctttcagagtcttatttccaaataatgaaagcttaaaaaatttgaaaatctctctgtttttgctactaaatctttagaaccatatccctccttttcttctttccctatcttattttttggtaatcttgaatagcattttaaaagttttagctttattctgtttcctttagttttcccttacttcatataatatgaataaaactgaacacattaatgataaatagccttcaataatactatatatttttaaatatttcaggttagaattatgagtctgcagtattaccattaacatctttttctgtttttcttttaatccagtatttagaaggaaattgtttcagggtactttttttctccaactctgtccaacatctggaagaacgattgcctgtctttaaatttggaattaatctccaattgcatactcctgctaggctgatgtttcagtaaattctaacgcatcagcctcagatctttgattccttgagcttttggaagtagaagttaaagtctgagagggtgtttcaagacttaggaaacttagtgctgtggaatgacctgtgcatctgacaaggcccctttaacaatgttgtgtgtcactgcatgttcttatttgtaatcaaaacagtaggtacaatatttcaataagggtaagtgtatttagacaaatgtagcctgataaaagtggataaattaccttttgtggttgagttaattagtgaacacaacgaaccttgaaactggtgggagcatgtgcaaagacatatgtgaaaatgttggtacatggaacatatggaaccatcttgtcttcctgcctgtgtacacaggttctattgtagtacaggtatatgcacgcatatttttgttttattccttgtagtagtcctacttgggatgtcctcacccacctttacttggctaacattatttatactttaaggctcagctgtaacatcatttcctcaaggaagctttcttttccccccaaggttaggctaaggactgcttccctgcctgcccacagcatccattagcagcatattagtacttgccattagcacttcctttatcataataaaactatttgtctacatctgtatttccagattgggctgtgatttctttctgagcagggactgggttgtattcagtgtttttgtacccccacataggggtgcatagaacctggcacttaactgtgcactcagtatctttgtttagctggtgactagatgagaaatctggattgaacaaaacaagaacttgagaagcttataatatggatcttaaaactaggtaacatataaaatagtttttgggcatttaccttaggactgaatttaagcctatgttttttacagaatgattttcctttctcaccctaccatgtcaatggatttctatttcttcacccaaatccatagtttcatattaacccaaaggaattattgacatgtaagtaattataattctgaaaacaaaggtctgatgatgctagacaattgatgatgctaaaccatttaggctatctgtttttccctttaagatcctggtcttgacttttatttgagctttttatctagaaaagatgatttggtgatgatggagtaatatagtaactgctctagcttatatgtgagggtataatctttataccaataataatttatcaagtgcctactatgtgctgggtaccctgctaggggaggaaataaaggatttcaatttaatgctattgcatttttaaagagcacaattttgattaaaaattgacccattctcttcagagtggacactcacattttttgtgggttttgaatcacatagtgtcttgctgtgcaggaaaagggcctgtcagtcatgtctttatttctcttgagcatttgtacgttgtatgtctgtcctcacttatcagggtgtttttggcatggttacttaatcctaagctctgagaggcacaggaagtaaaagaaaagttaaagatgacaattaaggtgttgggcccagttagatatagtgaagtcagaattttccctcattaaaactgttagaccaatttcattagacggaaatgcacccacatatgtaaatcttctttgtttaattggagacctattgattgtaggtaacataagcctctctaagggaaacagaacccaactgaagataagagtttcttccccccaacacatacagcattcatgattttatttctctaggcgtgttcattatcaaaatcattctactgcagactttcccataaagtgtttctgtctggccctgttttcatatctaaaagcttctagtggtttcagcaagaaatgatggaaacattttgacagaatatatatttctttttttaaaactaagatcttaaaattaaagagaaacaaaaacttacaaaatcacatgaaaatataatgctttaaagagactgagaataattgtcttcttttgtgctttcatagaatgctaaaagaaaccaaattctgatcttctttggtgagcaatcaccaaaaatattgcagtggggaatgaaaaatagaatggatttttaaaaaaacttacattctaattaggtctcaatgctgcagagaaaatagtgtaccagtgcaaactctacactgtggtataaggcacaggattttcccgctgcgcttccaaggatagggtcatcctattataactgtttaataataggggattgtgtgtattttcttatatatcttcttgcaattccatgtttctgaagtgtgagattcaggtcaaggtcaatgtgtggccagttgtttataaagtattaagaatctcatgaaggagaaatacagtttagatgtagattttcttacgataactcaaattatgtttaaatgacaaaaactaggtaggtattgaggaggtaaatatctctatttttcatttcttaacattacactacaatatgtgtaatatttagaatttgaattaggaagaactttaacttttttattccttagggtattactgatctctaaacaagatgtttaattagcagaattatagcatcttagataaaattggttatttttaacttaatcacgtagttgatgctacagaaatgaattcatggcctttcttgtggtgctcgtctttttcttgtttgatgttgctagttgaacacatctcaggttgtgagaagtgcatatttagatgggaacatcttggagagatcttgattggtagagagtaactttatatcagtgagtataatgcttatcagtgaaattctaactcatttaattattacttaattttctgattatgtttttgtatttgagagaagattatttccattatggcaaagtatggatggatggacattgctattgccatttcttgacttagcacacctaggaaggcattttgaaacatactttttaaaaaaagaattgcatatctgtgcacctacaacagtgggtgtgctgaaattctgacttgggttttgatgaaagaattccccaattcagttaaattcatccttgactgtcgtgtgccactcatgttcacttggttaaaaaaaaattgttttttggagattatttgtagaatctcggttctgtaaccagatattgaatattaccactggagggaagctttgaactcatttatcacccttctgccaaaccacaaaaatcctctctctctctctcatgcatctatctatctatctatctatctatctatctatatcttactgatttattcatatatatatttcttcatatatatgatatatgacactgtatatttacagcatatatattacagcacagctatttacagcaacctggatcattcattcttagccccttctcaagaatggaagtttattttaaaccagacataaacaggacataaaatgaaatattaaaagactggataatgcattttaagtcagacatacatttggatagctgttgtttgagtttgtccatgctggagttacctcctcctcactgcaccctccctgtttgcatggggagctgagattagattttaactacaaattattcacattagtcaaataaaaaagaatgacatttcccccaaatttgattattattgtattttcttggagaaaaagatcgtgttagtaaaataattcaaaatggaaatccaaatgtatttcttttaaaatttttcaaatctgttgctaaaaagctgtagaatatcgtggaaaattcttttattgtaacaaacattcctggtttaatttcttattttcactttatttttaatataaatatatatgtaacttataacacatagtatgaactgaaaatctgtgaaccaagaaagataacaaccaatacctttcatttacctgtgtgttcttttcctctcccattaccctgaaattcctcctattatcctgaattttgtgtttgtaattcccctcctataaaataaatggtttatcactcataggtactaaatatattgttcagttttgcttgtttttttaagttttataaaaaatcatatatacacacatacatatacatacatatatatatataaatacatatacacacacacttctgggaattgctttttttcactctacaatatgttcataatgtcatatatactgtaatttattattgtttcttgtgtaatattctgtgatggatctatagaaggtttccagtttcttggtcttagcaagtgctatgaactgtaacatgtcttctagagcaagtgtgtaaaagtttctttatggtatgtgcctaggacttaaattgttgaattacagggtgtgtaaatgttaagtttttttttttaagaaaagatagtgatattttatcttactaacaagttatgcctgtttatacgatcactcgctgtagcagtatacaaaaaattctgttgatctgcattctctccagaatttggcactgccagatttttctttttgaccaatcattgaggtctaaaaaagagtatttcattgtgtttttaatttgcatttataatttgattactaatgagactaaacatctttttgtatatgtatgagccactttcctttactgtggaataaatgtttttgtcatttattcatttttttctattttattgcttattgtttacttattggtttgtaggagttctttatagattctgcattctaatttttggccagtgtacgtttgccaatatattttcgtagtttctggcttgttttaaaattttcttcatgttatctttgatcaacaaaaattcttaattttaatacagtaaaatttatcaatctttatcacatggttattgcttttttgtcttgttgaagatatccttttttactccaagtttagaagtatatggtattttttgtatatcttttaagtgttcatctcacattaggtttgtattccatccggaatttgtgtatggtgtgaggtagggatccaatttcattttattctgtatgaatggacagttttcactttatcacttattgaataatttctctattccccaaataatgtaaaatgatacctctgtcatttattttttatatttgtgtatgtctgtttttggattctttgctctgttacactgatcaacttgtctgccctataccatcaccacaatttttcacttactaagcccttataatgagtcttgataaagcaaaatttcacacctctttttgaaataaattttttagttattctttacccctcactattccatatatatcatggcattactttgtcaagttttgtgaaacatcctattgggactttgtttagaaatatattgaatctacagataaaggaaattgacatctttttttaactatcaaatattattatctatgaacatggtatgtctcttcatttatttagatcttattcttggttacactgaattttatttttcaccaggttttgaacacttttgtgaagctgcttttgtaaattgtttttaatattttgtttttaactctaatttctagtatagaaatacagttactttgtgtatagtgatcttatattcagcgatatttacatatttttagccaataatgtattggtaaattcttttttgtttactatttcgataatcatatcaaatgcaaacaatgagaaagatgttcatttctattctatgcttttatcttccttacccttctcattgcactgagatctgcaactcagtgttaaattaacctgtgatagtgggcattcttgatttttttttcttgatttcctatttatttttaatccctgaatgaatcagagttaatgccttaatatttaaatattactttcgctgctcacattttaatcagagaaaggacaagacctgacctagttttgttaattttcctcttatttttaaaaattttatggtttggtatatgctaccataattgaaacctcagattctcctcacaaattactttatgccaagtggtatagtatctgttaattagtgggtaaatagtgtttttaaagaatgcagtcatctaaaatttcaaaatataaggctcatttgtatgaattaattattttaggtatttcagggaaaagaattaccatatttcatactgatgagattttttgatactgtgttgtgtggctcagtctcttacgttttgatttgaactatagaacccttaagtagcattctgttttttacaatttaaaatgtctggtttgcatgggtttactttttcctttttcctcatgtaatttttgttaagacttgaatagattactcttctaatcttgtgagcagactgcaggaagacaactattaagagtagaaagctattaagcagtcaggggtttattatgctttagtgttttgtttaagtctgttcttaattggttgattaatgtacgagaagtccttttcccccctccatctctacagatggcaaatggtaggtcccaactgtcattgttcacaaaaaaggttatggttcaaagtcaaagattcagagataccacaataatcaatcataggaacttgtctcagagtgcccagccaggcaaaagttaggcagagtagtaatatttactgagaatctcttatgagtattttttttttggtgtgttctttattttatttagaaaatattatttaattaattgaaatgcctctgaatttagtgacaagcatttaaataaatatgaaaaataatggtcaaaaagttttctgtttatcggttttatcagatagtgctagaatacataattttaaaatgggtgtaacacagaaaataacattcttaatatattgagattaacagaacattttcaaaggaatacctttttaccattttcatgtgaagattatttataatagttaacttccttttttaggaggaagagtagaattatgttctggtattgatccacaaagaggatttgcattttattcatactataaaagtacctttaatggagaccttgtggtaattgaatctatactgtgtatcactatcaaagtatctttttaattattttatgttatacaatttaagtcatggaaagggggatgactgtattgtatcttttaagtataatgtatagcctttaatattcttaaagtggatgttagttaaggacaatttttagttgagagagagtgaaagagagagagataaggggggcagagaggattccattacattcagcacagtatgaaactaagtccaaaggagttttgttaattaaattcaattgccatccattagaccagtggaatgagatgactctgcctggtgctgacacagcacaggtatgcaatttggctaaatggccatttccaaaccatagcacacatttgtctacttgttcacttttttttttttttacatgagagtttttactcttagaaaagtcaaagagtaacccagtgcttgtcgaggggtaaaggtatcatttttatgcagcatattgtgaagtgattaattttttaggtgaaaaatatatagttcacatagagattatttgggagaaaatgattttttaaaaaatatgcagtatctgcgggcaagcatacgaacaaatatatatacacacacacgtatcagtatagaaaaatgtgtacttttaaaattcagttgtcttaatctgaagctatttgagtcatattctctggattttttaaagcatcctacaatctgtatatataattaggggaagttgtaataattgcaggagttataaaagcgaaatttaggtggtgggtaagtgtatctacattttggcataaatcactacttttagaggatttatatgtcagactgataagtttcttaccatggtgaaatgacaagaataccactcaggcattggctgagacataattttgacagccagcaagcttgcagtgttgctgagtgcacagatttccacttcctgccaagattaaaattggcaaaaaccaaaaaggatattagggattgtcactttaagaagaaataacatgttaatgttctgcatttgcttaagaaatgtaagagtgatctcttgaactgtagtctgttgaaacttacaagtttgcaatcaatagaagagtttgattaatatgagcatcaaaaattaaaataagtagaggctctctgacacttgttagaattaagactcattataggtttacttaataggacataattactttccttctatataagatgaattcttcacaaaagctatgaaatagttttcctcacagtccctgaagaacaaaggcctactttaagtttgtagatttgaagactgaatgcttgctttacttcctgaattttcttattttttcctgtgtgagcagatggtttttctttttataagttgccagatctttcctataacaataactgccattattgagaacctactgtgcgcttattctgtactgagcactcagatcttcagagttttttcttacttaggactttttgtttaactctaggtgtaaaaatgaagaaaaaattatatctcatgttgtgaaagagtcagactctgaaatctgcttatactttgctatttacagtaagtacttttgaaacagctgtagacgttcaaatgaaagtagcaatgtggagtggggaatgtgggaacattcatttgtgaagactttgcatttcttcagctttatagccaacagaaaaggagattgttgtgcattctattaaatactgccagtatgattaatttaaagggttacattttattgaaccctggtgtagatgttctttgtcaacccacattcacagctagttagagtgtgtgtagcatttatcaaaactttctggagcccctctcacctcattagcatctgaatctctattcagcagttaatgtccgttactgctagagtgctcaattcttgttttcaataagccagttgtaaaatgtcagactgtcacttacaatataaaaaaccaaaaatgatggtatttgtaaaaatgttatcacctcataaaaacaaattgtaaagacatgaaagtgatcttgctatgctggtctttcagaagtgagttagtacagctactttaaataccagttgtgtagattcccacacttttctaccaatggagaggtttacacaagcataatttaagttacaattacactaattaacatctcatttgcataaattgttgaagtcaaaacaacaaagaattgtctaagaagcttaatcctatttgtccaaaatagaaagattttttttttaaaaaaaaaactatgctctaaaaattggcagcttaagtatgtctttagtatgttgagctgtgtccttttaaaaataaatgttttcaattttcttaataatatatttctctattctttttagaatccttcatttttagtatacttttaaaattgaacacacacaacactttggttcctaaagtaatgataacaagaaattaaaatcaaggtacagtatcatttatatgtagtagtacagagtaaccatgacttactaggtgttatgatgaaggtgtatgtgtgtgtatatgtgtgcatgcatgtagataagtgtgtgcatttgcacacataagagttttaagctgctcctgtcatttattgatggtcaaaggtttcttttggctattgctggactcttaagattgtcttgtaattgtctttttgttgttgttgaaaattaagggtgtatattaaaggtagtttttacccagatcttatatgtgtgatagctcacatctgtaatcagaaacttactgtttaatggccacccaattgccattagcttcctagagggtgatttaataaactatcttctttaaaactcatttaaaattagagacatgtttgcatacaatggattaatgacgttttcatactaacccacaaaagtctgctgcactttcttttgtaggcctaacattcatttcatatgcattgattattattgttgaacttgcattaattacatcgtgcatatatggacatacaatgtcatctgcagaatttaggattttttattgttaatttttatagtgactgtggattgaggaattaaaattagcatgcttcatttataatagtatttctagtgtttcattagccctaaaaatgtgataagatcaggaataagattggaatgaaaatttctccttaaaatggtacgtcttttgaaaacattttgtttataatatatagctaatcctaatttattacagtctttcaatatattctttaatttgattctataaggcttataaatcactgtctttgagataagtttcttaattcacaggtttgtatcagttgtactaggtttggtgaaggatgtcatcctagatatacagtgtagacgtgctttatgaaacatacttcttcttagggacatttttaaataccaaatgagaatatgtttggtgggccaggtgcaggggatcacacctggaatcccagcactttgggtggccaaggcaggtggattgcctgaggtcaggagtttgagaccagcctggccaacatggcaaaacccagtctcttctaaaaatacaaaaaaattactaggcgtggtggcaggcacctgtaatcccagctactctggaggctgaggcaggagaattgcttgaaccgttgaggcggaggttgtaatgagctgagagtgcaccattgcactccagcctgggcaacaagagtgaaactccatctcagaaaaaaaaaaaaaaaaaaaaagagaatatgtttggtagaaatctgaaagagaatttatgctgaattgagaccatttggaaggcttcttgggtaaaactgatttgagttgtggatgaaggattgtttggaaatgagagaatgagcagaggccatggtggagaggagagaagagttggagagcaggtgaaaggcgtgagcacagctgcagaagcagacatatgcacgatttgtcctagagcaggtcggttggcgagtttggttagaatggggggtttacatagcggagggtattgaatgccaatttaaagatctaggcagtaagaatcatgtagggtttttgaacagggatatgacatgcttcaagaggttttttttgaaaggattaatcatgaagtccaaatgtagggagcattgaaaacaagagtagagtgacagacagtggaacagtagctttgtctcggcacaaaattataaatcatgatggtttttatttcctgtgccctgagtaatatcataaacaaaatatacaaaatggcaagagcacttttgagataatacatggtttctgattctgagtagtacttgaaacttcaaaaataacattatacgataaaacacatgttatttctttgttatcttaaaatagcaacaaattctatatacgtagaaagacctatgtagaaaaaaaatgaacattctagcctggacaacatagcaagaccccatcttaaaaaaattttttttttttagtcagccaggtgtggtggcctttgcctgtagtcccagctactcaggagactgaggtgggaggatcacttgagcagggagattgaggcttcagtgagcctcagttgtaccactgcactccagcctgggcaacagagcaagatcctttctcaaaacataaagcaaaaaacattatttcctttctcctttcagaggaaaattatttccagattattttttcttatatttttttaaaagttggctttaagggagcacgtttctctttgagggtggcctgtttcattgtcaatatttgctcttcattggaagctgaggtcatgtcagagttactcaggagaaagacctggacttttcttcttatcttttaatggtttatcattgataagtttggacatggtatgcatggtgacttttttcactcttgtcacttttctatatttaccttgttcatagtatgtaatctgagtgccttcaagacactagaaaagatttgatctcaaacaccacattttgggtattttaatataatcaggagaaaagtggatataatattcagacaggaagctggaatacactggcataggtagaagtattcatttcaacattaagtgaatatatatatatttgttgttgtttgttttgttttgtttttgtttattttggttagaatctcactctgtcacccaggctggagtgcagtggtgcgatcttggcccactgcaacctacacctcccgggttcaaactattctctttgctcagcttcctgagtagctgggattacaggcaaaggccaccacgcccagctaactttttgtatttttagcagagacggggtttcaccatgttggccaggctgatcttgaattcctgacctcaggtgatccacccacttcagcctcccaaagtcctgggattacaggtgtgagctactgcacccagccgcaaatatatattgataacttactggaagtaaggtaacatggtacaggttggtagaagaaatatagagaaaaacaggaagctgggcttcccttccagatgtccctagattcaaaggggaagaggcaaaatgtattaaatgctgtcttacacatagactacaagggatttacttggccagggagagaacagggttgattctgagctggagagaatgaggatggcttctgtgaaggagatgacctaaagcagggcctcgaaggttggcaagggacttgcagggacagagcatggagatgggcatatgtagcgtgtgttctggacacggcacgtggaggcagagcacacatgcatagagtgtgtaatgcttcacttccatccttgttccttcagcaagcacccgtgctttacctcgtgctgacccttgagcaaggctgcccgtgagaaacttcccaacttcatgggcaatgttgaaaacatttgtccacttgcccttgccccagagagggagaaggtccacatatggtgcctttgacatgttatcccttggcataaagtttggcccaaatgtacatttgaaacctcacgttccctcgataaatttaaagtatgaaacttttgaaactctaaaaaggtggtgaagaccacagttctccctgttctttttcttctttcactctgcagctggattctgcctttcctccagtggttatctgaggagtgtctgccatgtcttctgtttttttttttttttgccttgttttgaggagtccccttttttcctcccctgggagagtttaaatatgatgctgatttcttgtcatcttagggctcctcagctacaacaaagttaaatggtataaaagcaaagcccaaattagagaccctaaaataaccttggagaaggagagttctcagttatcagtagaattgtcttaggaatttgaggaagcccttgtatacagtgaaaatgagaccctaagttaattaacaaaatgaaaataacttacagtacatatctgccacttccagtactgctataaataattgcaagtgtaaggatttttagtgcaaatatgcagaaaacatgggcatagaaagtttagatgaccttaatgaagaaacagagttggctctgaaactgtgcttagcaggaacaacgttttgtgcacttgataaacactgtcagttgttaaggcatcttctgataggtgaaaagcggttttttgatgcagtactgcctggcatgcatcttctcgatggtctgttatcttgtgggaatgacattcgttaagttgttttctgtgtgcatcccacccaaataaagaatgtttcatcagcaaagtgaattgccgtatagtcatcagactctagaaataaattatcaacgatgactgcagtgggtgaggctgtttgtttatcacatcacttgagaacagagtaaagtgagtttcatattttcctgagtcttgaattctcattttagacatctgttcagaagctttctaagccatggagtattctaaatgagcattttgttaaatggatgaaggaagacttagttttccattgttaggtgaaacctaattaaaaattaaataatgaccttgtgttggcttgtaaattccttatttcctgcatgtgtgagtgtattttgttagaacattccattttaaagcatgccttttttatgacaagaaatacttttaaaatactatttgcttttgaaattacagtagggaatcaaaggatagtctcttgttgagaggaaggtattagaagcatgtagctttatgaactatattttctgtgaatatagcagaattagtttaattgttcaatttcaccctctccagcatgattgcacccatcagggcagttaacagagacaccgctatttgtgttatactaggaattctttataaacttaataaatgaaagctttttctcttataggcccgattctctagtggacttctggtgaaattatgtggctaccttccattaatgttaatggaggttatggatataaatccctccatagtgatggaagaatgagccccagagagaagaatgtttctaatgaatcactggattgtgatataggattaacttggtgtccctaataccatttttttttcctcctgaaagtttaaggtcttatgtttaggaactagtttctctccaccttaatcctttattgtcaagtctgcaataatgttaagaacaggaaaaaaaaatgtagattcctggataggcacagtttttatattaatgtaactatataggcatagtttttatattaatgtaactatacagcacctatttttgtgttttactattacttggcagacatcttgagtgttttacaaggttatcgtatatttcactaataatcgttgcttgataatttggtgtcctgacagactgcagtttattatttagtattaaagctctcaaatgtatttattgagcacctgctgggtacaaggctttgagcttagtgatgaaagcatatgacatagtctgtagcctcaaattttctataatctcgtgataaaagtaggtaccagttcattagttgctttccagtggggcacaaattatggaacatcgtctggctggccgggcgtggtggctcaagcctgtaatcccagcactttgggaggctgaggcaggtggattgcctgagatcaggagtccaagaccagcctggccaacatggtgaaaccccatctctactaaaaatacaaaaaatgagccaggcatggtggcaggcgcctgtgatcccagctactcaggaggttgagacaggagaatcacttgaacctgggaggtggaggttgcagtgagctgaggccgcaccactgcactccagcctgggcaacagagtgagactctgtctcaaagaacaaaaaaaaaaaaagaaaagaaaaaaaagaaatattgtctggctaaagaaaggaaaagaattcttattcagaatcagcatgatcacttctgggaatctgaatggagaaaataattctatatgtaatgatgttttcaatcaatattattttaggtggtttatttattcagccaactgttgttggctgcccactgtataccaggcagtgtgctagatactgggagtacagcagtgagcagcacagagacagccctggtctcatggagtgtgcactttgagtgtgggaaacagtatgtgggtacataaacaaaataatttctaatgtgatagatctctaaaggaaacaggcaaggtgatagagaataactaagaggacctgctttagatgggaatgtgaaggatgaggccgcattcatactaagcatccaagtaaggagaagaccaagtgcaaaaagtttggtcgggatgagtgtgtgtgtgtgtgtgtgtgtgtgtgtgtgtgtgtgtgtgtgtgtgtgtaccagagactgaaggccattatggctggacagttaagggagagtgacctaaataaagttcatattggcgggagagcagcttgccacagggttacacagaataggcagtggtggtaaaggcagcatttgaatccaggtccatttggctttggaatgtgctgttatagcagcagagggcaagtgtgaaacataattcaaggaaataattgctgtagccatccagaccagaggaggatcgctttgatctaggaaaacatctcagtagtctttgaaaaaatgtacagaatatgaaagatattataggtcttttcctcctataatacaaccaggaaattattcaggctaattttttcagaaaaattattacaataaattatgatctccctttgaaaggtataatgtattcaaacctttttaattagctaatcttttcctgtgaaatcttaaatatttgcacgtataattggtaattttagcttttatgtaggtatgtttccccctggtgttacttacaaaacctggcttactcaaggcccaaagtccaccccactagtaaactctctcgtctctgttcctgtgccaagtgctcttcctttgttaccaggtccacataattaatagctttatcatatgaggtaattcagttactcagcaaaacaaatgatatacacttttagaaatagctctagaaagtaaacttgaacgtaaaattgtttagtaagaggaaatttctgtttgtctttaattaagagaaactgtatggaaatgtaagctaaggatgcattaatcagagaagttggcattgcactgttcttcatttttatttggcatagattgcatgggtgctcattaaataatttgtatgactgaaataacttgtgatagttcttgctaaagttttgcatggactcagactaaagaaactttaaaatttgaattaaaaaacattcaattcttaggtttgaaggtttgagttacttattataactgaaaatctttattatcaaaatgtgtgttcattatagtgtttgcttgccttcttgggtgaagaaatacttattatgagagtatgtagattttccgtgaagaattagtaatcatgcatcaggttgatacctggtgagtagatatttgtatttaatgctcttaaattttaacagccttgcctctgtatgccctgctcatctgtgtcttaccaactttgatattgtttgaaaaataaacatttgaaggaagaagtttgcatatttagagggttggtagttcattacctgcatgtaggttatgcccacgtcgcaaagaaatctgatctatatgggtaacatatttggataatcaaggccaaggtaaagggattcattcccccttcttgaattttatggtttctgtatgtcaaaccagatttcattggtttaaatcttgtggtgtacacttggccattgatttggtttgagctctgtaatatttgtaattatgtgagatgacaagattgaattaacttaattgtagagttttacatagtgtctgtatcaacatcctaataaaataatatgaaattcaataagtaatgccaagtgggacagtgagccactcacataagcttactaaacttgatatattcttatggcactcctccagaatgtagaagaaacacatttatctaggtgattagtattctttctgtctgccagatttaaggattgtttggaaatattgttagaatcaaaatcaacgtttgttactacacagggttgagcattccaggcacactctggtcgttttgttattctaatgtccacttatttcatgtctgccgtgaccgtgacagttttcagtcacacagagctgccatcaaaagagtgataagcttgtaagtgaagcctttggggaagcaataaagtcatttttctggtcccatctcaaaagacattattggaaatttatttaaaagtgatcaaggtagcacatacgaggccttctacagtttgcattttggaagttattaacaatctgcagttaagtccatttaaaactgaaagtggctcttccacaaactactttttaaatagcttgctggttctaaatttaaggagaatggaaatattggaaattaaaagtcaaaagaaatttctggggcataagatcctttcaagtttacaatttctcactttagatttaaaacttgaacacggccatactttgcattttatgatatctaattagtgccttgtaatatattttgtgaacagtatctgttagccataatatcagggacagtttaaaaaatcttcagtacatttatgataaaagtattagcattgtaaggtcttaaattgacatctaggacattaggaaatcaaatttaaagcattgcattgtctgttactcaatggagtggactgaggacagcgtgtgacttgtgtactgcaaatgatgcaatagctaaatatcctagtgtgagttaaggttgattaagtgatcatctttaactctgcttttcccagggctctttgaactcttgttttattaggtaatatgctatgctgttattttattgctgtttaaaaaaccttctcttttgggaaagaaaacatgtgaattctttggtttctagatagaaattagcaatcttttgctcggaatgtaaaagtatgctgtattatcacaaactgaccctcctcctccccaagaattctagggagtaaaatgcgtgcacaggaaatcagaaatggatcaacagagttataggttttaaaaaaactgccttgcatttttgccctggaattaattttcagtgaaaattaaaatattttttctgttcatctggaatcagtttttacttcattagcaggaaatgctaaatatacattcagcacaaatagagttttctttatgggacacaggatttgtactccataggtagatgtgtaacataaaagaatctttctgctctccttgtaattttctccctcttaccctcaataagttaaaagaaaggaaaattttttaacctaacctgttaggaaccattttagtgtagcctctagtattttgataaaacaaaatgttcactagctggaccctggtggtgatagcatgaaggactggggtagaactctctttttcattttcttttaatcctgaagttacatcactgtgcagtcagctcaacttgtgtcattgcagtaggaagatatgtaggtggaaagctattccagaaggaggctggagctaccttccctgacaagaaaaaaaatccaagcaaatacatacataaaaagacactcaaagcatcatagaatgttatagttataagggaccataggtttcatttaacgcacattttagcatccaggtcctacataaaatgtatattttgtgattgtgaatgggagttttccatatttaaaagttaagtttattaatgtgtcattttacccatcatgtatttgtggccatttttttaataccacgaatgggaacatcctgtatcatagtttctttttatttgtctggatgcttgtgtatgccttttagtctactaatatgctcacatgtgcaaactaacaagagaagatggcaatccggtattataaactggtaaagagttatagtgcagtaagactggattaactgtgctttcagcagtcaagttgctgtaagagttatattgtaaagttttagactaacttgcatgtatcccagagtttgcacggtgttgctgagtgtctcgttagacatacaccctacctactattctctcctgacataaaaaaaggtggtaattgagctggcatctagaaagtggtggtagcactacagattgtatcactaatcccaaacaaaggagttgcaaaacacctttctttaaatattttctcttcatggtgcaactggggagggccaaattccagccttaataaagttttaacctgaccagttggtagaaatggcagagtaatagaatgtttggtccagaaaccaatgtgtggactgtgtctaggattagactctgcatttctgtctgttccagatgagctgctcatttcttttctttttttaatttaaatttttaagttctggagtacgtgtgaaggatgtgcaggtttgtttcataggtaaatgtgtgccatggtggtttgctgcacctgtcagccatcttctaggttttaagcccagcatgcatttgctatttttcctaatgctctcccccacccagcccaagctcttcatttctactcagtacgtatgtccatgtatccaggagaaatggagagttctacttttggattcttctagagagattccctgtgggacttctaacccctaatcagtattcttccgttgatgataatctacttaaatgatatcctatcatcagaatccctttatggaattatctttgtattttgcacgttcttccattctagcttctaaatgtaatttttcctcccttaaatcatttttctaatggagacaacattcaaatacataggacagagcccacagccagggcgggaaacctgcatagtgaggctggttttgatacgcaggccatcctactggcagctgttttgtaggcagcttcatgtaatagtgcagagggtacagagagagagacctacactgtgatttctttcgtttgtatattttgtattgaaattgtagattttttggttggaatttatttgagatgattcaagacattttgcatagtactcaaatataggtgaaagaatttcaagtttgctcattttggcataattctaaaacaaaagtgttactgttggatctgggcatgtgatgggtgaatgagtgtttcagtgaaatgacataagtctgtataatttggagggtaatgatgccttagaacaagaataaatctggagcgatggaaaggctccatattctagatgaatgcatgcttcctcttatgactctgaaaaataaaattaaatctttatttatacaaatccagtgaggggggaaggctacatgggtttggcttaatgatatatttcagaacaggaatattagccttaacctctttcctcacattgcatatgatatttaatccatcatctttgttttaaacaaacaatacacaagctgttgctggcattggtataaagctgatggtccatctggagagcaggaatatagatcaggaaaataagagaattgaaattgggtgcaagggcagatttgcatgtgtaaaaacctttctgttttaccagcttttatcaaattatttaatactgggcaaaacagattcctttttcttgaagctgagaaagatacctcctcctagaggaagagttgcttcagtgttctaggaagaacaattggttttgaaagacaataaaataatgagccattaggatcatgttttgtaatatagggagttggtgtggaagaggagagagaggactgctggtgtagtgagttcttgttctagctgtgtatgatcattggccagtcgttcagcttcttggccttcagtgcttcctttgactcaagtcaattcagcaaccatttattgaggcaaatgtgaggatgttctgtgggctacctatttagctaggcattgtggatccatagacaagtatgactgggtcctatgcttatgaaactccaggtcttacaatggaaacatactgtggttgaacgatgtagagagtgttgtatatgagatatgggtgcacaaaaacaggaaaagtcaattctgtctggtgtagacaggaagaattgtattacaaatccttcttaaggattttctattttgacatgcaagaggagcaggcattccaggtatttgaatactgagagattcaaattatcagcaaggttctttccagttccacgtttgttgtgttatcagtgtaaaattatttgaatagctttccactgatgagttattagctgaaaagtgtttattgtcatggttgaaagaaaataataatgaaagaagaaacgattacctttagtgataaagttggggccggatgggacgaagcagtgcaatttttttctttataattattcccctatttgaaaaatcaacttgtatatgaggcagcaaacaccttgcagagcagcattcccttttagtttcaggacgtggtggtggatggaaccactgtaacctggcctccctccatgagaggagggaatccaggtggccatgttgaaatgtgcctgtgtgcagcaaggcttctgaaatgacaagagagcccagcagcttccaaagcagctgtgactctggatctcacccatcatctctgcttctcactgttagaggagtgaatctgtgctgccttaggaggcatggaacctgggacttttcttccttgtttaatgtttaattttattaaaataatttgtaagtgatagatgttgatctcgtgacaaaagagagattccctctttataaaactattctaactaaagatcttttgtaagcccatgtgttagaaataaaacttgaatatccccttttttgttgttgtttatgaatggccaataatttattcacatgtgacatttgagctggcattttttcctcctgagatgacagtagcgtccgctgtgttgtattctaaagcaaagtcagaatagccctttgcttttgtcccgattagtagttctgttttgccttcttgccttttccatttagaccttatggtatttcctaaaccttagactgttttgaaaggctttgattaaaatatgctgataaaagaattcgataaccaagttaggaacgacaaggctatctggagaagaccaaatgacttggcagcctaacaaattctattcagagcacacaaagagatcctggaacgttttatagggactcgtgtgtggggaatggtatgaactcaggttacctgcaaaatatggtgtcatatggaaacatttaagagcttatggaaaattctttgaaataaagtggaatgagctagcaagcatattatacctaagaagaaaaacaagagcattcattctggttttttaaggtagctgctcaaggaagggagatagatgaaagtaaattgttttctactttgtacacataatatagaagagatcacctaagcctagttttgctaaccagaccctagacttaaaattagaggtcatgatgtctagccaccttcctctgtaggaacctctcgtgataccctgaaagcctctgcttaaatacttccagagaaaagtgaggaaggtaggggtggggatgaaggtttgcaggaactcatgttgagtacctagtatctgcaagatactagagtaggtactttatcgccatctcatctgacttatgtatgagtgcaggttttataaccctcaagtttacaagtgaggaaactaagtttatataagtgtcacgaaacttgcttcagttcagatgtctagcttgaggcaaatctgaaattagaacctaggtccatcttcttgcattacactaaactgcctctcaggatgagggagagctcccttcatggctaaggcaacctcttctgtctaataatgcagattctttaaaaattctttcttttatttaactgaaatctgcctcccattaacatctctcattggtcctgattcggcctcaggaggatcacagagctgatgcaattctctttccttatgcaggtatgtttgcaaccactgctgccaaaatggcctctgccatcttttacctagttggttttttttgaaaatgaacacacacacacacacacacacacacacacacacacacacactcacacacacacactcacagaaatatcctcttattgactgcaatccatctttcaacatatggagttctttttgaatactagaggtatagccttaaagaatatgagtatcagaagatactttagtttcatctttccctgcctgattcatcagccaattgttagtatgccatcagtcaagccattaataaaaataatgaacaaggtgaacaggataggttaacttgtagtctatgtataagtttccgaggttgcatgcagaatttagcctatatgtgaatttttctggaaaaatggtcagtaactattgtcagattccttttttttttttttttttttnnnnnnnnnnnnnnnnnnnnnnnnnnnnnnnnnnnnnnnnnnnnnnnnnnnnnnnnnnnnnnnnnnnnnnnnnnnnnnnnnnnnnnnnnnnnnnnnnnnnnnnnnnnnnnnnnnnnnnnnnnnnnnnnnnnnnnnnnnnnnnnnngctctgggtgacagaacaaaactcccatctcaaaaaaaaaaaaaaatgccaggtagagcagctcacgcctgtaatcccagcactttgggaggccaaggtggatggatcgcgaggtcaggagatcgagaccatcctggctaacactgtgaaaccccatctctactaaaaatacaaaaaattagccgggcatggtggcgcacacccatagccccagctacttggaaggctgaggcaggagaattgcttgaacccgggaggtggaggttgcagtgagctgagatcgcatcgtgtcactgcactccagcctgggtgacagggcaagattccatattaaaaaaaaaaaaagtattgagaagtactcagagtagagaacttactcccgaatgaatatactaacctctttgaggagagctccccaaatgaccataaattcatatagctcagccatcactagaccgtgtatttcagccagaagatatggtgaatggtcttgtaagatgcctgactaaattaaagtattaaagtatttcttgaattctcttgatattcctggactttgagaaagaataattatgcccttaaaaatggaaaaagagactgcaatattgttatacaggccttttaaaaaaaaagtatccttaaatttttagttacagagttcacttttttcccctacttttctttgttttagattataagcccaggattgttcaccagaaggttaccctttagtctgcaggaacctttgaaaacagatgtggtattgaagaatatctctgtaagcccagaacttatccattgtataaagaattttattttccccagtagaccgggagctcctcaagggcagggacctttgcaagtctttgactccctagcactgaacccagcatctggcaaatcttatttcatgtgactttattttggctgaatggcctaaaaatgcgcttgtactgagcacctaatacatttaatttaatttttaaatttttattcaataatatagacatggagtccccctatgttgcccacgctggctcaaactcctggcctcaaggatgttcctgcctcagtctcccaaagtgctgggattacaggcatgagccactgcaccaagccctaacacatttaataaattgtaaggaggaagaacagtggaccgcagtgagatatggtctacagggaaaatgaagaacctcttcaaaaatgatgatcttcaggcctgtaatcccagaactttgggagccgaggcgggtggatcacttgagcccaggagttcaagaccagcctaggaaacatagcgaaaccacatctctaccgaaaaatacaaaaattagccatgcttgtagtcctagctattaatacgtgggaggctgaggtgggaagatggtttgagtccgggaggtggaggttacagtgagccactgtaccccaacctgggtgacagagtgagaccccatctcaaaaccaaaaaagatgacctttattatgtttgacatttaaaaaaatgtagccaaagtaaaagtgttgattagcataaccccgatcacatgttgttgttgaaaatgagcactggcttgcataaaatggacattcatggacatgaaatggacattaatgattttacatatgttaagaagagaattttagacttgagaccttagggagatctgttgatagaattccctatgctctacagataaggatacttagtgaagggactttcctaagctcacagacccagaagagtagtactctttccagccaatggtgatgcttacttatgtttttttttttttttttttttttttttgagacggagtcttgctctgtcgcccaggctggagtgcagtgacacgatctcggctcactgcaagctccgcctcccagattcacgccattctcctgcctcagcctcctgagtagctgggactacagacgcccaccaccacgcccggctaattttttgtatttttagtagagacggggtttcaccgtgttagccaggatggtcttgatctcctgacctcgtgatccgttcgcctcggcctcccagagtgctgggattacaggtgtgagccaccgcgcccggcctacttatgtgttttagaaaaatctttaaaatgttaaaagatgacaggtaatttctagaccatatgaagtagcccagttgtcccaggattagtttattatgtgtatatcagccattattttacagagtcatctcacataaatccacacaaccttaaaggattaaaggatggtttctgtgcaactgaaacatatgcacagaatgacaatagtcgtgatactttctttattcttttttttttttttttgagatggagtctcactctgtcgccctggctggagtgcagtggtgtgatctcggctcactgcagcctccatctcccagattcaagcgattctcatgcctcagcctcccgagtagctgggattataggtgcacgccacccgcctgggtaatttttgtatttttagtagagatggggtttcagcatgttggccaggctgatcttggaactcctgacctcaagtgatccgcccacctcagcctcccaaagtgctgagattacaggtgtgagccaccacgcctggccagtcatgctactttataatctgaagttaccagttctttgcagtgtttcacattaggggcattctccaaagggaactttagagataacaaatatgttaaaaatatcgaataaagttagagatgtggggagacattcctactcctacagagagcaaccataccttcctatagactgtgcactgaagaaagggcggaggggatgcgcctgttagagttagaatcttggcttgataggcaaggaaattgacccggtgtggtggttcttatattggtaagaagacccttctttggtttctttttttccagatagctaaagtcaatgtcagtgattgcttcaagcatgatagtcttaccagcctacactctaagcttttcttatgcttccagaatgacttactcagcaatcacttctactttgtattaaaacagttttggttattcaggtaggaagaagagaaaaaaaccaggctgtttccagttgtctggggtttacattatgttacctctcagactgttagtgaaatcagggagactagtggtttttacggcatcagagataccaaatgtataacagacagatgtcatcttactctttttaagtcatggacaaaaagacagacacattgccctgtaactttcagatcttctgtaacctttttaaacaacataggagagaagttggtacttgtacccaagggaagagaaagttaatgagtagaaaagacagaatttatttaggaaaacgatggaattaagctctggacaaaacatgcatcagtgatgcataacatttttgttaattgggtcttaacaggtttctgactcatatggtaatcattgtagaagtgggtcttactagaccacgccagtggcaaatcgcgaagctgtaagaactcttacctccctgtgtgtgtgcacctgagtgtgtgggggggcgtacgtttctgtagcttaatttaggttccacatacacttcagtggttaaacctgagctagactcaaatagtttgtttccattaagaaaatgaatcttttatgtggaccaaggtcaggttagttaatttgtttgcttttattggaataacttttcccattccaattcatcacttaattttaagtggttctactaaaatacccattaaagtcctttacatttctcacagactagggctatgacagattcataagacgtttcttttttcctcaaggcacaaaaggtagcttttctggtcatcaacctagtcttccttgttcctaatttcacaacagtggggcaacattttatataataccaatatgaactctaattgcaaagagactaaatgaaatcttcacacgaagcaagattaattaaaatataaaatgtgcttgactgtggtaaaacatttcttttaaaaaaaatagtatgacttttttttttttttttgctaaatctttcttttttgtacacctcaccctcttcttcactgatgcattttccagcaactggaagttcactctggctaggaaagtaactaaatgtgatgttatcattctaattagtgattacaaaagatcaattaatgttataattaaaaacagtgtctagatctgttgtttgtagtgaataaatgtgacaattactttgttcattgacatagatgtgttgaatttcctccctagattttaaggggatgcattttagtgctgatgtgtgcatttaactgtggacagtaggaacaaggcaagcatattaggggaagagtagggcccctaatgtctaagctacagacatattttagcatgcttgacacctttccttggtatatgatgctatatcagcaacttgtactcattggatctggagcctctagcttttaatattttatcactaaatgcttaagtgtttatgttgcaaaaagaaaaggaaaaaaaaaagattcccacttggactctcaaaccatgtgaacaggctactctatgataactatgtcattaatgattttggtttcatttatggcaataatttttaagttgatcagtcaggatagtaagtatgtgatttttgcagatctggttgaatttttttctgatacagaccaagctgtttttcatacattgaagcctgggaaagctctgttactgttaaaagagtaaccatatctcttcactgaattgttgccaagcagatgtagacttttggagtgtgcccagaaaacctctacagctgatactttggtgacttgttcctactcctggctttactggcacctatttaaatagcagaggaacataattgtgttttggtaggtcaaaattttatacacttctgtagaaaaaattatatataggtaagccaattggtagaaatgaagtaaacccaatttgcttgttgagattagcactgaagatatgctaagctttggttatgtcatttggtcaaaaaagaatgaggaaaatccctcagaaaagttatctgagagatcagcactgaacgtcaagccagcctgtccactcccattactaaaagaaatctccccttttaacttcatcccataaatggatcatgcttcctggatccacccgaggaggacgtggtttagttttagattcttagattacagacttccaccatcagtttcagtattcttttcacgatattaatgttatgaaaactgttagaaatgaggaaataccgccatgtcaggttcactcatggatcaagaaatgagcattttcttaaacatcagtccaaaacaacaaacctcaagtaccataagttcagataacttgggagcagttgaaatcctttaagccacaaagatagtgtcttttggcatggctggtgaaagaaggaagctggttgaattcattgactaactctgttgctggctaaaaagacaattaaggagaaaagggatggaagaagaaaagaaccaaagaaactaaaatctgtttctttttcaggaggagttggaagatgaggagtaacacaacactttagatatacatgttaaaaacttataacaaatcatagatcatactaaaggattaccgaagtttagaacatggctgagggtatagatgtcagattttcttacacaatagtgggtcttttgtttcagagttcactcttggcaagcaactccctaccactgcgttaatttcctgtcgatctttcattcagcaacagacctagagatggggagcagacactgccccccccacccaggctttttaagactgtgctttgtgtagattaaaaagacgaaggaaaaaagaataaactttttccaaacaagatgtccatgtgcattctttaagatcctgtgtgtgcttaaaacgatcctgtaaaaaagccctctccataattttgaacctctcctttttctaaagacttttataggcatttttttttcttcttctcagcatgtgaaccaatgtgtaactcaaatagatgttactttgctgtttacttagattgttttaaaaggctagctgtgtggaggaatgaggaaggaagggaggcgggagtggctggagtttttttttttctctgttgacctaatgaatgcagttcttaaaaaataataaatatttatatgtggtcttaatttttaatgagtctcataaactggctggtatagaaaagtgtatgaaaagccatttatattaaactatagttattataaatacatgcatatgtacactagaatgttttatgaggaagggaacttactagtcttgttcactctttgttttcccagtgtctagaacagtgcctgacatacaactggtactcagtaaatatttgttgagtgaacaaaatgaatgtaaattgacagcattgcctagtgggggtaccattagactagaattcagaaaacttggagtctggttccatcactgccattaatcaagaatatattgttgctgaaatcacataacttctttgctcctctgttttttataaaaaactgggactagcccagctattcaggagtctgtggtggaaggatgacttgagcccaggagtttgaggctgtagtgggctacgattgtgcctgtgaatagccactgcactccagcctgggcaacatagtgagaccctgtctcttaaaggaataataggggctgggtgcggtggctcacacctgtaatcctagcactttgggaggctgagggggtggatccagaccagcctggccaacatggtgaaaccccatctctctaactaaaaatacaaaaattagccgggcgtggtggtgcatgcctgtaatcccagctactcaggaggctgaggcaggagaatcgcttgaatccaggaggcagaggttacagtgagcactccagcctgggtgacggtgcaagactctgtctcaaaaacaaaaaacaaaaagaggaataatagtatctgctctccttgccttttgtgggtttttttgatgattaaatgatatctgagggatacaaaaatgctttggaaactacagggtgctttacagactgtgtgtgtgagtgtgtgtgtgtgtgtgtgtgtgtgtgtgtgtgtgtacagaaaatcctttatctctttgcttctcaatttcttttcttaggaaaatcagattatttaaatcccattatgcacagctctcctctgttcttactaagcctctgtattccattacctccagtaaatcagtaaaaggtggtgagtcaggctgtagtggaaagcggggtctgctgttttctcatgtccatgttactctgtgggactcagaaatcttgcttacatgtctcatgaactttcttacctgtttgaactatacaggctataacatatgacttagagtcttttagttatgaccactcttaagattgatgactaagttgaagtatttattagttgttattatggtggattgataatcatgcattttaacatagtaaactaaagtctgtgtcgtagaattagctataatttactttttaggctggatgaggttactgacgcttgtaatcccagcacatcgaaaggctgaggtgggaggattgtttgagtccaggagttcaagacaggcctgggcaacatagggagaccctgtctctattatcataaataaaaacaaatttttttaaacaagtgtatatatgcatatgcttatgtgttgtaataataatatgtcccagagttgcacatctggaagagaagaagatagcaactgaaaagaaaatagaatggtattgacaaagagaaaagatggcgtcattaggacaattactttttatttttggaacaactcgaggctttacacccattcttttcccacatttattttttctatcagaattcttaaatctaagaaacaaataatatggaggttctttatattaacacattgctttaaattaggaagaaaactgtgtataggctgcagcagactttaaaagcattgtaagactttagatttggaaatcaactttaataacatggaaactttagatttaagagatcatttaatacagctactttgatttggcttttaagagaactgaggcccaggtagcccagaccaaggatcttttgcaaggtcgtgctactgggttctttagcgtcaagactgtaacctacatctttaggttcctaaatttttatcatgccttcttgttacctaactgttgattgttgaactttcttttttcttttttgagacagggtcttgctctgttgcacaggctggagtgcagtggcgcagtcatggctcactgcagcctgaaacttgagctcaagcaatcctcccatgtcagcctctcaagtagctgggactactggcatgtgccatcacacctggataatttttaaaaattatttgtagacacagggtctccctgtgttgtgtgggctggtctcaaactactgggctcaagctgtcctcctgcctcagcctcacaaagtgctgggatttgaattttcttaaacctaaatcaatattataggcctcaccttaggagaactttccaaaatattgttagtgttgaccaccttagcattacatttgctaacgacagtcatccaggtttactgaaccaggaaaccaactttcaggttaataagacagtttcgtctatgtgccatccttatccttgtctggacatatccatagagcacgcattttaaatctgaaagaatatatgtagtctcccctaccccagctttttttaagtagcaagggctattgaaaaaaatcagaaccctccgcttacgctcgcatacatgtagcttaaaatatatgttgcttattgaaagcattgtttaagttgaactcacgagatatactacatcatgtaatatgtctgcatttgtccatgcattcttttcggaaacctgatcttacttatgtctgcatttaacagataggctaggttaagttatgttaaaacatgttgtactgaggttggattcaccgtgtcacagcctggctttcttccttgattagctttaatcaaactctctgcattccgtgaccttaataaagctatttttcctgacaactgaagactgtcttaacaagcatagttcatctgtgctgaaactaaggctgagttaagatggggtttaggtcctcattaaagtccacagcatggagtgtaagaagaaatgatgaaatggtgctccctgaaacatctcttctttaaatttaattagacaaattatacgcaaactagtagatgccctgggaaggcaatcaacattagggctaataaaaagcttgagtagtataaaaaggctgggggaggtgctgtggagcctttctaacgcctatgagaggcaaattaaaaccaattgcgaaacatggaaactggatgaatttcaatattgatttagaaattaattttattatgttgttctaaatataaaaataaaggctatacttattaatcttccagaatttggcatgttaacacctatgcacaaagcattttatggatctttatatgctgggagacacaattatgggctgacttggaagttttggcagacctgggttcaaattctagcaacttcccctactagtttttttgtttgggggggttttttcggtgcacattacttcacctttgtgaaatccaatttcatcatctataaaatgagataaataattctattcctgaagaggctttataagaattttagaaaattaaaatagtaagtatagaacacttggtacaatgcctggcacataataggtgttcagaaataggtaccccatatttagaaggaacttccactgagttaagagtggtttcaagcaaactgccctataaatatgtgagaattggattatgaatgtaaatattgtgtgcgtaatcttatggatcaagataagtttaagggaaaatgctagcggacagaaacttatagcttttggaagaaaaggtgactcaaacataagaagcaaattatttgaagcccacagtagccaaatggagagagtaggttgaaacatttgttaagtgctgcatgccaaacatcctgtataccttaccatctcatttaatattgataacaactccacaaggtagttattactgacctaattttgcagataaggaaaaaagagattcagaaaggctacgtgaattgcattttagcatagaagagtcaggactggaactcagtgttggcctagttcttgggggtggttggatggcaaactagtgcaggtatgttcataacttgtaagatcaaatttgtcatataaattacggggatatgtaatctctctcccttctggctcttttcatccttgggtgagttctaaataaaactattttgtgttatttttttaaccctcattccattgctttcagactctggttctcaaccttggctgcccatttagaatcacctggagtgggatctgggcgttagcattttttaaagctcctctagtgattccaggtaggcaacctgcactaaagacctctgctttaaaatctctctacctcaggcgtaggtgttttcattgcccatagtattaagcctagcttttagcagagatttgccaaggttgattatgatcctcttgcttgtttggaagaagaaatatggaagctgtgaaatcttttccagttgtgatagatgttgtttatgcattaattagcatgtaaaaattaaacactgtctattcttaatgttagcacattttctttctctctctctctctctcccacctctttttttttttttctattgaaggaggccaaattagatggagtgaagagaaaagtgattatggtaacttttcccttcagagaagtcaagagcaagagtatttttttccaatttcttagtaaaacaaaaaatattttctttccttttttcttttttgtttttgagacatggtctttctctgtcacccatgctggagtacattggtgagataatggctcgctgcagccttgacctcccaggctcaattgatcctcccacctcagcctcctaggtagctgggactacaggcacacgccaccacgtagggctaatttttgtattttttgtaaagatagggtctcaccatgttgcccaggctggttgcaaaccaccagactcaagtgatgctcctgccttagcttcccaaagtattggaattacaggcatgagccactgctctggccaaagttattttcaaaatacagtggttttaccccaccacccttagaggtagaaagaatctttgaccccaccacccttagaggtagaaagaatctttgttgccggacagatttgtggtaaatcctggtttctcactttctgataaagaattagtcattttatttgtttgtttgtttatttatttatttatttatttatttattattgagacaagatcttactctgtttcccaggctggagtgcggtggtacaatctcagctcactgcaacctccgcttcctgggttccagaaatctccctcctcagcctcccaagtagctgggattacaggcatgtgctactgcactcagactaattttttgtatctttagtagagacatggtttcaccatgttggccatgctggtctcgaactcctggcctcaagtcgtccgcccacctcggcctcccaaagtgctactattacaggtgtgagccaccgcgcctggctagaattagtcattttaaattcactggggctgggcgcagtggctcatgcctgtaaccccagcactttgggaggccgaggtaggcagatcacttgaagccaggagatcgagaccagcctggccaacatggtgaaacctcatctctgctaaaaatacaaaaattaactgggtgcctgtaatcccagctacttgggagactgaagcacaagaactgcttgaacccgggaggcggaggttgcagtgagctaagatcacgtcactgcactccagcctgggcaacagagcaagactgtctcaaacaaaacaaaagaacaaaactctctgggcttgatttcttaatctgtaaaacagaaataattcttaacacatttggttactctgaggataaaagtggaggaaaaaacatgcagaggatagtccggaactccccatgtagatcccattattaggtaactgaggtacaagtatcttaggctactggtccgggcaggctttgctgaggggctccgtgcagcttgctggtgcagccgagcaagtgggcctgtagccgactcttaatccaggttggtgctattcaaagagatcatctttcacccgagggatttctgggcatctattttgcggatcagaaagtagagaaagaaggtaactttgctgaaagctagtctggggagttagtagctgatacagatcagcatttcctaactatgagatttcataatattctctcttgtctcgattctgagtcactggtgcctgctgtggtggcattgttcatgaacatgtacagttattgggaagtgatcttgtctttcctcctgccttcaggcactgctacctaaattacaccccgacagatgtattcccattcttctttaaaagactatgtcatgagctgaactattaagttttaaagttgataagcatcaggctaagcatatttttcctgccatctcccacggaggtataacattgttttctatacttagggaatttaccaaaaaaaaaaaaaaaaaaaaaaaagttggtatctgctaatgggtcaaattagcaggatgttttgaaaactcagtggaagaatagctcttcctgcagatgcatgacctggtagaaatccagacattgggctccaccaaactcgaatgatacccaataaatgatgagaggaatatccaaagagttaaatgccatgagaccactcaccccctaaactctaaatccttgtatgaccctgagacaggcaggcagtagggctgcaaggctgagataagtactgaaaattggcccatatacattttgttttaacatagctccttcctttacacttttctgtacccctggcctgaaggctctacagcttgttacatactgatagctaagtaaatgcaatcaacattccatgctactgcctgcagaaaaaccgaaattgtttactgcctccaggatgttggtaaatatctggctgtattttttttttttttggcgggcgggggcggggggaggcaatgggtaggagaaagctagtatacagtgtcccaatttacattataaaatgcaaattttgtactccagaataagaaacaacttagagtagacctgtattgttccaaaactagtgagaaattatcatgttttctatgtgtagaaaagttttctcttcgcaatggctttacatattttctgtagggaaaaattctatttataaaatagcctgggatatggagaactcagtgataaaaggggcaagaacattttcagattgttttaccctgctggaatgtagcatgggaaagctccttccaaaaggctattacctctgggcattctggcacagttggggagtgaattggtaagataaaaatgggacgaaaatccctattttctgttaaatacaaacaggctcagaatggggcatcctgcatttaggattagaaacttcattatacaaaagcagggtggagaaaccctaatttgacagctaacccaagagtgtatggtgaccacaagattaacaggggccagcagtgtgacattgccattcaaaaagctggtgctgtagttgggctgtggtctaaccacagctgggtttttttttttttttttttttttgcccagttttgggcacagaatgctaagaggaacgccaacagaatggagactcgatgccaatgaattgggaaatcatattatgtgacgggcagttgaagaaggcatgtctgtaaaattgaagaagagatttcttagaatgacctcagtaacaagcttaaatatttaagtgtctggtgaaagtaggggtgggatagtctctgatgtgctacaagatcgaagaaggagttaagtccttctctagagcctcaaacccctgctcagcatgaaaaaaccaacagaaacccgagttaacatctccttgcaatatctgatctgtttttccaatacatctgctcatcttgtttcaaaacaagtagctgtcaccattcttaaccctgtcgtccaaaccagaaaccgggcatcatctttgactggtcccctttactcagggggaaaaaaaaccatgtcttttaaagtcagcgcctataatactggtctttggtttatctccaataactcgattgttaacagcccttgaaggggaggcaatactgttaaacttgataatttctaaagagttttgagctatttagcacgaagtgatgccaagaaaaaggaatactaacattactcacagcagagggaaaaattttatatcctttctgaaggccaaggttaagttctgtgtgactcagcacattgactttctatatgaccctaaatcccttctatttcctgatctacttgtcttgacctgtttcatttccacaccaaaatagtttcattaacacagcgatcatgctcaggagatagtggctaactgatgtaattaactgacatgtcaaaggctattggtttattgcatatgcaactgtctttcctggtgggaagatacagtttctgctgacataataggtatgcaaacatgccaaattgcccaataatctgcccccgtgatggtgaggtgtttgcggccattctacttacaggaacagaatggcggatctgttactatgttctcctaaaatgcagctggccaaaggtgctaattggtaaacagttaaaatagaaagaagagaaggcaattcagttttgggccttagtgagttttttttccttttctttccttaaaaaaaaaaaattgtgcttttggcatgctaatgcatgcatttagtctctgcaagaaatttccatttaagaaagaatttaaaaacatgaagtgctcaatccatatctcctaaacaactaaaaagactgcaatttcaaatgagaaattatgttgcaaagaagaaaaaagttgtttattatggctcaaaattttaatcacccaagggctgtaaagttaaaaatagacaattctgccttctgtttatggtaaacttggctgagtcccggcaaatttcaaagctgaacatactgtatgttatttttgcttaattttagattccacattttaaaattatttcttacaagaagcatatttcaggatataaacttagcctgaagaacagtattcttgatttttgcccatattgaaactcctttgaaaatagtaaactatggttttgggattttcctattcccaagagtccaaatgggtacctttctaagtcttttacattatgaatgaacacaggattatgaaattgtaaaggttactttctgctctctaattcctttactcgtaattttagttttcttaacggtataacttgatgcaaatatatacacagtagatactaactttcactgaagtgttttcgggagggaggggcactttacaagatgtgttgcctttagtttttccggtaaggagacaggaagacacagacagaggctcttagggcacatggaaagcgcctgcccctgtgccaagaacttaagagagagccggggatggaccctccttgctgtggctcctgaacagtgcagcctctcttctgatgcactcaccctggcgaggagaaccgcttgtgtggcgactgcttggcccaagagcgagtaggattgttgactcaactctcttcgtgtctcctcagagaggaggaacacctggcttcacctgtttacataactcttgttgattcttgtccctaagctcttccagaatgctcttttgggcttttcctcaaaaggtttttagaagaacaagctttttggggtggcaagaaatttaggatggagatttttgtttttaacctattagtcagcgtggcatcagagaaccacatgtgccccacagtcagtggcatgctcagtaaatatttgttgaatattatttaagtgaatgactgtttgctgaagaacaagatttctctgatgaccttgacaaacgtatgtttgtgattaagttaatcatagctaccatttagaacttcttactcactagacatgtagctgaacacttcatatgtcattctgctttttgtttttttaaagacagggtccctcccactctgtcacccaggctggagtatagtggtgcagtctcagctcattgcaacctctgacccccaggttcaagcagtcctcccacctcagcctcccaggtaactggggctacaggtgtctgccaccacacctggttaatttttgtatttttttgtacagatggggtttcaccatgttgcccaggctggtctagaacttctggactcaagtgatctgcccaccttggcctcccaaagtgctaggattacaggcatgagccactgtgccttgccttcatatgttatttctgatccactaggtttggaacctatcccaggacacctggccatatagagtagctatatcgagtctatattcagcaagtgcagggtaagctctgattccatggtccttccaatatgccataccaccgaggttgagaaaggtggtgttaacagtccccatacgttgacataaggcctctgagaggccaaaggatatgccacagtattctttaaggtgcttaagcccttaatcatgaaatgttttcctaggccacagtaagaatctacttagtttacacacaattctaataaatccggttatctgtttttcaaatacaaagcagattgattcattcagcaaatattttctgaatacctattatgtgccaagtagattgttctagatacagtgaacaaaaaagaatccttgctctgacagaggtgatgttgcagattaatagatcagtggttctcaaaagtgtagttcctggatcagtggcattagcataacatggggacttgttagcagtgcaaatgttggtccccacccccgacttactcagtgagaagctctaggggtggggcctgattttaaacaagccctgtagatgattatgatgtatgtgaaagtgtgagaaccagtattctagaagattttaaacaatttgtgttcctatggcagatagctctctggaaaactttgtctcctgattcattcccagactaccgtgtgtgtgtacatgtgagtgttggggtcttaccttataacggcatttagtgattggcaaagctcagatgctgggcctctatggggcagaggcacttggacatttgtacctaaggatgtgggccctggagttacatgtacctgaattcagattcttactttgccaagcacagccacaagaacttgggagagttaggaaaactctctaagccttagtttcttcattgtgcaaatgaggttgacagtaataggaccatacctccatttgtagcatggctacttggtacaaagaaaatgtccagtaactagtaacaattgcttttctctctccaggatccagcacctggcctggcacagggtacatgctcagagaacaagtctttgaaagaatgggtagatgtttattttcctttgtattagccattagctcaaggtctgcagctacttaattccaacctgggtccatttttagcagaagaaaaaagaataatgggactcagcatcaaggcgcacctgacacacagagtcctcttggaaatgtgtgacctgcctcagtttagccactgcttttacttcatcctcatcagtcagagtatgacattgccttcccctttacctcttaattttggaatatttcaagtgcctctaaaattttatttaattaaggggcttccaaatctgcttgtagatattttattcttgaaatgcttgtggcattaatagtaaatcagaatcagacctccacctattttgtgccatttcagcactaagccaaggagaaaaattattgaggaaattaatgcttcccttaagcacagtaggaacacgaagctaacatactgccgtataacctgatttcactggtattctttctgaaatttttgtttttctatttctattgcatattggacttcatggctaaaacaaagtgcaattatgaggaggatgttttctcaaaatctgtagggtctggttggtcacataacctttcagaagaaacattatctactggatgacttagatgttattcaccaatagattatcaaggtttatctccagatgttcattaattcactaagtattaattgagtatctactatgtgccaagcatcgtcctaggtgctaaagatatagcagtgaatgaatgggacaaaagtctctgccctcttggtatatacttagttactttctttttcacacatgggcatgtgtgtaggtgtctctggagtaatgcgttatatgcaggtgttgagcctagggtggtgttgggtgcatcatgggcactcacatgttaatttcctgcactgtagatgattgctgattctcagtgatataatccagtcaaaccatttggcgttcttctgctttaaattttattggtgaggtttaactcttcattaatgaacgctgtcacattttctctcttctctgacatgtcctggtgccctgggtttgtggggtcaagtcactgccgatttaattcaactcttctttgtatgactacaagtcctgtgttttagtttcctattgctgctgtaaaaaatcaacatgaacttaatggtttacagtaacacagatctattccctgataggtctggaggtggggagtctcaaatccagtgttactgggctgaaatgaaggtgttccgaggactggttccttctgtaggctccaggggagaacctgttccttgggccttccagcatctagaggctggctcttcactgcatcactgcatttgagctccgcttccttctcctggacctttgaccctcctgcctcccacttaaggagccttccagttgcatcattgggcctgcctgaataatccagggtaatctgtctacctcaagatcttcaacttgatcacagctgcagagtcccttttgttgtattcatgcattctggacattaggatatagacatcttggtggttggtcattgttcggccgatcataccttgtgagaaattccagtgtccctgggctgagctgctaaggagcaggttttattgagcagtctttcccattctatgaaacccaacccaggagaaaacgctctaaaatgcaaatgttgctaacttggcagagcctaattatatgtgcacaactacctaaaattttcttaataattgctctctgttccacaagacttggctcaaaaacccctcctccaaggagccttcctgaattttcctgggcttgtatagtactctgtgtttgtgattctgtgtcacgctctgtgtaagtgactccatgatcaaagctttcctgttgtaattgtgtggatttacttgttgcccactgtccccataccctccacccccacatggtgtgctttctccagaaagggactacttctgctgaccacacagaagacgtgtgtaaagtctgtgtatcaatgaatggattctcatctttcatagtttttttttaaatagttttatgtgtgtttaacttaatttcacttaaaaagatatttaccagaagctgaaagtagggtgtgatgaggttgggttcaggaaggactggtatcacatggcttccctaagttgtatattacattgttaggacacctgacagagctgtggattagtgaatcttacggatggctcttttcagttgaatataattctgaagctctgcaccattcttcccactgtgttgctgttaatctaccataaaccaggtagattctgcatagttggaagtgatggaaatcaaggtgaatgcctgattctttaaatctttttttttttttgagatggcgtcttgctctgttgcccaggctggcatccattggtgcaatcttggttcactgcaacctccgcctcctgagttcaagcaattctcgtgcctcagcctcctgagtagctggaattacaggtgggcaccaccatgcctggctaatttttgtatttttagtagagacgaggtttcaccacgttggccaggttggtctcaaactcctgacctcaagtgatctgcccgcctcggcctcccgaagtgctaggattacaggtgtgagccactgcgcctgacctgaatctttaaattcttaaaatcagttttagtcaccaaagaagatactctgtagcttaataacttcgagttactgtaacggaatcaagtcactggtattgagacatttttatttaaaaattttaaattagaatcttactatgtggaaaaatacggtcattgttggaaaatcattttgcctctttttaacagcattcaggcagtttttttttccctttgaaaatagaccttggtctgtgttgttggaaagcatgtaattttcatttgttttttttcacctagtagtgcttaatgataccatgtgaatttttatagtcccagctgcactgaagtgtgtgccctgaaacttcggttggattaagaaaagtagcttggtgtgagggctgaaattggtgaaatgggagaacacagggttgcatctatatatattgcaattaatattgacgagtgggcagaagtccaacattatcctagagggttggctaatgttctttgtacaccaatgcaagtgagtcttttccctccaggtgtgaatagtttaatttagtaggtcgattagtagaagcaaggggtgttttcttgtattccagtttacattatacactcaacattaactagctgtttaaggtacagtgcattgttgagtagttgtggtacaggtatcctgagacgttgctaacccatcttggtatctccagggcctggcatctaatgtagtaggtactcattagcatttgcaacatgaataggagaatgaatgagtggttgttgtggcaaagtctcttaaaaatcctggtccctgcgtacctctgtagccttctcatctccccaccttctagcaataatattctatttgtagcttgttaaatactccacattctttccggcctttggacttttgtacatttcattccctctgactctcacaccaccttccctgtcccctatcccctttgtctggctaattcccgctggttctttatgacttagcaccttctagaagacgttttaggaggcatcatagtgggtattttgttgaaggcctggtttgtttttcatatctctatgataacatatctctttgggtaacaacagagagctgctgactagtggcaccgttgaaagctgcatatctgaagcttcttttcaggagaatgtggatcatttcaggtgcctgcatcatttgcatgtacatcttccaaactctattggtactttccatttagatatgggcagaacatgatgctacagtaactgaaacagaagttaagttagcagcagattctcttccatttatagcatcagtatcagggtaaaatgggaagatgaaggaaaactattgatgaattacctttggtacagctgatactaaagtgggtaaacaggcaaaaagaagttgggaaattgaaccattctctttcttttctttttttcaaaattagagacagggtcttaatttgtcacccaggctggagtgcaatggcacgatcctagctcactacagcctcgaactcctgggcttaagggatcctcctgccccagccgcatgagtagcaagtgcatgccaccatgcctggttaatttctttcttttctttttctttctttcttttttttttttttggatgagatatgggtctaattatgttgaccaggctggtctcgaactcctggcctcaagcagtcttctcaccctaggcccccagaatgctgggattacaggctttagcaaccacacccagcctgaaccatttcctttctgatttaacttaggaaagtttgctgcatagtaggagctcagctaacatttgctgaggatgaaaaaaataaatgaaccaagtttgttttgtttgcatctttttccttttgctttacaataatatattttttaaaattccctgtcttttctactacacttcttttggccttcatagctctagccccagactatacttagtgcttttgctaagactgactcatcttgtttgattgctttagtgatataagattcttgtatccataggaatggtgtgagactgtatgcctttcatgtttgcaaaaatgtaaaccagaagagccagttattggtaccagtaccaactaattcctcagagctatagggcagtattaaattactaagccagtgtggaaacagcatgatctaatggaaagctaattagcctttgtgtcagatgggtgtgattcaaatcttgtctgtactgctgatgggctgtgtgactttgggcaagtagcttaacttctctgagttcccctgtctctgttttttcatttgtaaaatggagtggaggggacaatattaacttgcaggatggcttgatgatgagaaatgataaatgtcttagtctatattagatcttcagtaaatggtagttgttttgaccactgttactgtaatgagccaaggtggctataagcccttcagtgtttcagtaaggacaagcttacaggtaaccaccaagatcagggcagaacagctgatttaggtctaaacaggttccatcgtgtgtcttcaaaaaggttttcctttttttcctctggagaaaattcagactggtttaagaaggaaactgagagcctcttccctccctatgttctgagtgtttcagagatggccagaaatggatactagttactaagcaagacctttaaaaaatacacgttacaaggcaggttggtatgaaggaaagagcactgacccgtgagttattctcgcggggccaggctctgctccactcagctctgtgttctctgccaagtccctttagatcaatgtgtcgcatgtccccccattgtgagttgagtacattggaccaaaggattatagtttgttttcttcccaggcaagtgcctcctcctgatggggagttagtatgatgtgggtggccccagtaggactgggctggtcttactgttctaagaagtgttagcagaaaaatggctaggcattggagtaaccctgtgatttgacattttggggcatcctttcatggtacgatacacctggccaaaagtctcccagctcagaaattctataactagaaatgctttgaataaatatatactgagaaggtattttggggggaaattttaaaattcttatctcacttggctagagcaactgcttacgacactggacttcttaggggtatcgataatggttgtctttgaatggggagtggatttctcagcttcctgggaacagcaacaaaattcccccaacaaaccccagggtgtctgaagcgcctgctttcttctcaaagagcccgatcgaatactcttctgtgggctcaagagctatcaacagtattgaacagttagactagaaggatgggttgagaacagttgctccctcaaggcttggaaattaacaaagaccatattagtaagaatggggagggaggtgggaggtgaagagaatgagggctgggaggagcaattcggaagtggagagggtgattggaggggtttgtttcccagacagttttcaaagaagagggatttgtgtagtatgccatgggactgaagatgcagtgcaagaccagttgatgttcttcttttaatcaaccaattaatttctctatcatgtttcttttaggctaacgaagtgtcttctttcctttatcatggccattgatagcaagagcttaagggaatcttgcctccctgggctcaggataggctggagagaaggacacacataagaggaaattgacattttgcagtttttgttgttgttgtttgtttgtttgtttttttgagacagtctccactccgttgcccaggctggagtccagtggcacgatctcagctcactgcaacctctgcctcccaggttcaagtgattttcattcctcagcctcccaagtagctgggactacaggcttgcaccaccgtgcctggctaatacagctttttttttttttttcttgattttatcataggtaagggaaaacgatccaatgtgcagagaaggctcaggttttcattttagtctgcgggtgattgatttctttctttcaaggggctggttgaggaggtcagagtcttagaaagggagaagaaatcagggaaaaggagaaaagaaggaatgagatttatgaccctctggatcccagattttatgtcgcgtaaccattcccaatactggaagttcatgacaccctgagaaacagccctggaactcagagcagtgatctgcatgcaaaggcaaaattaaatagtccagcaactgctttgaccgagagacacacatagtactattctgggtcctgagtgctgcttccctttcatttctcccctaggcacagattccactggctcacagagtgatgagttagaccacccagggccacttatgttatactgagggcggatggtgatagtgcttatagaggaattatttcaacaatgagacttttccattattctttctgcaatcaccctctatactcagaatgtggaaaccttggcatctctcacttaagaacactgaattcatggtgttgctcagagagtcctgtcctggttccataacactgtgataataactgaagatctttaaaaatgtatgtatcttccatttttattccatatggccccttaggtaacatgacccaatggggccattaaatgaccctgcctacacttggattactcagtacaaagcaaatttatggttgtttattctctcctcctatcagctattagtgcctaatcatatggtctatcgatcatgagattaatcgcctgcccaaagaggcagcaggtcttgtggaatgctgcactgcgccagactgaacttcaaccttttatacaaactggaggagtcaaaatcatcattcactgcctgaaatccttgcaccctgggcctcctgcaccccaggaggtaaatccctgctttttcaaacagtgtactttgcacttcctttccttgtgtaaaactttacctcattgattcaggcaggcacttgtaaataaaatcctttccaaggcatcctataaataatgatctaagctgaaaatatgtgggctttattatacaaagccccatagtgctgccataattaaaggtctgtcagtatttctattataaattctcattttagaagatttatcactgggctattaaagttttctctaagactttccaagagtatcatgatctaaggccttttttttctttctgtggaatgtgttgctttgaagatataaaaaataaagtccagaaacattatcacataggagtacacacatgcagagattggacactttaaaatttgagctctgcctccactaaagtggcttctgtttgcctcttgtgttctcattgcatttatgagaacagagaatcattgtagggctaatactgtattgtaatatttgtttcctggtctgtgtcttttactctgaggagagagagggcagggagttaaatcatttgtctttctggccctggttccaccagagggccttggcaatataagcactgggtttgttcagtaaatgagccccagggtgagagtcaggaaattttcttcctagtcttcatccagtcattaaaggtgaggagtgaattcaggcagtgaatttaggcaagtccctttactttcctgaaaacaagttttctgatcaatgaaacgagtgtgttgagttcagggctagtaaatctgtttttggtgggttgaatactgccggcacagtgttttcaaacacttgaattggaatgtctttagatggaatctgtgccttctagtttgccataatccccactgttccctattatattatgttgtatcagcagcctgcttctatcatttgcctgcagagtctataagcatttatgattccttgtaattattgatcatgtggtcttttgttgctatactaagggtctaaatctgattcaggttagctgttgatgcctttgactgtaactgtaattctctaactttcaacccttttatcatcaaggacctcaactattattttttgttccatatttgaaaacttttggtgttccagacacactgcattggttaataactaattttcccgttgtaaaaacagacacgtgtaactgaacacacaaatgagccatcaacagtatgaatataaaagtgtttgtgcaatgagttggttgacgtttcagctagcttgttcagttgtttcatgggtaagtgtatagtttttgtttgaagttttgatatatgaaaaatagttccgaggtcttctgccttattagacatgtgatagacaaaggattctaggtgagaacttagtttattcttttatgagttgctgaactgccctggtcattagagcatcaagtaagttgtttatccacatgcagttcatgtcttttcagttgtctccttattggtcagcttagagagggctctacaaaacctggcttttacattcagtgagctgaaaagagcttcctatatgagtttacccaaaggcccttgttacattttctccctttagtcaagagtactttggaattttacattttctccctttagtcaagagcactttggaatttgttaaaaggattgggagacaatttgaaaacttggctctccagttaagaagaatcattttttacactttaactcagactgttggtgaatattgtaaattgacaatttaaaaacacacatttgttttattttattttattttttatttatttttgaggtggagtctcacaccgtctcccaggcttgagtgcgtggtgcgatcttggctcactgcaaccaagtgagccttggctcaccgcctcccagattctcctacctcagccttccgagtagctgagattacaggcatgcaccaccatgcccagctaatttctgtatttttagtagagacagggttttgttgtgttgggcaggctggtctcaaactcctgaccttaggtgatccgcccgccttggcctcccaaagtgctgggattataggcatgagccaccacacccggccttattttatttttgagacagggtcttactctgtcacccagactggagtgcagtgacacgatattggctcactgcagccctcgccttctgggctcaagtgatcctcccacctcagcctcctgagtaactgggattacaggcacacgccaccctgcctggctaatttttttgtatttttaatagagatgggttttgccatgttgcccagactggtattgaactcctgggctcaagccatccacctgcctcaccctccccaagcgttgagactacaggcagtgagccactgcatctggccaaacatacatttaaatagagcagatgaaagatctatagtgtagaagtaatctgcatataaaccagtcttaagttgagacgtgacctatgactgttaaagcagtccacatcacacaaaaataaagggcttggaagatagcagcctggtttaaccaggttagatataatttaacaggaagagatagtgtctacattgttgctaaaagcttaggctctggggttcctaatttgggtttaattctgtcttggttacttgttaattctgtcaccttggagtggttccttaaatctccctaggccttggtttcctcatttgtaaaatggggataataatggcttaccgtgtggaataaattagagtaattcatacaaaggatttatcatcatattggttatagaagaaacaatgaatattcatgatcatttttatcaagaatataattgaaatatatttctgagcgttgaggtttttctcttaaagaaaagtgtaaaggtatactttcttaagactgctcatacatgctggatcacccatatacatttccaggaaattgtatgttctagcaattgtatgttccaaatgtgctgctttcagttttttcgagaaacaaatgatgtttgactttaaaattctagagttggccgggcgcggtggctcacgcctgtaatcccagcactttgggaggccgaggcgggtggatcatgaggtcaggagatcgagaccatcctggctaacaaggtgaaaccccgtctctactaaaaatacaaaaaattagccgggcgcggtggtgggtgcctgtagtcccagctactcaggaggctgaggcaggaggatggcgtgaacccgggaagcggagcttgcagtgagccgagattgcgccactgcagtccgcagtccggcctgggcgacagagcgagactccgtctcaaaaaaaaaaaaaaaaaaaaaaaatctagagttgaaatttttctcttacatttccttttccctctagatcaatcccaattaaagtttcattgcaaaagtttcacaaactcatattggcattaattattattggtgtgctggtgaaagtcctaaagtgagttcattaagaattaaaaaccttggctgggcgcggtggctcacgcctgtaatcgcagcactttgggaggccgaggtggatggatcacctgaggtcaggagttcgagaccagcctgaccaaacatggtgaaatcccgtcactactaaaaatgcaaaaattagctcggcgttgcgtgcgcctgtagtcccagctactcggaggctgtgacaggagaactgtttgaacccgggaggcggaggttgcagtgagctgagatcatgccattgcgctccagcctgggcgacagagcgagactgtctccaaaataaaaagaattaaaacccttgagaaaactttaaaccctcctggactcatagagctggaggggacctaagaggttatctcctctaagccccattttccagataaggaaagtgtattttccaaggtaaaataagttttcaacagtgaatatccttcataatggctttttaatttgtactgtcactggagtcagccctcatttgccatgttatgattatgttcttcttgtgggacttgtatgtatttattagagaccattgagacgtagcactgggcattacttttgtggcaaaggcaccagggcagtaatcattattaatggatttcattatttgggagagcattttactgactatagagaattcattgcattgatctattgtgccacagttttattataccgggtagtttaaaatgatattctctaaactgttaggctgaaaaattgtccagtgttggcagttatcccatcagtaagaccttccttttactaccgaaaatacatagttctgtcgaaagagaccttttgactggtccccagtgccctgactgtgtttaaatccctcactagtgaaataggaggattactactgccatcattgttctaaaacaaacttccttttggaagataacagcagcggtaaatcagatgttgaagaaagtaccagcttaacttcactttgctttaaaagggtttcctctttaattgacaagtgtcatgtataatagggcatggcaactcacatagtaaaccttgtgtggggctgcctgctggggttggagttcttaatgaacatacaagtgaatacactgaggcaaaaaaattaaagctctccaactgtggggtattcattctgttcactgtggccagtgtggtgatcagtactggccacaccagtggccaaagagaactgcattcatcatgtggctgttctatagctgtgagctatggtgactgttatttttcctagtgatagttttcagtgacagcatagattctggtatcatatccaaggaataaacaaacactgtttttggctttttgtttttttgtttttgacataaaaataataagctatttttggcatatgcagacttttcacaaagtgattgttttcttgagctctggactacttggtaacattcataagttccttcactttgtagctccctctttccttccctccactccctgcaaaagagagcagaactgatttttcagaggtgatgtttacaacagttcaacacactcgaatgagcacttagaataatgtcaatagaggaagaaaaaaaaggacatattattatcaaattaagtaatggatgggcagtgatattttatttattaaagcttgtctgagtaccattggaaacagagtatgttggttctgaagtgcacagattagaaaggaatgttgagtttggaaacgtggcagcctgcagcactgtgtatggtttaaattaaacctttttttggaaagcagaatagctgtaggccacatttaagggaaaagccacagcagagtgagctggctgtggtttttcttttactctgtaaccggcccactttcccttgttttaacacagaaaaagactttggactccttcagaccaaccacatagcttctctgctgaccacaaaaaggaagcttggcgtagaagccataggattaatacccactgtctcttaacccaacagagtgtgaaaactttcataagagatttctctgggcagactgacactgtggttggactttaaacattttaaatcaagcacaactttgaattgcattatgccacagtgctctgtaaattgttatgtgtgatcccactgttaaaagttatttacatgaatccccaggtttcagagggataaaccactaacagctttgtgtatcttataaagaaatacaaagagaattaaaggtatgcctatgacacattatctcagatagagtaggtagatcatagtcagattttattattcttaagcaaatggaggcaattggcttttggcagaaaagccttttcatctttgaaaataataggattaagattgtggattctgttaatcacttgatcagctttattaattaaccacatttttaaattagaaaaaaccctttttactagatgtgcatctttcttaataattttacattgcaggttttatttaatatactgatctactcaggtattataaatggttgtttctatgtcctgcacattaattttaataattggaatcctactaccctgatttactaatcatgcatttgtacaaagcaactctgaaatgaccaaaaataaccacaaaaaaaccttttgtgtttgtatttatatttactcattcagatgcctaggattaatatgttttacaagaaatcatttgaatttacatcttaccatgttgaattaatcagcttttcataagtgcactgtctcagtattctggtttctatttaacagagaatctcaatggaagagattgatttgaaaagttgaaggaaaaatcgtgcatacatgtttcaaaactgtggtcttacagtaaccacagagttaattcttggttgactttatgtcgcgagaggggttgatttgctgtcattagagaaattggtctgtataacacttcctgtatgtgaagaaatgcagttgtcatcatgcctagaccattaaagcagtatttaaatacttccagttgtgaggagccatgcatttattttggttattttcccaggtgtcttaggagcagctgttttgtgctttactgaacttaatagttgaagaatgtgggaaagaaatggtgtactttctgggtaaagtattttagccaccctggagtagttgcattgcatcttgatcttttttcatcttggtagaattatactgtaactaattgaatccattgatcactgtcttgttttttttccatcttcttctccgaggattcatttcataggggtctatacatcagtcaagaaaatagctaccgaggaattaccgagactagtaataaaggtaatttaacctagtttaatattttttttaaaggcaaaacactgtaaacattttttacctggtgagagttaacttcttaattaggccatgttggaaaacaaatcaaaaagacacttactggtagttttcagagagtgagagaaaaaaagaggcaagagaaagcattgatcttggaattagatgacctggtttctaggcctatctaccccaatgcttttcaaacttcaatgtgcatacgaatcaactggggatcttgttaaactgcagagtctgaatcagtatggttgcagtgggcctgagatgctgcatttctgacaagctcgctgagacatccctgctgtagaacctctgaccacaccctgagtagcaagggtctgctttaccacttagctaactttgtggctttgggtatactgtttaacaactctgcatctcagtttcctaatctataaaattgggatattaatctttgttctgcctacctcattgggttgttatgagaataaaattagataatgtagatgctttttttttttttttttttgagatggagtcttgctctgttgcccgggctggagtgcagtggctcgatctcggctcattgcaacctctgcctcccgggctcaagcagttctcctgattcagcctcccaagtaattggaattacaggcgcctgccaccatgcccgactaatttttatatttttagtagagacggggtttcaccatgttggccaggctggtctcaaactcctgacctcaggtgatcctcctgcctcggcctcccaaagtgctgggattacaggcgtgagccaccgcgcccggcctgtagatgtaattttaaagtgtcaaataagcataaggcagcaaggacatttgtttatagatacagacattctttggatacctttcatcaaatcagtgtgggctgttctttaataggaggggcctggaactgtgaggcaggagaagggaactggaatccctgcctccctagtacccattctgtgcctttggccaaatcatctcccctggtcccctgttgtgtcatctttaaaataagggcttgacctaggttagtgctcttaaagggtagttgcaagactagcagcatcagcatcactgggaaacttgctagaaatgcaggttagattcctagccccttccgagacctggtgaatcagaaactctgggaatgcagtccagcaatctgatttctaatgagctcttcaggtgattctgatgcagctaaattttgagaaactttctgaagtgtcatccaactttgaaatgagatatttaagccttctctttataggttcagccaacagagagcctatctgtgtgatctctagacactttcccatctcccaggtagaggaagattggggaattgaaccttctgtgattgtattgcattgagcatgtggtaaggaggactgaacttggacggttaaaacctcacctctctggaactcggaatagattataattgcattgacttacactggtctagcttatccagttttggggctgctttagtagcccacaaacgctgactaatgcagatgactgtacacactgagaaagttctcttccattttagtttcctccttactctcttcctgttccccgaatggttgtcatcatgatatagcaccaagtcacattttatagacttttcaataactttctaaagttgatcacaatctagattatttgcattgttgtgagatgagggaaactgagaaagtaaaatacatgttttgttttgttttgagacagagcctcactctgttgtccaggctggagtgcagtggcacaatctcagctcactgcaacctctgcctcccaggttcaagtgactctcctgcctcagcctcttgagtagcagcgattacaggcactcgccactatgcccagctaatttttgtatttttagtagcgatgggatttcaccatattggccaggctggtctcgaactcctgacctcaagtgatccgtccaccttggcctcccaaagtgctgggattacaggtgtgcaccaccgtgcctggcagtacatgtttttcttaaagtcatttacggttacgtttcctttatctgcagtttttgtttgttagtttgtacatttggaaatacatctgaaaacttaccaagttcaagcgctagagagcacaatctttatgtacagagaagacctcctcgatgaggtctaacaacttctgttctagacacaagtctgatttttcattccagagcagcaaataaagtcatagtggacagctgcttcagtctggaaactagaaacaaacaagaggtgttagctggcagctgaacaatgaagaaagacatggagacactgtccaagaggtcgagatggatagtagcttgagatcctctctttctctctagacatgcgccatgtgcaacacacacacacacacacacacacgcagacagtctctgactttcaacggtttgactttatgatgagtttatcaggatgtaactctgtcacaagttgaggagcatgtgtttatgtgtgtatgtgtatccgtatacatttacatttatatatacacacacacacccccctctataatcctgtatacttaaattcctaaatagttgtttgggtgttcactatattggaacgctttaacttgtgttcttaataatatctttaggaaaagattaaagcatgtttctgcatataataatattagtaacaaatgatggaagattttgctccaaaatgagttaatgtagaaaacaggtagtgattaaagtggtgaatgtaagcaattttgtaaatttataaagtcatagacatctgtagttatgaaggacctcatagataattttctccagtggtttcaaatattatttaaataggaatgtttccttcaggaccaaatctgtggagaagctatgtacatgtatttatttttttaagttgaaaagtatgcgagtactggatccatattattaataactttggcccacctgttctttctcccagaagcagccccagttggaatcagcccctagagcgaggagtcacctgggaagcttgttacatgcagattctgattctgtgtgtctgggaaggcacctgagactctgcatttcagataaactcctaatgtgttaaacatgcattggccacattttgagaagcaaggccctgggggaaactgtgcacgtagttcgaaaacctttgatgggttaacttcttcatgtttcaaatgtgaaaagacagagttataaatgatctgccaaaagccacatgcttacctggggtcttgagtcttgggaaggctgtgttcttttacccaaggcctgggtgggatggctgtgtccttaccctttgggctgaaggaggcatcctagtaccagggttccacgggcactatccgtattcttagtttctatcatgatagattatgctgggaacttgttccttttagcccactatctgtcccatggaaaacagtactctgaatcagaccccatggagggtggaacattctgattagccagcaagggcagttaggcccgtagctgtggtgtctgctgccacagcagaatggataagcagttctcagccaccaccccccacaacataatccataaaactctttcaacctttttttttttttttgcatgtctagtgtttgcaaatggaaaatggctgaggaaaaacagagtgaaagtttatataaaatatttataccttaaagatcttttatcttgtgtcattcaagagagaagtgaaaaatgtattgggagtacattatcaagagtacattataaatttaaatctcagattgaataatatcagctgctaatgtgtggagctttggaaatgagtcacttttgaatctcaagaacttaactgtaccaggtcagttacacttaagaaggaagtgccttttgaaaaaagaaaaatcctataccggaataaagacttatactaatgggcattaaagatcaaatacttgacataatattcatgttagaatgtagctacataggaataagttgtaggatctgagacactttatggaatgtttctcaaaaacaatcaaataattttggtcttttctttgtgaagcaatataacctgtggttacgagttatgtgtcttagaaagacttagatttgaattctctgtctgctgcttgttagctgtgccattttggatcagttcttttctttgagactcactttattttaaagcaaagttaatatacctacctaattggttttttttgtaaaggattaaacatcatggtatttgtaaagcattcagcactttgcctagaattttatagttccagtaaatagtagctatttttatcattattgtcaccatgatattgtttttagacctaactagtattgcatcattctttggtgacctggtggtgtgctatggaagcgaaattggtgtgcctgttgaaaaagttagtagtcagaaaaaaagacatacttttataagtgagactgtgactattatgctggacacctgcattctaactagcaaaacagaaaatactttgttggttttaatggtgctttgtttttatactgcatggtatctatttttatatgctggggtcttaaaatgcttggagcatctagagaggtaactaaaggaatgaagtaggccatagacatagcaacagcccatgtcccattgaaaggccatgagtcccagttgaggccccttggctctagccaattggtgctgtgtgaaaatctgggcccagtgttgtcagttcttttaattttttcctaagaatctggaagtgcagatttttacatgaatcataggatgctttaaataattgcagctgtatcttgagaatgctgttggctgcaagaaagaaaaattttagtttaacagtggtctaaacaaagatttttttttcttacatagcagtgagtccagcagtaatagctagtgtttttatttgctcactaataccaacaagaatttagacactttccatttttctgtcctgacatgcttcatttgttgacttgaaaaaaaaaagtgcttgtcatttatggttgccatatgtatgttgaaggtaggataatgaaggagatacattagactagccttatttattccatttatcaggaaagtgaaaacttttccagaaactacacaggagacatcccttatgatttactggccaaaactgggtcattctggctgcaaggaagcttgggaaaatgtctcaagctttcttttttttgttgttatgtgttttttttgtttgtttgtttgttttttggagatggagtattgctctgtcgcccaggctggagtgcagtggcgtgatctcagctcactgcaagctctgcttcctgggttcacgccattctcctgcctcagcctcccgagtagctgggactacagccgcccgccgccacgcccggctaatttttttgtatttttagtagagatggggtttcaccatgttagccaggatggtctcaatctcctgacctcatgatctgcccacctcagcctcccaaagtgctgggattacaggtgtgagccaccacgtccagccaaatgtctcaagctttctagcctctacagtgggagatggtgaagaagtgggaaatcattgttgcacttactagtgaacagttgctgtctggcacagcagctaactcaacatgaaacccaactgcaggacctgaagaccctgtggcctgcagtatttatcaaaaatcttcagattggggattataaagtgaaggtatcatttgggtggaaaggaggagggtcggagaggcagccagtgctttatttttttgtttaaatggtttcgtattatatatacgataggtcattgctaacaatgtgcaaactgttgagggaacattgtataaatttatttcttggaaaagtttatttagagttttagtggagaagctagagaagaaaataccatttaatgttatttctgtactgctatattacattttaatatatgaattactctattttttaaaaatgatggataaactacacttccctttagttgtttttattctgagataaatgcctgttttgtaaatcattgttacctgattttggtaatctctattagaaagaaatctctttttattaatatctgtatacttaactcagacactgggaaattcttgcaaaatgctttacaaaagcagccattttaagctgattaaaagtatattctatatgcatgtatgtagttgaagtgctaccaaaccacgtatgtatttagttaactaaactcaagaatcatggaagtttgaagaactccaaatcacagctaagaatgcactaaaggaaaaccatatctgtttgactccagcaaattgactcgtgtgatatttttgcttacacctttctgcagcttaactgctgagttagctgttctttaatgtccttgacaaattcaggaagtcatcacatgtagataaattgagaaaaatatttctgccaatttggtcctgatcatttcttcttggggttataaatttgggttttcatgatctagatgttaataaaaaagaaccccagataatctgaagggttactcctcaatattactatgataagtttagggtctgtgagttggctgcctactgagtacctaaaagcatgggaacttttacaacatataatccaatacgtaatcactttgtcaggctgagcaagttagtggaatctttagtaatactacgataattaaatagttaagctataggataaaaggcaaaactgttttattagggaagactatgcttagacagtcttttagaatgattgaaagggtatatagatatgagaaccagtctgctattccaaataatctagttaggattaaaaataaaaattttgtccagatgctgtatgaaaatctactttatagtaggattataattattgctttgttttaataggggactcttagagacaaggaagaaaagagtagggaaacctatttgtataggaaaatatagtacatttccattcaatatctacctataatgtgagagattatgccagacgcattgaaattgctgtctttaatcttcatcccaatcttataaattagcttttgttaccactgtttccttgatgaggataccaagtccacaccaaatgacttgcctaagatatgtattcattacattttggagttgagctttgaacccagctccgtctgtgttccatactcatttcttttccctgtatcagaagatccacccacactggccaactgagaagaaaaatagcagatgggcttaaatatgggtaaatgtatgataatgtacttagtgaagaaacacctaccaaactacttatagtttatagactcttaggtgttaattttaactcatgaaagaaacctgggagtcataggtttctttcttaaatatgggtaaatatatgataatgtacttagtgaagaaacacctaccaaactacttatagtttatagactcttaggtgttaattttaactcatgaaagaaacctgggagtataggctctctcagcatgattattgtctcttccctacagtcaattcaggagggtttattgaggacctactttgtgtgaggataaatatagtgttcttgtacttaaagaacttacatcttttccttccttctggccgggcgcagtggctcacgcctgtaatcccaacactttgggaggccaaggcgggcggatcacaagttcaggagatcgagaccatcctggctaacacggtgaaaccccatctctactaaaaatacaaaaaattagccgggcgaggtggcacacacctgtaatcccagctactcgggaggctgaggcaggggaatggcatgaacccaggaggtggaggttgcagtgagctgagatcatgccactgcactccagcctgggtgacagagtgagactctgtctaaacaaaaaaagaatttacatattttcccataagacatttcttatgttcccatagtgagaaaaataaccctgtaaaaacctctttaagcaatatctcaatctgtatggcaaggaagatagatgagtgtactcatgtatgatcgtgtactgatttggagtatgttttggaaatgaagactaaaactttcactttaaaataaggttacttttctctaaaggaggcattttctttgtagagtcattatgatattatttcatagctattaaaatttgctatcttgatgcttggttattcactgaaaggaatgaaatatttattaaggtcatattactgttgtgtacaaagggagccacagggtgacttttatgctatgcctttttggtagcggtgtttctgctgggttgcatcaatgtctgtagattttattgattataattaagtcagtctgcattgtctctgagaatttacatggctttaaaaatcaatctctcacatactcattttttgaaataatttgaaaaaggatctcagtagaagggacaaatctacaactattaatcctgttgttatttgtttgagccaaaaatggtgttatttctcattaaaacatttgcaggttttaggtgttatgatccttttagttttcttttaatttcattttctctaccaccaagctttcaaaggcattttacagcttatttttatctctggtagatttctgggtatgcctggcaaaacccctagctcaaatcctgaaggttatttaaattccagtgttggatgctctccacatatatagattttgatgtacacttaataagattaggaagattttatgccagttgataccttgcatgtacatgatggatcagataaaggaccatcagagggctagtgggtctgagctttgattgcaggtagtggggaacattgtcagagctttttttgtgttactttaggtatacatttttaagccaagtttagcacatatatttatgttaacttggggcattaataatcatataagcttgtggaattaacccatacagatatagaaaagcaaagccctaatcaatagtgcaaagaccagttgtgatttttaaaaaccactgcttctgtggaagtgcaagcattgacttatgtttacattatttttctaaagcaactgatttcagtgacacctacttctgcctaaattggctgtctctgcgtgtgcatgtatattaaaggtatatattgagagatatatttgaaaaagttatagtttttgaaataaaaaataccctagtaaattgcccttttatgatggggaatgattaaataaaacagcattatttataacattaactagaattaaatatacagctgggtgagactttgtttgtttggaatttcttaaaggaattagcttcagtttcctaaactagagatatgtgaagattatgaacaccaacatattcttatgaccttgatttttgaaggtgttcaatgaaaaattcttggattatattccttaaaattcaaaatatatttggaatactccaggactatttcatgcttgtaagatggaggttatgtatctcttttctaaggcttgaaaaattaagccctggctatagcaatcttggtgttgtctacaaacccacagctttggtcacagttttttgaaaacttaattatgaatggctgttaaatatttttcatttaccaacttatcagcatttccttttttgcagcaagacttacttcctttgcttatggaaggccctaagtttgtttagaaaacaaagtctgtcttatcataattttgttggtgagaagatgcagctatataaaacaaagaacaaacctgtgaaacttctgctcctcctatcaggctctgtttgtgggaagcctaaatgcataaaatagcaacttgttaaacttagccttgactctgtttaaggggatcttttatttgcaaaatttagtcaattcctccctaaaggaaaaaaagtcattttagtggatcttgaaagcttttagataaatattccaagttttttttcccctgctgctgcaagcttaaaaggcaacatagaaggtctgaagcctggtttttccagctgtgtaacaagcacagaagagaggattctaaatatttactcctttttccttcccactattctgtgttccagtcaaacttgatttcttgctgtttgtttccaggacacttctcaccctgcattctcttagtttgtccccccaaggaatgctcttctttccatcctcacatctctgtccagtagaatcctatttgtcattcaatctgcatttaaaatgctatcagctcttcctgaagactttatggacacccccaaccaaatgtggaaaggggtccacaatttccagtgcaattaccttacctactttttggctggactcagtactctcattctaccttgtgtgttaggtgttcgtgtactcagtaatgttcggtggtcaaccgatatttactaaatgccccttattgtcaaacactgtgttacttactggggaaagcgaacggtttaaaacatggcccatgatgtcagtaacctctttcttgttttttttctccccaacttggttctgaattcccagttggtagaaatggccttataattctttggtgttctctgtgaatcctggcttcttgcacatagtagctgctcaagaaatggtcattgagccatattagttgagtaaaccagttttcttctgattgaatttgaacagcaaagatttttagctttcttctttggtatttaaataaaagtaatgttatttgttctatttgccattatattgtgatttttggtggtacagaaaggaagatttttcccattacccctaccatgtagtcgttgggcatttgttgtttggaaggcatggtaaattagcacaggtcaggcagtcaattttattgagtacctgtaggcactgtgttggcctcctcatctggctatatagagctaccctggagatcctcatgcatagacaactgtctgactgcaacctctggacaccatcagctgtggctttcatcaagttcccaaaggcatccttgaccccagaggttaagtgaatgaatctcacacctgtctccctgaaagatttctaaaatgtcagtggcatttggacaggttcacagctgctctgatccacagcattttctagaacttccttttacctcgatgggggaggaggaatgcctgtgaacttgagctgaccttcaagacgctgtagggctcttgggcaaattatggacaagacctacattgttaggataggcccagaaatccagcttgctaataaatagccttgggaggtgctcacagtcgagtcatagcatttggcatttccctgtactctagcctgtgtaggatttctggatgcttaggactgtaaccaaacttgaactcttgcctgggaatatgccctcccccacacccccagacctttttttgccatctaaatgacaaagataactatcagtaacattttgaactttcctacaaaattgcattcttcgtggtgtatagtaggaagcatttctttaccttggaactttagaagagggtctgaactgagcaaaaattagtgtccctgcctttttaacggctggacacttatcacaaagctgtgccaacatcagtgatggtgcacccacaaaggtgtttggtcttgataagcttctaaagaagcagactttgttgttgttttaaacagtaatgaactgtttcagtttcataaaaaaaagagacattctttcttaaatagaaaagggcagaaagtttatagagaataatgtctaacttgctaatgcagtgtttgcctttgctctgtggcatgtgtgtgtgtgtgtgtttatgtaggcatgcctacacggctgcttgtgttaatacttagtataaagccttaaaatggataccagattggctatgtaaccttggaagatttatttacactctcagtttcttttattcccaatcttttatcaaatggtgtttattatattctctgaaaccattaaataaaaaggactgtggaaaaattctaaaatgctaaaattattccaggctaaaaaaagtattacaataggatgatgatgtttaacccatctacttgaaataaaaagccgagcaaatcgaaatgtgatatattttagaaggtatttcttagagaaaaaaatgtttaatgttccttctagactgccattattcattgtatttttattttaaacataattatgaaatattttgaaagtaatcaagtaaatgtggtgacatttttttctctggttgagccaagtgataataacagataactgttatctataatgcatactacgttgactcattaaagcctcatctttgttaaaacattgaatataggatttgagaagaggagaagtttccttatttaggaaaggtttttggtaggtctttcttgaagaaatggagaaaatggcctgctgatctaatctgaggacgaataagagaatcctcctccctgtggctatcattcctatggtgctatacctgtgtgggtgtggatgtgatggtgtgtgcctttgttgggggaaagagagcacagattgtcataaggttgtacccttaattctcatcttctgtacttataggaactgtgtgcttgcctagagacagcagcatttggtccttgaaaaacgggatttcctgtgcaccccttagaaatcctcaggggctgatacaaagagtaatttcaaagagtttaccttaagagctttgtcactgagtgcagagaaaggaatttctgtgatgattccaaacttagagtcagtgctaaggaagaatccatagagctccaaggacttcaacctcaggggagaaaagcagtaatttatggatctttctagaaattacggttgggttctttcccctctcaacccaggcttccttagtcacgtgactggaatttaattatcagtgccataaataatcttgtgaatggaagcagtgtatttggcagtgaatttctgcttcctaaagagaaaggaacctttagaagttatttgaaataattctgtattagccacgatcctggaggcaaatggtcacagaagcagagcatggtatccccagagaaaagtgggttttagatgagtcagatatgtggatatgtgctggtgacgaatgacatgaaggttggatgtattttttaaaatacaaatttaaagcaggctgtatttagaagtttatttataattggttttaggataaagccagcctgttgatgcataacagagttgatcttttggttccattagcacccttgaaatatttaacaagaagctgactttagcatctgagcccttccaaccactgttggagatgaggcagtccatgttggataattcttgttgtaaaacaagcagacacctcctttgtttttccatcttgccccaagccctgtgttctagactagggaaggtcagctctttttatagtcagaggtctgtatgcctttgaaaatatccattcccttacctgtcctcagccagtaacaatttatgtcctgaagatagcaaggagtgctgatttaatttattttacaaacagtgtcctttcatgggagagagcaggctggtaaaattgtttcaagaatcagaacatttttcttggttatttataacataactcgaccatctagctacacagggcttcattcatttgagaaagactattgaatccaaaaataataatcctttatatttgtacagtatttgcagttttataaggaactcttcacgttcattttctcatttgatttttctgacaactccattagggtagagagggcaggtattgttacctccaaattacagatgaggaacctgaaacctgagtgcttgtaagtcctacccagggtttcatagccactcagtgactgggactggagccccctagattttaccctagctcaaaagccagtgctctttccactattccgttttgatacccttggaaagttcactgcttatctaggaaagaaaaattggtagttcttgctgaggaacgtggaaatctgaaggagagacagatctgagagagtcacattggctagtaagtaaaacaggaaaagaccaagggtgtctagggacctggcctcctgccctggttcattcactgtgtgatcatgggcaagtcactgacttctccttgcttgagatttattttcttctcttttcttttcttttcttttttgacagtctcattctgttgcccacgctggagtgcagtggcgtgatctcggctcactgcagcttccacctcctgggttcaagtgattctcctgcctcagcctcccgagtagctgggattacagacattgcaccactatgccctgctaatttttttgtattttaatagagataaggtttcaccatgttggccaggctagtctcgaactcctggcctcaagtgatccacctgcctcggcctcccaaagtgctgggattatagatgtgagccactgtgcctggccctaattcccctttatgttttttctcacctctctggccagggctctgaagatattcctgggagaatgagggtacatgccacagagggagccttgggtttacagtcagcatagccctgcccatttccagctgcgtaaccaggaaaagtggtggcttttctcagcctcagtttattctgtacagctggggtgagggtggtacctaagagaattaagtgaggtaatggatgtagggtccttggcatagtgactggtactcaatatcctctaaataaatattattctgtgttagggaaaagtgaatagagataaatgctaagggtagaggtgacgagagaagtggatggagacaaggatggcttttggatttgactgttttctccactgtaagcactgtttgttatctttcagctttcattttgtctctcatcttttcccccttcagatgtgaggtgtcttgaaggaagagacatttagaaggtgagggcattatgcagatggagaggtcggcggctaaatgtggttactgaagccctgccttgggtctgttcccagccttccttgattttgaaacacatgcgctctcagcaggccagggtagtttgcaaagctgttgtggaggcttttcccaggcagtgttacctgctccgaaagctgcaagcgtgcctacacacacttcacaaagcagatggtttcttttgctttccatgtggtctaaaaatcaaatggacttttaatggaaaggttggggaattccacactcaattatgaatccagtgcagtgcaaggggcagagagatggtataccacaccttttagaagaatttgttactcctggtctcatctggcattggagtggggaggtgagaaagaggaagtaagtaaataaagctgctactctgtgctccaaaactactgagtagctgacatctgccatttgcattgaaaactgagaaagaggagtgtggttttgtttttgattccacaagatgatgtggaagggcaaattgttttggttctatgtgataaactttgagtacctcctgtgtgcctgatactatgatggatacatatgcctagggtaaaaggatgagaagacacagatcatgtctttgagacgtttagcttgagtcacatttgctgagactgaagttgggctttgcatttgaaaagctagcatttttggatgcacttttgatgggacccaacaagagatgatttgtttatttgggaagaatcctggcatgcagtgaggagcacctttgtagctagaacatgcttagattttggtattcttgaaaatgtggcctcctccccaatgccagtgtataggatttaaaaaaaaacaaaaaaacacatctcaaaccttggcatttattgaatattaacaggccaggcaccaaagcattattcagcattgacacttaaacttttctgtattgattattattattattattattattttttgagacaggatctcactctcttgcccaggctggagtacagtgacataatcttggctcactacaacttgtgcctcccaggctcaagtgattctcttgcctcagtcttttgagtagctgggactacaagctcgcaccaccacacccatctaatttttgtattttttgtagagacgggctttcaccatgttggccaggctgagctcaaactcctggcctcaagggatccacctgccttggcttcccaaagtgctgggattagagtcatgagccacagcgcctggcccttatcatgattttgagtttatgaaaaatgttgtataactatagatgggaaaaactattattgaatgttgttgtcattttctaccattgtaattgttagggtagagtaccaaatggtatttagcaaggtaacaatgccatacctcctccaggtcctcaaaaaaggcagtattaaaaatgaacctacactataggaagccttattctagtaggccagtatttatgcagatgattgttacatttatttattgtcacatgtcatagtctgtgtaagtcagttatttcacaggtaagctacatcttcatgtggttgccttctgcaagtgtctctttccttcttaggtcacagctagctatatagtcagtcacttcctcacttgctcatgcaacaatttttttgacacctactctgtgccacaaactgtaatagtcatgccatcacgaagctcatagtccaggggagaaagaaaagcaaagacaatacagcttgatttgtgatagaattaatgcagagtgccccgggctatctttctgcacgagaccccatcaaagccaagttgcagaggatgagtgggaattgagaggcaaagggttggtgcaggatggagataggaagcatggcatgtgtaaagaaaagcagagaggttggggagaacagggtgtgttccagcagttgtgcctagttctgcccaggccgaagagcaaggcaggagtccgcttaggaaagcctgcagctaactgctgtgtcacctctagtggaaggcttcatggcagctggtgaaagtctcctagcagggccatacttatcttttaccgggtgataattctcccccaccctttttaatttttgccattttttttattataaatgctgtcattttaagttggggcgtaaacgtagtatgcaggaggcaggcatgaattaatgaatagtaaagtcctcttaaattgccttataaaactaagtcctaccaggttcccctttcatctcagcagatgttttacaggatagaaataaaatctattttggttttttagcgtaccagaagataaaacatctggctgagtggattttctcccctctgattgcttacttccacttaaagcttttttcatataaaatttattgatatttttaaaaattctttcttattataaatgagtaatattatcttaagtttagaaaatttggaaaaagaaaaactacatagatgaatactacagttaaccttaatcttactacttgaagaactactataaaatgatagatggatattctttaaaaatttttttttctatgcttgtatacattctttaatatgagcagaatcaaattgcaataaactgatttttaaaaaattcatttattcaagagatacttgggctgggcgcggtggctcatacctgtaatcccagcactttgggaggctgcggcgggcagatcacgaggtcaggagatcgagaccatcctggctaacacagtgaaaccccgtctctactaaaagtacaaaaaaaattagctgggcatggtggcgggcgcctgtagtcccagctactcggcaggctgaggcaggagaatagcgtgaacctgggaggcagagcttgcagtgagccaagatcgcaccactgcactccagcctgggcgacagagcgagactctgtctcaaccaaaaaaaaaaaagagagagatacttgttatgtttccgtgctttatcttcatttttgcttggtaaaacctttcaaatgccctacagggaaatctggcaattgttgggaatatcaaacataggaaagtagaagtaactgtatttccctccttcccacatttgggtctctctatttatgaaaaaacgcaaaagaagcttatccggagatagttcaaagattgctttaaatgtgtcaagttatttcaatctcctatgccttctgtacacatcttcaacaggatttggtgaattcacagtgagagtcataataataatcgtgattttgaaaagtaatagttgtctaacactttcccatttatctagtgatgctatatgcattatcacatttaatgcttaaaacttgagctattgttatccctattctaacaagataatcaaagcatggagaaattaactctgtcttgctaagatcctcagatatgttctgaatcataaaaggttatgttatatttagcacagtgtttatagtaagaatgttttctctattgtgtgtgtgtgtgtgtgtgtgtgtgtgtgtgttggaataccattataatctataagtctctcttgattttcagctagtgtgactcccctttccataactcccacctcaaatttgaaccatcctgaaagagaggagctttaataaaccaactctattattggttctgtaagaccttgacatttgcaaactttattttttgccttttctcccacacagtagccactcttgcaaatcaaccttgggaagttagcattcttaatgaagatctataggagactttatccttagacagtaaatcagctctttcaaggcaccattcatctcccttcgagcgcatgaattggtatatggcaccttacaagagctcatttatcttatgtgggtccctagttattacttttgcccacttcccctagatcgccagagatcaaggcagaaatgaagtagaggatggctttgcactttgaaaatttgccaaggtcagctgaggtacctgtggcattgacttagagctggtgttgagtattacccataacttttagggtgatatcacccacactggcaaataattagtttagtttgtcaaagcatttgaattgtgcttggttaaataaaaatggctagaaggtaaagtaataggggaaaaagtttgttaccttgagaatttttttcctctttaacatttgtccaaatcatattgacatacttttggcttccatattagtgataaggatgaatttttactaagtgcctaggctatatgctaggtgcttttccaaatgccttaaaaaacaattctaccacgatataggagccattatcctcctttcatataggaggagctgatcatcactgatgttaaataacttgctgaaggatatgtgtaaccagataggtggaatcaggattcaatccgtgtatctccagtgtttgcccctgtgactgtggtaaggctgcagccttattggaagtcatccacttgtttaaaaggatgatgcatactctgtgcataatgtttgataacgaattaattgaagtggaatagcatgagcttacagtttgcagtggaccccgaagccaggctttcattgctaaaggagctaatacttgtttctgtggtttgggtttcctcacaagcagactctgaaacaaggttttgagtgcaagtattatagtttatttgggaggtgatcccaggaagtatggtgagggcatatactcaataacggatgccctaatgagcagattatcactgtgagagattgggctccctgcctgtgggcacctccctgacagactgtagaacatgcctcattgtttaactgagaagcaactccttgtctttcactagttgagagttgctcctgagtgcattaagtcccctgccctttcagcctgccccactttgccatgtggacagagaaagccctgaggcagagagactacggtgtttgtgcttcaagttggacagcatgtctgccccagctccaggtgacctccacggagtgtgagcagcatgtggggaggacaccaatagtttctgttacatttgcttttgaagccagcatcagtgctgataaagatgcatccagactgatgcacctggctttgggggtgacaaccttgtataaacaagtgagacaggagaggaggcagtgaagctaggattcctcttaagagaagaaggtaggatttggaatcaggcagtctggggtattgttcctagttctgtacttactagctgtatgctgggcaagtcaatttgttcgagtctcagttttctcagctataaagtggacatagctgcctcacagggatcaaatgcaatgccattcgtaaaagcgtttgtaaatgataaagcgacatgccacctttgagtcattgccattggagctcctgattgaggaatctggtggagtactaggtgctagcagagctttgagggcagctgtttgctttacaagacacacctgaaggctgctatcttggctcaagaagcctgtcctcaaatatcctgacgctttgaaagtcaagggtaagggattcaaaccctatgtaggcccctttctctcatctggtttctggcctactgagagttgctaaccctgctttgcaccaggtgagactgtatttccaatagccccctatcgagtgcagagatgttttggggggtgaaagttgattttgattggatttacaaccccatatatcaagcactagactaaaggtccatcagcctttagaagaagccacagtggttttcatttctttcactctgtttatcttctgaccaaaggctgactcttccacaggcggctgatatcgagtcaatcaggactctttatgcattatgtgaatttggccctcacacagctgagaatggcctgaatagctaagagagcatcctctctgcagcacctcttgactcctcaggacgagtcacactgaaagaggcaggtggatgcccctgattgtgtcccctcccatccagcatcatggccagcactgccattccttcaccccacccaccccagttagcccctggcttgaactccgtcactcaagagggaacattaaaaaccccacacctctgactcatactttgattttgtggcctaaagaggcaaagacgccgtaaggagcttttaggggccatcactatggagcctctttattgcccagcaaaagccttaaatgataatgggaaacctcactattgattggctgactcttaattcttcctctttgggttttgaagtagaagtgatggtccagaatatttatattactcattggatatattaaattaaacatacaaaagtcctacagccatttaagatggggttgcagcactggtgaatacgactttattaccaagagagaagagtagcttttagttgtggcttagctggaatatattgatgataagaatggctcagcagacagaagtcttgggactctcaaaaaggctccaagtgtgctttcttttaaaaaagttatttaggcccatcctttataaacacccaagtagatggtctgatggggtcatggtaacaaagattcagcttctatctaggtggatggtaagacccgctaacatcttggcaaaccgtgttattgggccattaaggaccagtgcttgaattctggggctgaaaattcaacgtattcccttataagaaaatgtctgctcatgataagaagtcacacaaagtacaacctcactatagtacaggatttagaatctttatttctccatctcatcttaaacccattggaagttagcatggattagagggtcggttgactcttctcaatgacggggctggcatataagagctaaaatttttattattgagttactactcaaggttttaaaagattttgacccctggaaaaaaatacagtgcttgaggcagtgaaatagttaatatgactgcctcccttacaggtttccccagatatgcttacttgctgtacaatggataattgttagctcttgttgtgcagatgctgttgcagatggagtcctgtacctgcatgcatagcaaatgaattagactggcaatcccctttataaagcataaatatgtaatttgttcagctgttgtaattaaatatgtatgtgtgaaacagccaccattcaggtcattaatgatgcgccatgccaaattagagcttacagacagtaatgtacattgttgtgcaatgagggaattgcaaataacatggctaagcctttcctagtaaagggatgcattcagcagctttaaaaagaatatttacatttgtaacataatttttatttagaaggtacatttttgttcattgtgaaagtctgtaagatggaattactttcatctccactttagttttattattgttttaacattttatcatacaaatgcaacagactttattaaacatgctgcttggtgataagtgttaagtatctacttacatataaaacagcagttacccctggttttctacatggctgtgatagaactgatgtatcatagcactgtggaatgtcttgataatttcattgcattaaaaaaaccacctcataatatttcaactctattccctactgatacataaagaaattcctgtgatagtaaatagtatttttatttccatagaaattgggctgagaaaaatgcagttatcaaaatataaacaaataaaagtggtaaatgtgcctcttgtgctttaattcccaatgaattacttgtgaatccaaggaatttcctaagaaaagtgtcatatatgggtcagaatggttgctttttaaaatttaagactcaaagtttgttaagtgaatgcacttgggaaaattattgctttgtcctttttctccttggttttaggttacagtctttgaaaatacttgaagctgaaatttaaatatataaaaactatttttactttaaattctttctgtatttgtattttggttgcctgcagtctatttttaacatacatgttgttttgacggttcatactgtgactacatgagctaaccatcttgacctttctgtccaccagggcagcaggaggaagcatcttagagttaattctgtcttgttcacagctgggaacagaacattcctctgtgatccccttgcacatgattcactgggatctcttggaagctggacttgatactataagtcctaggcttctaaggtcgaacacagatcaaacttagtggcatgtttggttaagagttagattagacaaaaccaatgaagttgttaaaagtttcagaaacaattgaaaatgaaattgatgcatgattttagctttgcaacaaattcaactttagaaatatccttaagcctaagattaatcaagattcaggaccttgaagaattttcaaagttagaactgtaatttgtgtagggacgtaaaatctttattttcaacaaacagcaaatgtttccgttaaacaaatgtgtattttatttgaaacagatgaaatcataacagtttggcttgctttacctaagttattgttccataatatcaaaaaaattacttaaaataagttcttctcttcatattccccgaagtttttgtccagttttctgtatagctttttggttcagccaaaaagagacatttcatttgcagcattagggaaaagtttaattattgtttatgaagatagaaatgttatatgaatgacagtgatttaaaaatattattacttatgattgtagtcaaccttttccccgaatattgaaaaccatgaaaaggctttgccctgacagctacatgcttagcattaactatacttgcaagttttccaaaaagatttttttcaagacctgttttcatttacttcctttatcctaattagagatcgtaatcttttgatgggcagcttctcttatttctacctgtttcagtactatagtactggtaaaatggcacagtgtatattttggttcttggagggagacttgggaggatccattactttaaaatattttgttgcagccacctatcagaggtttcttttaatttcttttactgcaggaatttcagagatgcttaaattatagaattatggactacagaattatagaatacctagggatgggaattgggaggtttgtaggaggcgtgcacgtcagaaggtgggagccatgcagaaaggtcacaggtcttatctaggtagtttcaaggagcaaatgcttgttttgcagtagtggtggcagggtggtttggctcattcaagccccttgctctggaggaacaccgataaaccatcaggatgtcttttcgtcttgcgttaactgtggcaaggctgtgcattaaagaacataaccatcactaaaagggtgggaacaccccagcgaccagtggccagtggccaggtgctttatggtaacaccacagacatgcctggccaatcagatgtgatcttttgctggcacttgctcctttggcccccactgcagtaaacactttcccttggatgttggttttctgttgtgtctggcagccacacagggctgcttgaactttagccagaggcaaatatttatacatcagagtgtgcagtgttcaactggtcaggcctgagagggagagggagagacctccgtgccttttagccaaagaggatatgtcctttttttccccttccctttccaccgtgacatggtaaagtgggaccatactggatgtcatttgagcttgctgcatgtgcttctctccaaaacgtacacgtgcgcaaacttgggatgtgctttcaaaagagaggacgtcctgacatttctgcctgctcctttaattcctcttggaaagtttacggttaatattttccctggaacattgtcaagcttttgacagtgcctgagtgtatgccgaactgtgaaattgagccggagaagcaagttgtgagaaatctgtttctactcagatccgtaaggtttatgggggggggaaaaaaaaccaaaaaaaaaaaaaaaaacccaaaaaaacaaaacaaaacaaaaaacaaaaaacttcagaggggaaactgagaatgggactcggcttgcttctcctggtgtgggttcaggccgccattttaaggagccagtgaagggcgacgttccgctccttacatggcggctgtatttactcggccgcagccaatcagccggcagtgccaagccacgtgacatgccacgagggcacgcacagccatttccttgtttctaaaaaacttgctacctccacagagtactttaccttgttttgcatgccaaatgttcttgctgaatgtgtctagcagactggcatttgtccataaagttattttagtaggtaaaaagtctctgagcacttgagctttgtgcattctttatgtaaaatggatttcccttcttggccagaggccaagggtacagcacactcgctgggtgagaagagagcttctctgctgagaaactggtggaccgacacactctaattttttggcttctgaccaaacaagctagaaggatgccaaaattcaacaaaataacacattattgtgtgataggagccgtgctccaagagagcaggaactcagaggaacttcatactggccccttttaaaaaagcattgtcactttggggagctttcttagagaaacgagaggaaaatggtaaaatgcaacctggagagtaaggtataatttgcacatgaacacgaaggaaggaactgaaagaaaacagaggagtttaaagttacttctatgaacttttcccagacataacacacagttctctgacttgacttacattcttttaaccctgaaagttccatctctgtgtctgagcagaatgctggactgcttaacgttaatatgagaactaatgtgagatttaaacacttttaaaaggttttaatgtctaaggatagctgcaaattccaaatatgaaaatttggcaggcttttggggggtaacagaaaactttttaaacttacatgctttatctttgcaccctgacatgtgttaagtgagtcaaatcttcctgttaattactcttgtgacattagcaagttatgtaagcccactatacctgtttccacatatgtataatgaagacgttaaagaagataggtagtagtcttctgagccctaaagaaattgaatttgaataaacaactggaataagtataaaatgcatttctagtttttatgtggaaatttgtcaatcaaaaggaaaaaaaggggaatatctccagttgaagccaccatcatccttacccagactacttgggtaatcctgagtattccctctttttccattcttgttccttcacaccatagccagagtggtatttcaaagaagttagttagtttatatcactcttctgcgtaagaacctccaatgttttcttatgcatctagaataaaatccaaacttgttgcattggcctgcaaagacactgcatgatctgtctggcttctgtatctacctttctaaccccactttttttttttttttttttttaaccgtgactccttagatgctccagccatactggtttcctttcagttttcagaacctgccatcccatttgctacttgtctgcttagaatgcatttttcccagctccttttgtggctggcttattcttacctttcagttctttcagttcgaataatagccctgtaaaagagtgttctgtctaaaattgtccttcctgtttatattttccataatactaataacagtctgaaatgctcttgttaatttatttgattactcattttatttatttatcttttgcactatgatgtcagtcccacaaggatgcaaactacgtttactaccttcttttctaccttttgcacttttcctaatcacattgggaataaaatgttgggcaagttagaatactccaaaatatttcatttaccttaaattttactcaatcctacattttattacctatactcataagaattgtattataaaatacattgttaaacgaatgttttcagtgctccattgagagtcggtggagcacactggttgggagaagacagagctgtgagccatccgtctgcctgtgcttgagtcttggctctgccattgactagttgtatgaactgccgcaggtggttcagccactcagaacctctgtaaaagtgagatgtaaaaacactttctacatcataggattattgtgaagattaaatgtgatatgttgtaaaattctggtcacacaagtattaacttactgttatttttgctgccactgctattaattaatggcagtgtggcggctcagtactaggcaatgggcgtgcaactgtgatgagaaacgcttctgtccattaaatcgttcagtcagtggaagagacatgtatgtaaataggtaagttacctaccatacattgtgccaagacctctcacattatgtgaacagaatattaaagaattataaaagagggagcaattgcctctgttaagtagacagcaaagatgccttataggaagtagcatttgagacagattaagtttctttttaggtaaaaatatgtcccctagagataataataaaataatagcaacggatacctatgtacttcttttactaatgcaccagagtctgttttacatatattctctcatttaatccttacagcaaccttatgaaacagtactgttatcaccttgattttacagagaaggaaagtgagccaaagagaggttatgtggcatgcccaaggtcatataactattaaatgtcagtgctgggatctcgtacattttcactcttaggacatctgtgctatccctgcttagtcactttggcatcccagtggtgctgtacttttgctttcataatacatggaagccctggaaggattcagtaaagagccagtttcaccctgttagcccttgttgctttatttgtaaaatgtcaactgtaaaagtatgcacctaccttatagggtgattatgagaattaaatgagataattcaggtaaagtgcttagcatattgcttggcatatggtaagcatttaacaaatgttccccgtaactactactacgactgctattattattattatgccatattgaaatgagatctgtgatcccttgtgacctgcccgagccccccttctcatgttagcatccatgctggtatatccacttccaaagagaacaagttcccagcagttgaaatggcatcctacccaggttgctagcaccatccctcagctgcttctccaactgccataactgccttagtcatttaaaaattactcttctcgttttatatttcaactcagaaatcgatgcatctgtgaggcagtttgttttcctggggaagtgtaaggagcggtggtggtggcatggagatgcgctccgtttagactcaatattgccacccactccctctgcagtgtcagagaacagtctcagaaagatctgttcctttctttctagactcagtaccacagactggcctatcctctgcaactttgcttagcagcaggagtagagaagtattgattgcccacaacttgcctttaagtcttgtttctgtggtgcaggatttttaaaaagcatttaatgttttccctgccttgaagacttcagaaccgtataaatgccactgtttaaagtcctgtccctgctgaaaaccagggcaggtctcatcacagccccatctccattttccttttgttgaagtgggtctgtgtgagagcgggctgtgccctccttctccacagggtggggaaaaggcagccctgtagtaaggaggttgaatagcctcgctcactttgcctcctgcttgaggtggactccgtgttcccagagatgttgggcctggtttagccagttgttaaactgaagcagggttagcttacccttgaagtgtttttgtttgtttgtttttgttgagacagagtctcgctctgtcacccaggctggagtgtagtggtgcgatctcggctcactgcaccctccgcctcccgggttcaagtgattctcctgcctcagccccggagtaactgggaccacaggtgcgcgcccccacgccagctaatttttgtatttttggtagagatgggatttcgctgtgttggccagcctggtagttttcttacatgaccatctttagatttcagagaaggaagaacatgatcccagaaagcacacagagttacaacatagcaatagcccctccgagctcaacaaaaacatctattgtgtcatgggctgcaaagaaagaggtatgctgggaaccaataacaagatgctaggaatttttttttctgttctattttagcttgaaaaacttgttttccccatatgagttgtgcatttactcttggatcttaaaagaggacaatttattaatctgggtttaaatcctggcccagccacttggatgctgtttgattttaggcaaattatttgactttgtgctattgtgtcgtcatcgacatcatcatcatcgtcatcttttagctgaattctgtgactcttctagggcatttatggtagacagaaatctgttcttgtaatgtagaaatcagtcatttagtgtatctgaaaattcccatcttcaaaaactagggccagatttagtcattcttttactcttaactgttgctaccaggtcatacctaatttgtatttttccaagttacgtatattaaagtcatactaattggtgcctgagcaagttttcagattcctgtttgtccgattccatctgggtcaaattacttaggtacaataagtgcttccttgtctgtaaaataaggatagtagtatccatttaataggcttactgtgaaaatgacacatgatttatataaaaaatggccagtatggtgtctcttaaaaattgtggggcattatgaccagtcaggcaaataagggaccaaggagataactgtaatcaaatcaaagtcctggtatcaggaggtatagtagggtaacgggtcaaggaaaggcatggtcttctgtggcccagagaaagcagtggtcttggcaggtcgtgggctggcaaggtatggaggagacagattcagaagctaagcagacaaggacaaggagccctgaagattagagtgtggagctggggcctgaccttagggcagtgactcttgcccttctgcttctgttctgctctgcttggattgcatatggcttcaggccctggagttacaggtttggagagagtgctctagagtgtggttaaaagtcattggctgggtgcagtggctcacgcctgtaatcccagcactttgggaggccgaggtgggctgatcatgaggtcaggagatcgagactatcctggccaacatggtgaaaccccctctctactaaaatacaaaaaattagctgggcatggtggcgcgcagctgtagtcccagctactcgggaggctgaggcaggggaattgcttgaaactgggaggcggaagttgcagtgagccgagatcgggccactgcactccagcctgggcgacagagcaagactccatctcaaaaaataaaaataaaaaaggctgccataggttgcgtctccagctttcaagtcagtagatctatatcagtaagttcactgctagtgttttactatgcagactcagtttgcctatattaaaaagacttcctgtcttcttacatccgaggagactggctaagcaggagggctaggcgtgttgaatcctagaaactcactgaatacttactgatgaatggactgggtctgggtcacatcttggatctggggaactttagttcacatttacagtcttaggataaggaataatgtcacgtattgcttgttcttcttaccgtgctgtttgattttaataatgatatttagtgaatttaatgaaattaaatgtgatattaaagaataatgatattttaatagcattggttgagtgctgcaatgtggcacacaggtagcgttggaagcctctccatcagttacctcatttaatcctcacactacctctttagagaggtggtactatttccccccatgttttactgaccaggaaattggcaccaggcaggtgacactagaggccacggtcttaatgaccacacaacatggtcttcatcagaatagattccatctccatgatgctttgcactaattaattctttccgcagcagcaccatgaggttggcggttcctttatttgccagctgtttattatttctgtgctaccaacattatgccaggcatggattggagtgtggaatcattcctggaagccaggccatgttcctgagttgtgctgctgtaagaattgggatttaaagttccaaatgtgtggcttccagtattttccttctaaaacagacacacgtcttatcccatttttatggttacatcacaagaatgattcacatttaatcaaacaagtcaggcagaatgatagctaatctatctcagggtttgttgcaaatgttatttacacatattgtgatatacctgattgtgtctaggcatccactgaaacaaacaaacaaattttatgacctgtagttacacagtttctaattagaatatgtgggaaatcagggtccaggaatatgagttgaataacatacattcactctagaccatatttggttaccctggtacttaaaatcttagtcacatgatttagacttcttgcaacaccaacttcttttcttcctttctccatggcagtctttgtatcatttttttctgctgagcaccaaactcttctggcagtttttaaattgaggtttgtagttttaatggtctggtactataaaaagccaactttgtgccaaaatttttccaagaccagacatgggttttgacaccacaataaattaaagataaataaagaaactggcagtgaaaatgaaggatttttttttttttcaagcaagcaagggtagcctatttgtaaatttcaggcatgttttcttagtactttagctcaatgttacaatgcttagctacattaatctgttactgggtaactccagaaagaatgttagaccaaaccattaagagattggcgatttttttcccccttgagcattattgaaatttgacaacattctcatagtctctgctttcttttaaggatttggctatcaaaaatacgggtaagtaaaaggaaccaagagaaactaatgaccaaatgaatagtagtatttaaagtctcaagttgctatgatacaggcttcaccgtgacctgagtggataaatgctaaacgggatttgctttccggagaatctgggtgcctgttccaccaattctgtttgtctctagcctggtttttttttgcctcctccctttcccagcaccatttattttgggttctgagaaacagcttcctcccattacaggcaccaattcaattaggcaggagatagtgctgaaggtttttgtttccatcagcttctgctgtgtagatagtagctctgtttgaaaaactttgagaagttgttgtgatgtgcctctttctgggttccgatcccttctcagcctggtgatgccatggcattcaaatcaatttgtttctcttcccctcccctaccctacatccatcatacaaaatgggggtggttgcactaatcagagatctgcttttttccccccacagatattggtaaattattaaaaaaccataaattttcttctagatgctaagtaactcttaacagtcttctgagtacgtgagtttgggatttggccttgcccttacagagacctgttaacttttcaaacccgtgacttaaaatttactaaaaataacaagttttgttgttgttgttgttttgttttttgttttttttgacatggagtcttgctctggtgcccaggctggattgcagtggtgcagtctcagctcactgcaacctccacctcccgggttcaggcagttctcctcctcagcctcccgagtagctgggactacaggtgcgtgacaccacacctggctaattttttgtatttctagtagacatgggatttcaccgtgttagccaggatggtttcgatctcctgaccttgtaatccgcccgccttggcctcccaaaattacaggtgtgagccacagtgcaaagtgttgggattataggcatgagccactgcacccggccaaaaaataacaagttttgaagcatattagaaataatccaacaaaaaatttatttttctttagtcttctaaattagcaagttttaggccaccatgtggaactgaacctttttggaggtttaaaatgtcaaaataccttgccaggcgcagtggctcatgcctgtaatcacagcactttgggaggccatggtgggcagatgacaagttcaggagtttgagaccagcctgaccaacatggtgaaaccccatgactactaaaaatacaaaaaaaattagctgagcgtggtggtgggcgcctgtaatcccagctactcaggagacagaggcaggagaatcccctgaactggggaggcggaggttgcagtgagccgagatcgtgccattgcactccagcctgggtgacggagcgagactcttgtctcaaaaaaaaaaagaaaaaaaaagaaatgtcaaagtaaggaaggagttgtgtgtattttcagtcttgacttcatttactgtaagtgccgaagcaccaagtgggaggtggtttgggaagtatttctgatctaaagaggaaactccataaatcacccatggtaatgtgtctcattagcaacactccaagtagatgaccaacattccgaggagatgttgctcattttcatcctgcatcttggcctttgtgcttacctggccctagcttagattttaaaatttaaacatttttgtttctcactcttgaaaactttggtactcagattcttaaactcctctgttaaatagttttcagattagcctagtatagcgttcaaaactggaaaccactgccagaatcctctaatgtgggggaaaacatggctattatcattgaatgtgcctccaaaacctatcaaagttggcagatgtccatgtgtttggcttggaccaatttataaaacgttcacatgcttatgaaaattgttatctctgctattcagaatagttgagtataaaattgagcagaaaagcataataagagaagaagctctgctatgacttgcagtatttttcttttgatcactgaatactacaagaaggatcttttgtttgcgtgtttgtttcaaacttttccatgtatagaggtgtcttaggtgaagtgacaactaatgacatgtggaagtcactctctctggtgttctgtttcttctataactaccctcccttcctgtctaaagagagagggaatagctcctgaattaggtgaaacaaatagtttttaatgtatggtaaaaataagtcattcttcctctgttggcaaaattcattgtaggtgcctttcagtgtagttctgcaaatgttttttccattagttggagtagaaaagagatgaaggattatcagttgtcaggtatattttgcttctaccaaagatgatacataaatatgaaatatttgcagaacaagctgcaaaaccactaggtcctagaaataaaattctgatggttaatgcatttactttataatatgaccactttttccttttaacattttccccagtatgtccttagtgcctttcctggaaataccaaaaggcaaacatcccactttaatagaagtgataattgtagtacacattcttaagagaatgcctccttatgcctacatttttattgagggctttgtctacatacatccagagtcaacttaacttttggacccaattaactgattggcctgatgaatttaattaaaataggggaagtgcttgtacagagaggaacagcattagtataatgtggtggttaagattaacaagattgatttgacttgataattaattaatttgattaacaagataatttagtgtcaggcggagacctaggttcaaatccttactatagatgaccttggttttaaactctttaagtctcattttttccccatccattaagatgtcataaaaacactgaccccagaaggtagtgagaactggggagataagttagggaagtgctcagcacaacacttgggccagtcactgatggacggtagtaccttttgttattttctagtatttttaaagtatgtgttgtctgaaagacaccatgtctcagatcgctgtcagatttctttgagtgaacagagtcacttctttttctgaagacatcagtagtgcaagcatcatgtctttgccttgtattttgttcatctttttgcagttggaacgtttctccttcccttatttatatcaactttaggtcgtgttaactgtccctatattttaaaaaataacattttataatttccatgcaaacttaattaattttcacaaaacccctgtaaggtaggcaaggtagatattaggttatagagataaagaattgtaaaactggaaagaaatatggccttgacttcaccctatcattttgctggtaaagaagcaccatgttcaaggtcctgtatgtaggaactggcaaagataacaaagtagatctgaactcagtgcccttcccactatcccatgctgatcacttttctttttaattaaactgccctgttcctggccttccattgacaggttgcttacagctcttaatttctagggttctcaaaactgtttaatgagtgtgtctggattaaatccagatactctgactatatagagctcttttcattttcaaagatatctaagtaaacacagcatagaattcttcacaagttcctatcaatttccccttttgaaaattatggctcttttctgtagctttctgagacatcaattctgtgaacctttgcttctttctctcaccacctcttgttgtatgttattctgacttcaactgccacattttaagtcatggtaaccaggaatctatactgaaatattttcattaattcttatttattcggcagcatgaacagttgcagggattcttggtgtacatttgtaagttttcctttcctgttgtattttatggaatgttaattttgctcaattgggattcctttgtcaaaactgctgtgatgacagggtcttacggcatcatgaatgtgttcccctattaattaatattatcttagccatataagaaaatgacaggcacatgcagcttgtaagtgaaatgcaacccaaggagccggaagtctttcacctaaaccttaattttgttcaatcgtttgtatttcaaggtctagtctgtaatttattcccataaacaatgttgttctcctgacctttcttgtgtaccctcctctgtctgtatattatcattttccttatttttgtctatattgtgtcactaagagttaagacattttaaaatgtaatttggctacctcatccattttatctgcatttaaattgtgtttgaaaattttacttttgcagatttataaatttttttatccccttacagttttagcctattcaaaggggatacttattttttgtaaatgttttataataaatttaccattttgtgaaaaacagtgaaaatttacatactttttagaaccacaagaaatatctcttttaaaagctactttttaataatgtcattttggaggctagaaattcaatttcactttttattaacttagttcttgtgtgagaaagaaatgtgacgtataaagaaagcagagtaaaatactataaccgttttaaatcagtctggattttcttacagagtaactgaatttttctgtaccatagatttgatctttttagtcagactttgctttatttctctacagatgaattcagaatccactaatgttgtttgcaaagtatattttaaactctgtaattaacatgtttacaagtttttaattttacaaagaaaattaaaagtcagtttgctttgtaggtatgtttgttcttgtcttatgtgtaggtgctttatatgtgttttaaacagagtttaatggtatcttctgagaaaattatagctttagtgtgctactgaaaacctcaagtagggaatcaatacctaaaatttgatttggataagaaatttgtataaactttataaaggatttttgcagggcaaaaatttgcatcctcatgcccaatattctgccttacttagtaaattcctaggtcatggctatggagctcctaattaagttaaagaaatcttcacttgaaccagctaaaagctggtttaagataaatttggaaaatgtctagaattgataatatattttcttttagttttctctgctactcttaagggtacatgtaaatacatttcttagcgtagagcaaatgttgcatgcaatatgactggccagtggcattttatttcaaagatctcatgctaatatataggagactatatattatttttttttgtatcagcatgtttaatttttttaaggttaactgtgtgcaaatgcatatttgctgtccaaactagttaatgggcttacaactgaagggtgtaaattctagtatctgtattctccagcttgaagcagtgttgtctgaagcctgaaacggctgatgttaatcttcagcttattttgttgatatccaaaaattaacttgaagtagaataaaatgtgatgtaaatcgacttctctgcatactcataacagtgtcaatagttaaaaaataaagtctatataggtcacactgtttaaaaccttaaaggagtgtgtgtgtgtgtgtgtgtgtgtgtgtgtgcgcgcgcgcgctgtgtgtgtgtgatgcatatgtatttgtgtttaattaaacagagggaattgctggcttttaatcaagttgatgaattttgaatttccacttcagtgatggctctaccttaaattcatttggctgatgtgatagcagtattcggaatgcaacgaagagataagagtttggaccccatatttataatattccagaagaatttcattatgtaatggctagaaactcagatttcccacagagttgtagagtgtgcagtttggcatgcttatttactactctggttcttttttttttttttttttttttgagacggagtctctctgtgtcacgcaggctggtgtgcagtggcgtgatctcggctcactgcaacctttgcctcctgggttcaagcgattcttctgcctcagcctcctgagtagctgggattacaggcgcctgccaccacatccagcttatttttctatttttagtagagatgggatttcactgagttggccaggctggtttcgaactcctgaccttgcgatccacttacctctgcctcccaaagtgctgggattacaagcgtgagccaccgcacccggccactactctggttcttaatagtgaaagatttatacctcaaaaacactctgtagataaagaaggattcaaatatgattctcttaatattgcatggtttggctaagaaaccttgttattattcaagttactgtgagtcaagggcttgcttagaaacagcagacgtaggcatggcgcggtggctcatgcctgtaatcccagcactttgggaggctgaggcaggcagatcaccaggtcaggagttcaagaccagcctagccaatatagtgaaaccccatctctactaaaaatacaaaaaattagccgggcttggtggtgggtgccagtaattccagctactcgggaggctgaggcaggagaatcgcttgaacccgagaggcggaggttgcagtgagccaagatcgtgccattgcactccagcctgggtgacaagaatgaaactatgcaagaaagaaagaaagagagaaagaagaaagaaagaaagagaaagaacgaacagacatagatagtctattcccacttcaagtagagtaaacaggcaaagtggggcaaggaagagcggatgaaaaagccacaaggcaattcattaacccattttaagacattttcaggcaacttgtgaagcttcaaaggtcaaactgaccaacatttaattcatcacagaaaaaaaattctgggagaagaaaaaagaaaacttgaccttcacggtttaacaagttttcttaaaatgtctttatacaatcttgatagagttctttgctaacatgattcatcttccaatctatgcaaatcagacttttaaatcatacttggttttatataagggcttccttctgattgactttggagcaggtaacacagagctcttgatggcagtgccttgctgtgtgttctgttatggtgacagagagagcaccccctgcaagggtgatttagtgtgaaagtactagggtctttgactgagaagtcaccaaaaatcaatggctgtattgttttgaatgttatctgggcttgcaactgagaataggacctgggggttttactctttttattccttttcattcgttcttcactctctatctgaattgcagtcgtggtcctctggcaggcagcgtctgtatgcgaccggaaggcagtgctgaatagtggggtgatgttggcagagcactttccaggcatgctagcacctagcgcacaagcagagaactttgcttctgccaactgtgacttcagaacccaggtctgttcctgaacctggatgcccagctgtcagtgtgtcgccatatgtcaccagcacatggcaccctaattaaaatttcaaattgcatgcatttgtgtttgctggctggcttgcttaaaaggcagagacctcaccaccccggcttgcccccctccttcatcactctgaagtattatgtttgccatccttaggaatgagttggaaaacggcctttgcccactaaaaaatcatcactctccaattctctcacctcccattttgaaataggaatagtccttattttaagggagaaggagtggtgtgaagaaacgtggctggtacccttcagtagaattctaaagaccagaaatgtggttctcgtgtttccagtggttcatacagatcactcttcaatgctgtcctctctttgtgaatatgtttagctctttttatgtttacatttgaaattttaaaataggattagatggagcattcttggaaaacagtaacaacaaaatttaatgaagtaggtcccttcgtgcaaagcaaaaaagacatactgctggttgaggatatctgttaatagctaccatttattgatcatttacaaaatgctaaggaaaaatgcaagtcgatttacctgtgttgcctcatttgattctcacaccacttctattctgtggcaactgctaacactctcattttagagatgagcataccatggcttatgtagcatttccaatcttatgtaccgtatctcgtgagtagtagacatgaaatttgaactcagatccgtttgacttgagattgtatatactacattgcttccttcctgggaagaaaatggaagttttttctggttccttctaatcgtagcttcatagatatgtggtgtgcttccaagtgtgtatacttttccatgtatgctaagttttggtgatgtattaaaaaaaggttgaatggccaagtacagtggctcatgcctgcaatcccagcactttgggaggccgaggtaggtgggtcacttgaggtcaggagttcgagaccagcctgggcaacacggtgaaatcccatctctactaaaaatacaaaaattagccgggcgtggttgtgcgtgcctgtaatcgcagctactctggaggctgaggcaggagaatcacttgaaaccaggaggcggaggctgcagttagctgaaattgcatcactgcactccagcctgcacgacagagcgagactccaactcacaaaatatatatatgtatatatatatgtatgtatgttgagctagaattatgcaattccctattgacccttagtcaccatttgcagtgatgacaaactggggtattttaaatgacagcaggaggcagtgcagtcattagcagcatggactctggagcccagttgctgctttagatctcagctcccctttgactagcgtcatgatcttgtgcaaatcacttgaccgctcagtgcctcagtttcctcatctgtatgggataataatattatgagttaatccatgtaaaacacttagaatcttcctcctggactattgaaagtacccattagaggttagctaaaattaatcaacacatttttagacttcacacagaaaaaaaaagaaattaaggaagattaattgatccattctttagaaaattctgatactaaacactggcctttatatagcatctgattaattaaaatgagtcaccctcttgatttgatctgccagtcaacaattgctgatggagcttctgctataaaatgatgtatacattctccaaaataaaaaacagtatcataaaccttaaaaaggtaccagtcatgttgggtagacaagacatatctacttaggttccacaagtgctctagagttgtttacctattcagtccagtgaattatcacaaccacataattaaatgtgtattcatccccaagtaatgacagaaaagatgaagaaaacctaaacaaaccaaaaaacctccagaaattttaacaatgtgtataatgctaataatatttctaactgtgataatagcagtaatagaaggtagtagtactcatttaagtggcttctgttatggctgtagacaagttatttacacatttagcaaagttatgaaattctgtcatctataatcttttcatgtatgaatgattcctttcttataaaactcccatttattctgtagggttgctgaaacacagcaaagtgtaaaagggaaaacaacgactccctctacgttttattttaaaatagaaaattctgatgggaatctgcaatataagccaagatatgtagtaagatctcacatactttctcagatttggcttttttgttgttgttaccttaagtatcacataccctgatagcgtaaagaatcagtatcttttatcctatctatggaaaatataatgattgttgataattttatgagccattgtactaattttaatcgacacatccgctcctctatagcacacttccttgagataaaactggctaatagtatcaactgacctgttttctgttttttcattgaactttaaaatgtaattctttttctttttctggtgctcaaagagatacatttgtttgagtccttgtgtattttatgtatcacattaagaaaattataaagaacttaaaagcttaaggcaaactttaaaaagtgtcttgtcaggttagatttctctttcctttcaactaaaaaacaaaaaaaaaaaaggaaaaaggaaataagggaaggaggaaggggtgggggccatcaggtggtaaaagcctgtttaatgtaacatcagttgtggagaaaatattaggttcaattacataaggattgtgtgagagggagcaccttgagaagcataatttaattagaatgaatttatgagcgagaggtcctgagctattagacaaagcgaaggcagtggtgtgctctcctttcacgagagcattttaatgagtttccatacaaagtatttcaggtaaaagatttgtagcaagtgtgaatagaaatgtagctccaaataaaaactgtcaaatagctctagtagcaatttctgggctaagagtatttaataaagtatgctgacattgttatttcttgatgattttattgaacaactatcgtgtaagaaaatcttaaaaaaaaaacactcagattccaatgtgttctttaatttgccattaaaaattgaactgcagggctggccttgcttgacttccaatttgggcaggtgttagattgtgacttacataacattgcaaactcatccattgccctgatattccagaaggataggtgccaatggtaacttaagattgagatttcacctttatggcttgcttcctatttctggtaagagggaattaaagcgttatctccctatagtgtaattatggtcataaacttgattagagttctttaaataaaatccaactaggaaaaaggcaggaaaacactgtggtcaattttggggaaggaggatggaatacaggcatgaccttcaccttggtcaaaatatgttccctaagactctgggaagtcttgtatatataagattcatatggcagggtttttaaaaagttgacaggagagtacatccttgtttaaggatttatttgtgtatgatcctcacaaggtacatttttgagatttattgcaaataattctgttaatcctttcctagatattctgacatgccaggtggttaaagaaggatgatacataccaggtctatagaaatatcataaattattacacagtaatataagtatttttgtcatccatgactaacttttaaaatggcaaaattataaatatctgtaaagtctatgcgcagttgttactgattattgtggcaataatacataaagaacatgttttttgttttattttccacccttatgttttatttataaaacaaaaatttatatttgcacaggaggagaattagcaggatgtaaaataaaaatgaaagaccccaatggggagaatattttaaatgtcttgcagggagtggaagaaagctttgcttaaaaatgtcaccatatgctaactatatacagcacttcaagtttatttattgttaaagcctcatgtaaatcacgtcattctgaaaatcatggaaactgcacatttgtgcattaaactatgtaaacaacaaaaactggtcatccgtccaattgttgcttcacttattttgaattatagtgcaattttgtggagggtgaaatggggattacacaatatagcgatttcctgttaacacctacatttttgctgatcaagcaaggtctgttggtgcgagagcttaacctttattttatttccaaatgtgttttttattccgagtcccgttggtgtctatggtttcacttttctccatgagccacatgttaaagcctgccctgactaaatgaaggagtgtaagcagtgggatagacattgcaggcaggcgaaactgggataagccccagaatcttttgaacctatcagtaatattactaacagggagaaagtataaaagtgagcgcttcaagtgctctagtgtacatgtcaaaattaaagcacgagttccacgggatggctcaccaccctcccttatttataaaacagaagtatcttttgagcccgctgtgccctcctcccccttttctatgcctgtttttctgcctgggttgcctggtttttgctctgcttgttgaaaccctgctcatccttcaggctgcctcaaaacttttgtggaagaaggtagggaacacatatctcttcttttgtccagccttccttgattagccttcttcctctcccttctacccattgtacatggtttctgttgccatgtagtggttaaatctggtttacgttgtagttgtttgtgtgtaaggaggtctcctacaccgggccatgttttcttaaacactgggatggtgttttcttagtgcttgtgatgttctttgtaacagtgggtgccctataacttttgtttggactgaattaaagaaaaaaaagaaatcgactttagtaggagccggcctttgagtgataaagatacattgagggaactctgtacatccccaagatcgtggccagttgccaggctccatttggattatgggagagcttaaccccatatttcagggcagatatttaggtgtgtgtatgagctgtagttggtgaatactcatttttgaccaaagaagatactggtttgttttccaggtgttgctgtgacttccgtttctgtaaattccgtgggatgtattttgccaccaactgcctagcagtttatgaaatggtgaactggacgggggcctttctgcatccacattgctctcattaaagtgacccctgctttcctctggccctcttgaagtgtatctagtttagaacttcttattagtctgtggtcttaagatctttgtcatcttaggcataggctcaaaggaattaaacttgggttttgattagtgaacttgagccagttagctggtggactggatgttattcaggcataaacttactcctatgtagtttctagaaggttggcctgggccacagaactttctatagaatatctcatccatgcatctatttggatttagagcatggatgtaaatgaccctaaaggtagtacctaatgtgagatgcagcaggagggacctttatatttttttattttttattttattttttttaagaaacagccttttctatgcaatcctggatggttacgtaagttccattttatttgtatctatattccttataaagacaaagcagcaaaaatgcactaaaattagatttaatttccagctgtgggtatttgtattatgtctgccttagtccaccttctgccccccccacccttgggttgatgtggttactgaagatagtgaggctatctggagattggacattgaccttcactatagaacaaactcaactgttcttatctaccagggatggtgagttgaagacacctgtagtctatgattagtttattgtgtgagcatttttctgacatatgctgagtgatattgaaaacatttaggtagagcttttttctctaaaaacctgctcattcattcactccatgactttttacttggcacccaccattctaggcactgggattgtattctgttggcccaaacatacttcactttgttgagaaggtttagcataggactaggaacatgctagtatacactgatggatttaaagcccattgccaattataaattcattttcactatcaattaggtacttaatggctatcctataaggtaatactattattatctatctccattttacaaatgaggaaactgaagcacaaagaagtggatcagtttatcgaaggccatactgctaggatattttatagaaatgcgttttgaaccgaggttgtcttaattcccaagtctgtactcttaatattatactaagttgcctgagaattttagcaagacttagcctaaatgatgtagagcatctcaatttctgtgcaggtccatttaacagattttcttgattcaagaggtgtttcatcataactcaattgtcttagcagttgtataaaaagctagctctcagagatggggctttctcataggcatagcagtaattatgtcaacatagagaaacttctagaatcgagcaaatctggtgctcctggctgtggcctagcactcggtccagtgtcttcatattaacccatttatgctggaggttgcaattttttgaatttttgcaatcagaccttggcgatgatcttgagcagtaggatataaataacttccacatccttagtgttccaataatggaacactaggcataaatatgttaaaaagtgaaagtaggaagtcagaaagttgtgagactgggcagagttcaaacacttggttatccaacgagacaggaccagagaggtttgttgaattgagcggacgagaacttcaacaggctcacgtttagtccagtcagtgtttcagcactgacacaggttaccatgttttaccttgattcacagtttcacagtagtcagcaaatgccctacactgaggttttactctttttattttgcagcccttttttttttttttgagacagggtcttgcttgctgtgtcacccatgctggagtgcagtgatgcaatcatggctcactacaccctgacctccctggctcaactgatcctccctcctcagcctcccgagtagctgggaccacaggtgtgcaccaattaacttttttatgcccaactaatgtttttaaaattattttttgtctccctttattgctcaggcttattttgcagacatttttaagacaaaatttttgttatgtaagactttttgttataaaaattgttatataagactttataagacataaaattttgtaatatgaggcttttcctggttgaaaagtgtttcatttttcaatgttttgtatttgtatgaaatcagtctttttgccagcacactgaatcttgtcagattggatgcagagtttctttctgcaacacttttactgtttggtaacaaccttttcttaggaggagaagctacagatactaccttggctgctaacaagttttcagattagaccaatttcacagtgttgactagggaagaaaactgattgaacttccatgggctttagactgaaaccaatgactagcattttatctcttttggatgtgagcatgattagaagtcagtctgaagattttctttcaccagcattgataattcttgtcaatgcgacctcagacacatattgccttcttttctgtgcatcctctgaccagatagaatttcttctattttggatgacatgctgcattttaaagatgcaaggtgtaatctagataaatataaattcattggatgctacctttggaaaagagctgaggattatcttagagctgttcttttcctctttttctttcagaattgttattttctgctcaagattgccctcccaagcctacctcatggcagcacacacacacatacagtcacattcaaacacaccattgtactgttacttgcaaaattttgcatatttgggaccaacatacctgttattctgaagtgctgtcgtatgaaagaataagtaaaggtactgtttatatctttcgatgtatgtctagcactaatgggagttaggggacagatagatgtcaactccatgcaaagaaagtcattatgacaatgaagaaggccaacagtggacttgtggaggagctggggaccctacatctgggagggaatggttctgctgaggtggttcagagattttgtagctgtgatgggttagaaaattagatgagaagattgtcaaaattttgtacaatgtacagaattttgaaacaaaaatttaatgaatggtttggggaataattggtattttacgttgactgttttatttctctcaaatttagaccctcactgggaaattatttttgagtcataaacaatagacccatttcacatctattcatattttctctctctccatgatttttagatttaaaacaagaccacaagccaactttaaacagttcatctttcttcctttttttattgttttttaacttcatggttttatctcagataatttgctaattctagctacgggtgccttcctcccagctcccccagtgtggtagctgtcattcttaacaaactgggatactcacgagacatctagagttcagttgatgatagtccagagtgtgtgagcagtgcagggaaatctgtagctgtgagcactcatctttgaccacagaagcgctgttcagatgtggccagatggaattcctatgaatctctcttctgtgaagtgggatttttgtggcaccaacagcaaagcgattcatgagtgaaaagccttctctggtgctgccatttccatcactgtttctgcctccttttgcttttgttaggcataggccctttatttattcagacaaaagtttttaaaagattagagcatacttccatattaataacatcccatgagttaccattttgagggaaatgtgcacatttgtgtaggggttttgctgaggaaaaggaatgaggagtgaaaggagtctcacccagttggatagtggtatgccttggaaatgcactgaacctttttttttttttttttttttttgatgcagctcttcacagatggataaggtaaggcactgtctgcaatgcgtgaagcactttttaaaaagtgagaactcccagtagacctgtggtgttgcaggagcaggtcaagtgctttctttctttaatatttagctaagagagatcacttaggtgaaccgttccctataactagatcatcctttgctttttcctgttcacattatgattgaactcttgtttttgtacaccagtaaaatcttgcatctgaaaatcttattgcaagcaagtctgcccagttttatcattttttctgccatattccttctgagagcagctagtttggaaaagtatggtccatgccaggcagagtgagctcagaagaggaagggaaatatgtagtgttttaagagcatgaagaggaaaagactactctggtagcttttctatctgtatgtttgttttggcttttagtcttgaaaagactcaaattctctttcccatcctttatttctaaattcaaagggaagcagtttgacatattagaagccctgtctttggagtcaggaagacctgagtttgaaactgtgtgttgtgaccttagacaaactacttaatctttctgagatccagtttgctgtctgtacaataggaataatagaagtatatcataggattgttataagggttaaataagacattgcttatgaaccttatacgtagtggcttgctattattcttgtattaacaaggttgtcctggcatttcttcctactgttaattttcacaaaatatgatatgtcttaagctttattattgaaaataataaagctttaaacttttaataaacatgtctggagtctaagatggaagatgttaaaaagggctcagacgtgattggtttcttgatgattaagtagtgggcagtcaaagatacttgttttatgacacatttaggagaaagtactgaatgaagctcttaacagtaacagcccctttaattaggggaccagagtagaggagtcattcccagcgctgcctgggaggaggatgaatttcctgctgtactggagtagccctgggcaaaggacccaaaagaactgctgaattaaggaaacctggaaactaaaaaacacaagagttttgttttttttttcccctgtcagatattggtcttttgtattccagtggtattaaatggaaatgggttttttcagaggaaaagtaatacttgagagaactccattatctatcagatttatatattttgccttagagaaatgcaacctgttcattgtgtaaaaagccgtcgtgtgtatacagatttgctcttctggaagccatcaatagccagctagggttaaacaggtttcccttcccctaaatggttttgttattatttatttattttgtgttcttttaaaatttatttttccatataatctctgtgagggcagggatcatacagctctcaaggtacacatcacagtatgcagataggcccaaaataaacaaacatctttatttttaaagttttttaattataaaaagtaatacgaggccaggcacagtggctcatacctgatacctgtaatcccagcactttgggaggctgaggcgggtggatcacctgaggtcaggagtttgagaccaatctggccaacatggtgataccccatctctatgaaaaatacaacaacaacaacaacaacaacaacaacaacaaattagccaggaatggtggtgtgtgcctgtagttccagctactcggaagggtgaggcaggagaatcacttgaacccaggagatggaagttacagtaagcagagattgcggccactgcactccagcctgggcaacagagcaagactctgtctcaaaaaaaaaattaaaaagtaatatgggattattatagtttggaaaatacagaaaaatggaagagaagtcaggtacagtttcactgtccaaaaataattaacattaacatcttggtatacttccttccagcctttttctgttagtacagagctttatgctagctatttatgattatgaatacagatatatcctaaaagatcttctcatgctgagcccaggtgttgtaggatagaaactgatggtagccaggcaaagtgtatagacataaaaactgggatgacagaatcacggggaagggtataatacctttgggttccttagctcagggctgtctcatttctgcagcaggcaatgtggttttcctcaagtggaataagattgcaaaaggaaggttggtaagctcaaaagaaatcttcacattgcccctgtgataggtagcaaaggtgatgaaacaacccaattttgctgtgttatggtattcctgttttcagaaaaattaaaaaaacacaaaaaccatttctttgaataaattcaggctttaatgtacttttttcccccagaacatttctcctaagggcttaaattattatcacatatggagaaggagacttaaatatgagaggatgtaagatccttaagcatgtacaaattttcgtggcatctatcacagtcctgaatcctgaaagactattttctgttgagttagatctttccttataaatgctttctgggatggcccatgcatctctgacagttctcatgctgagtcataccttgttctgttaaatttatccattattggacaaagactggaagaatggatatgacattgggaagtgtgcaagacttccacagatcacttgtagagagggatgatttcattgtaatcctacctcactggacacctcaaacctgccagtctcatctgtaaagtgagcatttttatcccctttccttggctctcttggctccatctacaggcaacactcaggtggacttctttactgaagagaagagcgtaatattcttctagtttgcctagctctttggcatttagaaaactagagaaatgcataaatttagcaaaggatcagggccaatgtgatggctgaactggcatcatttcacatttttcatgctctgtatttatagcaataaatttcaagtaagaaaatagattgcaaggagtatgctgtattaggaaggaagtttgtacactttcgtggcttatgggtatcttagtataaccttttctggttgagtgaactgtgtcatttcaaaagcctgaagacattgtgatgactgctgcctccataatggctacattctaggggctttgccctgaatcgcatatattaactcaaaaaacaaacagtacccagtttttattgggaaaattacagtaccagaagttatgtttctcagtcattgagaccttatgaagccttaataatatttagaagattctggttccttgtcttccttttttgagtcagcagttggtcacagttcagaaatgaattacaaattacaatttattagtaatgataatatttaagtagtaatgatgatgataaatagtaacagcttattttttaaaaagataccaagctaaatgctttcatggattatctcatttaattgtctcaacaaccttttaagtcttatatttttatcattgccgttttatagatgaagaaagtcaattttcagagaacttaaataacttctcatagatgtctagagcaaataagagacaccaggaaatattacacccaattaaacatgttttctcccacatattccgtcaattagagacttgtagagaagggtgctatttttcttttcatttttatttttttcgagacaaagtctggctctgtcacccaggctggagttcagtggtgcagtcttggctcactgcaacctctgcctcatgggctcgagccatccttgcacctcagcccccaagtagctgggactacaggcatgcaccaccacacctggataatttttgtattttttgtagacactgggttttgccatgttgcccaggctggtctcgaacttgtgaactcaaaccatctgcccgcctggcctcccaaagtgctgggattggttgctatttttcaaatgtgagaaaactcctttagaagttttagtcttcatgagtcttatgcgcttagggtgtggatttaaattagcaaattgggttgttggatttgtagttgcagcagaaaggggttgtttgtggatttttaagtaggggtgatagcataggggcctgcttttaaaagagggataagcaagcaaggaactttcagtgcttaagggcacaggtggggcagaacatcaaagacagattccatctgtgctaacatttcacctttactccactgaaaattttctaagatgtcacctttgagacacactaaagcttatttttctagacaattaacaaataaattacatttactccaaggacagtgtaatattaatctataaggatattttagattttagaaagcatgagttttgaattctagtttattatgcagtatggtctgtgagccatgaattgtcttcatctttatgtccagcagataatgtggtaaggacttcttaaagctttttgaataattgaattaatgaataaaatttataaagttttctatcatctactaaacatctgcttgtgaattttaaagaagctcattttctataacattaaaaagaggctgtaaaacatcgtttttactaacaatttcattttatacattgcagttgtccttattgataaaagagaactttgtggtttgatgcataaaagaaaatttactattcagtatagttgggactgtatcttcaggcacagacactgcattcagacctgcagacccccaccctgctcagtgtctgggttgcagcccagactgaggttgagccagaggaagaaggaggccgtgtggttaaaccacttgtggataatcgaaagtagaccatacttattttcaatttggcagctgcattagctttttactaaagtgtgcagctttgcctggttctgctaatgttgccttcacactgtggcctggtcaccattagtggtctggcagagatatctgaggaggctcaccattgctcctcttgactgttccactgcccatcccagtattttccctgacttttcctatgttctgtggtatcaggcagttggatcaattgcagtgactgcatcgaaagaaaaagacaaaaatcgggaaagtataaccccgagggcaacaataatgaaattttaaatttaaagtgacccaagtttgatgtacaggatatgaaaatgctgtggttcctccagtggtttcatatactttgattcagacccttagaagttcctggtgggcagttgacaattgagtatcagtcttgatgctccagatttgaataccatttcagttggaggcatggtgcgcctgatatagatgacgtgtgaatgtttcaatgtcaacaggagatgcgggttgtgaagatatgtgttcacatgaaacagactgcaagtctaagtctccaaggatgagctgatatatgtaaccctgttcatgatgggcctgtgtttttttcattttctgttttcctctctggcagatgatagatcatttaaatctgtactggcacatggacgtggtttcccaccccaactgaacttgagttagaagaacctcagctctgtagtgatcttattttactgttttcccaggataaaatgcccttggtaccacatactgtatgcagagtatttatgattgcttgagtacagttccttggaaaggacacaaggggtttcataaagcggtactaaaaatctgcttttctccctagcatttaccaacaaccttgcgatccgatggcttgaaataatggtcagagtgcatgttacccaacttctcctggctgctcctactctgtcacactgcacacagatcatgcccgccaccaccctacactccccgacctcacccaccagtcagacagtttaagtcctgctgacgcaccaggcgtgtgttggctcgtggttgtacttttcatgagtagcagggaagatacactccaggaaggtgggatacaaattattgaactgtgtgacttaaaagctccagtgagtttcgtcggaagtataggagtttgaaagtgctccccagtcaaacccagaactacatagggtcagccgtggttgagctaatttctgcttacacatgtgtggagggtgtcattttctgactacgcctaggcctgagtggacagccgattaaaagatgtaaattcgtggattgtatcaaggagagcgggttccatctttgtggtcaggagggggcccactcttttgttccgcaaagggtttatctggatgttccttgctggaagttgcttttccagtttggatcaaaccacttaagtggagctccagcctcagtccttgcaataaaaaaaaaaaagtcctggaaagccagaattttgctaatatcttacatagaatctcaatgatgggaattgggagtagaaggcagagagtggtgcttggctgatggaagttaaaagttgggttaataataaactacatttatatatcagttaacagcttgctaagtgcccacatattatttgagcttcatacttgcttgctgagaaagaatggctattattatcattatcatcattaccactttccattttatagataacaaaattgaggctctgagaatttaaagagattttccccaaatcattaaacggtgacttctgaatctggatatatgacaagacctctgtccccagtccccttgctttcacctctataatatatagtagctaagctcagctttctgagaacttccctgtcttatgtcatatttgacattataggagaattgaagatgttttgtaagtacatactttgtttactacctcagtagccagtataacaaatggcactgaagttttatgctttgcttgctaaaaccagcaccatttgtgaaacaggtcttggctccgagttacccttaaatgtaactcctttattataaaatcatttgcaaagagctgcagagatcaaggaatacactcttcccacttccctaatgccaggtagtactatgacaggacttcatagtaccacttcttcaacaaaataagtgtctgcagtgaaatatttgttaaaatgcacatttctcagtgaatatatttcttttaaaactgaaaaaaatagtacctaacggaaattttatcattgctttaaaatgtattttaatgaagatattaaaaaatacctttgatggattcttcaatattgtcgaactgctcaaaatgattatactgttatatgaagtctaaaatctttcatgcaacttacaagaatatttttgttgtatgcaacacagttggaaaattctagtgggaccatgtccatgcaattactgattatgtaatgctgtaaatttttgataagcatgttccaagttttcctgttctaaaaacaaaaacattaaaatcacccactgttgaagacaaaagatcattactttattaggagatattattagatatgtttagaactagttaaaaaaaaaaagtaaaagactggttaaaaaattaaattaactccaccaataaaaattcagttccttctgtagctgattaatgtaaggttctttccactgatgaccactgaatagaaaaaactaaagtaaatttcatcatcattgtagaagtgtaacttattcaagtaaatgagataagccaattttatatctatcaagctataattaaataaggatgatactatttgacttataaatgacctctgttttatatttcctgtggaaatcagctaactacaaaggaattgtttattaacttacttcactaacatgatgaacagaagtatttcaggactcatttgccccttttttatgtgactcagcgtcagattctgccctttgctcttctgaggtcagtctgacccagtcaggtaaaatgaacagcacatgaaagtttagcgcatgcggtcagcattcacgtaccttgctttggttaaataaattcttgaaatgcttgatggcttatttgccatgaacttgataattccccaaattgctgatgttaccaggtgcaaggacaaatattgatggctatgaaccttgcatggtgctgatgcactgtgatagtcatatcttgttgtaaaccatgttgtagtgacatagttccagttcatttacccattccctgtatcagagagtttgggccattgttgaacatcgctgagttcagttcatggtgctgggtagttcacatttctggaagggctgtaaggtttgcataatcgtccagtgctatcatcatatcatctttgcctggaagatgcatctgcatagcttcagtagtttttaatgtcttgggatgcccaacccagtactgtgggtttcaatttttatctgtcatcgccacaaacccctaaattaaaaaaaaaacatgaagaatattcaggtgactataaacatttcaaagaaggcctctacttcttgctctgggtaaaaggtagatgcagtctcatggtggaacatgagagttatctcagttggctcttgaaatgagaatgtttcactgtttcagctgaactgaatagtcactttagtttttaaaaacctgctcaattcaacaaaacatgattgattgctcaggtaaattaattgcctctgagacacatgtttgaaatagatatctatactctctctgatactagtgtgtagcaataacttttactgtcctattttgtttaactgtctgtgtatgtatgctctaaaaaggggattgaggctggaagcagtggcttacgcctgtaatcccagcactttgggaggccgaggcaggcagatcacttaaagtcaggagttcgagaccagtctgaccaaaatggtggaaccccgtctatactaaaactacaaaaattggctgggcgtggtggtgggtgcctgtaatcccagctacccgggaggctgaggcaggagaatcgcttgaacctgggaggcaaaggttacagtgaaccaagatcacgccattgcactccagcctgggtgacagaatgagacttcatctctaaattaattaattaataaaaaggacattgattaaacttttttttttcttttttctttttttttttttgagatggagtttcactctgtcacccaggctagagtgcagtggcgcagtcttggctcactgcaacctccgcctcctgggttcaagcgattcttctgcctcagccttctgagtagctgggactgccggcacatgccaccacaccttgctaatttttttttttttgttttgtatttttagtagagacggggtttcaccacattggtcaggctggtcttgaactcctgatctcgtgatccacccaccttggcctcccaaagtgctgggattacaggtgtgagccaccctgcctggccgattaaacttttcaatagctatatctactgtatggactctattaatgtacataattatgcccagaagagaactatatgtcattattaaatttatggttagaatagttgatctatacttttttctccttagcattcctttagctgtgcttccagagctgctcagaaacatgagttttgcttaataatccatagcagagctgaagtcaagaggggaaggacccacaggacttcagctggatctggttgggaaaagctcaagattgggaaatggaactttggtaggcacatgtcagtatgaaacatttgcctcacagccccatacatgattaacctttactttgcaggggaaaggctcacagtcttactgcagaatgagaataaacctcatttcagtggtttataaactcttaaatgtaacagaatataggcctaaaattagacattgtattcagtctgagctctgccacttaagaattctgggactttgggcaggctgcttattatccactaacctcaatttcttcagctcctaaaagggcagttgtcatacctatattatggcactgttttgaagaagaaatgaggtaatgcctaaaagtgtttaacatagtcactggcacagagaagatacttaataaatgttgatttccttcttgttcagcaaaaccttaaggcagaaagctcctaaggcatgattatatatttcattctttcagtagcatttgccaaacatttttaccatattgttgctaagtaggtaaaacagaaagacacatatctaaatatgcagagacatattttgtaatggaggtaccactctgtttttgtaaggcgttgctgattctcacttcgcttctgcatctctgaatatgttacaattgtaagagatgtttgaagctttggggatcttctaatggaaatgggggttcttcaccgaatgttcatgtaccgacttcaagaggtcaaagaatcacgaattgatatacaaagtggtgtatgttggagtatagtcgtcgcttggtatctgcaggggattcgttcccagacattcccacagatgataaaatccacggatgctcaagttcctcacagtcagtccttcatgccagtgggttctgtatccatggattcaatcaaccacgaattgaaaataccgtcatcacgtaaaacttgtaacatacattctaggaaaaagaagaaaataaaatcaccttgggaaaataatccttaaaattttactatgtagggatttattcttccaaacatatatatgtatttttgaaatcctttaaaaaataatgctgtatcacaagcacctttccctattatgtattcttctacagaatcatttcagtgggcgtatagtatttcatgttattgatggatcatttgtgaaaccaattctgtgatggtcactgagtttgtttgcaagtttttattattataattaatgtggcaattaagatctatattgctcaaacatgactgtgtacttatagatcatctttgtaaaaaagcagcattaacttgtgtttttaaaacatttttaaacaaaactaagtgataagaaattgatcaactcagccaggcgtggtggctcacgcctataatcccaacactttgggaggccgaggcgggcatatcacctgaggtcaggagttcaagaccagtctggccaatatggagaaaccccgtctctactaaaaatacaaaaagtagctgggtgtagtggcgggcacctataatcccagttactcgagaggctgaggcaggagaatcacttgaacccacagggcagaggttgcagtaagctgagatcaggtcactgatctccagcctaggtgaaaaagcgaaactcagtctcaaaaaaaaaaaaacctctaccctttattattgcttgcatactttgtaaaagaattttttccaaccactagcctcaattatttctaaactatttttaaacatttattagatatatggatttggcatatataaggagtctagttaggcttaaaactatctaaggaactaccaactatctaacatttaaataatagaacaaagaagccgggtgcggtggctcacacctgtaatcccaacactttaggaggctgaggcaggcggatcacgaggtcaggatatcgagaccctcctggctaacacggtgaaactccgtctctactaaaaatacaaaaaattagccgggcgtggtggcgggcgcctgtaatcccagctatttgggaggctgaggcaggagaatggcgtgaacgcgggaggcggagcttgcagtgagccgagatcgcgccattgccctccatcctgggtgacagagcgagactccgtctcaaaaaaaaaaaaagaaaaaaggcgggcggatcacgaggtcaaaagatcaagaccatcctggctaacatggtgaaaccctgtctctactaagcatagaaaaattagtggggcgcagtggcccacgccttagtcccagctactcaggaggctgaggcaggagaatcacttggacccgggaggcagaggttgcagtgagctgaaatcgcgccactgcactccagcctggagacagaacgagactccgtctcaaaataaataaataaataaataaataaataacgcataatagcttctatttgggggtggcaggtaaactatggcatgtcaggtcccatcggcattttccgccaatgatagggaggcatgttttatgcccctgtctttctgttgatgagaaaggagcaagtgaagaactccttgggtcttaaggaacaaggactagaaaccccacaatattagtgtttctgttttttgtaatgatctgtcacctcctgtttgttttcaaaacccatgagattttaactctgcatgtgtgtgtacatgtgtgtttcttccctgttcatattgcctccctatccatcagagaatatcttaaatgccactgggatacttgatgccatcccctccatttgtgggtttgtgggctagtccagcaacaggctttggagaagttactcgctactttattataacatacttaaactcaatagcaattcaggccttactgggtatttacctaatttattgtggcaatgcggtatttagaccactgattaagtgaagtttgtcagtatagttaaaagaaattagagacactatcattgctaaatcactttacaattcaaagaagaattgtaaacatatgaatccatttaattataatagtgccaattataagagaaattgtaacgctgggaacagtggcttttatgtaatcataataatggcatgtatttatcttggtttggcaagttaggcctttctttaatacttggctttgcctaaatagaatgtggtttgctgaaacccacaataacccccacaccctccaatttgttattgcagaaaatactgaacaataatcatgcggtatgaatgattaatgtatgcatgggttagtaagtatatttgaggtttaaaaagtgtttttatttacattcttctgttggctgaaggtataaaacaaataaatataaatccacatgttaaatattctcatccctttccatacagatacttgcagtgtgaatacaatcatagctttaattcattgtttctgtgcttttttggtttactcaacacgtgtcttttaaatatatttcaactgtagtatttgatagtaatccattttttaatttactaagtactttgaatatagcttccccaaaacatagaaataatcaatttaataatatctgaagattggcaaacttcatttataatgttgtgttcaaataatactatcagaataacagttgtttgaagagtgtatgtataaaaattacattctctatttaataagattactattattattgaggaagaggtgctatctagtggtataaacaaaattattatggaattgaaacatttctacactttggtgtcagggttttcatttatttctgtttcctgcttccagaaagataatttgcagcagtttcacactgtgtattagtagatgtggaaggaaatcctactttgctgagaaaagaaggaaggaatttaagtttaaaagggatctgacaaaaacttatttaaaaatttttattttaagaataaatagaccttccatagacacttagcatttattgtaaaagctgtattttatagagaacagtagaaatccaaatcgttgatagttttgcaagacatagccaaaaagtgaagataaatggtggattttaaaaattggcatcctgaaagagttaatatttttattagttgaaatttgatataaaattgtgggcaacccatgacatggtttggagtacttgattattcttttctcaataaataagagtggcgtacagttaatttcagcactgtaattgagcaatgcattctgggaagttaaaaagcactgtaagatgaggaaatgttttagggactaatcatgagaagaaaggagcctttcatagcccgtatgatgctgttgtcagagctaaaggcagataatgattcggtaataatggcacattgtgaatatttaagctgaaaagatttgggcaaaatgaacagacattgttggtttgttaaaactgagcgtttggtctttgggcttcaaaagcactctgaactctgtacaacatttttgttcacaaattttctctaaaacaagatacttttaaaataagttatgttaaacactatcactatatgaagttttaaagtgatctacgtgttttaagttttactgtagaaatggatagtgtgggctctttgttatggagaagtttaaaaagttttacggttttcttacacatattttaaatttagttggcagaagcaacacctttaaagaatattctcatagcaatgatgtaaaatattaaatctaagtccaagagtatccagttgcaaagaaagtcaagtaatttgcattatgtttctaaggtttccgttataccgtttagagtcttgcagttgggtttctatgtaccttgccttttctcctcattagcatattttcaacctgtttgttttcattcttgaatcatctgttacatgcagatgtattcagctctagtttcccattttggggtgaatgttaccaggagtttaaaggttgagtccttatagtctttctttaacttaggaaaagaagagaattgagccctgagagctgagaggtatagtttcaaacttactaactttaatgatgggtatttagagtcagtaccacatctggtaaaaagctagattctgttttgctaaagtataggtaaaacactgttatgctgaaataatgctttatagaactttaaaaatgtgattcaattagaatactcctttagagtaggttttaagacagaattcaaccttcatatatgtaagatatgtatatctccagtgagctctcatttattatatatatgctacagtgacataaataattccaagtctggtatttcctttataaatatacttttcatgtgcagttttatacaaagactgaaatgaaacagatttctgaggctatacaaatgttttttcttgaggaagaaatgattacttattaaaatggcttcacaatttaaaccaaaataacttttttttgtttctgctctgaaatttttttgaagggaaaaaatgttgccgaatgtttacactaacattcatttttacccatatgctttaaatctgtgtatttgtttaaccaaatattgtttatttttagaactgtttaatctttctttttaactggaattttttaacagcagttctttgaaaattaaattgaataaaatttcactatttaaagaacattttctttaggagttttaaccaagaagtaaatcatttattaccattaggtgagactactctttggccaggaaatagagaccagaagcaaaaataaaatagagcaaatgtttaccaggaaaatgtgttgtaatccaagcatattcttgtgtcatttttttaaaaaaagtagctttaatgaaaggtgtcacatgcagctatgagtagaagaacctttccctgtactttgcaaggagacaaaatatggattttgatggacctgtacaaacttacagtttttcaggtttcataaagggaattgagaatataaaatgagactacttggaaactccacaaattttaacttatttttagaatataagataaacatttcaaattatattttaaaaattttatgatcacttgttgactttctctgagattccacgattccagaattgtttttttgtaaatattttgtctgaatgtggaattctcatttgataataaacagtaattttatttagaatgatagctatcctccacctcttctctgtatttctatttattaaaatttacattttctaattggacaactctgtgaccaaaatctagatcattagggtgctaaattctattaacaaatactttgaggttttctgaggatatcaactaaaacttcatctcagaaaccttctagaaaaattaaattttgttttaaataattaaaacccatattcagaaaccagcctgtttgaaaactgacctctctatttacatattaccagagggttcttgcctaatatgaagaaaaaagcttgtgttagagttgggttttatttggaggtggggaggacttttaatgctgataggatagaattttacttattgagatacatacagtaaggtcagttagacactgtgtttaaaatagggaaattattacttagtttttaatattagtttaatatttaaaaattagttttaaaaatatatttaaaattagtttattgtcttgaacttaacttttcaatttaattttaaacaagtttacttaagtctaacttttaaaagctcaagttaatattagccaaaatatacttcttaatgcttatctcttatgctccatagaaaaaagtgtgcttttttggtgaattaagatttaaatatgtatgcatactgttgtctctcttggagagagtcatgacgcacattaatatattagagggtctgagaactttgtttaaactagcagtagccaaatttatttgtcagtggaatccttttttcatgcaacccccattaacctcccaaaacacactttgagaaattatgcccttagccttttctctgcttttgagtgaagaaacttattctgattcagtcctgttggtgtaaaaatcatcttcctgctgacccttctgtttatctgaagcccttaaaaattaataacgctctagtctccatttggtaccaagtgcctggtggtgggggactctgtctcagaagcagtgatacttgattcagttgtctcacctcctctactcatctatccagtccattgcaatttactctaagtacttcaaactgtgtccttggaagacagagttgcctggagctattccaagttggcaaagggatgttctaataaagctcttaagtggtactacttgctgatcaagagcagaggataagggtgttgaaaatgtgatgctgcaaaggtcatttcatgaggcactaaagtccatttttaaaaggtctccactcctttcaccccataattttgagtattggaaagatttactaatgaagctctttgctgtgttatccctgccaagaaacagactttaaaaatatattattttccagattcatgacataggaatctattgaacccttccaccttaagtttgctccattcctcaaaatgtgtttctatcacttatatattttgttttttgtttttttaaaaaacaaaaaaaaaagtctgtgagaaggaaattgatttgaaggttttagcctaaaacacagtaaatactcaatgtaaagccattacatgagtttttatgtccatagtacttttttttttttgagactgagtctcgctttgttgccaggctggagtgcagtggcccaatctcagctcactgcaacctctgcctcccgggttcaagtgattctcctgcctcagcctcctgagtagctgggactacaggtgcatgccaccatgcccagctaatttttgtatttttagtagagacggggtttcaccatgttggccaggatggtcttgatctcttgactttgtgatccgcctgcctcggcctcccaaagtgctggcattacagctgtgagccatcgcgcccagctcgtactttttttttttttttttttgcatgtgaaagagatggagcaactatagcaggaaattttattttgtatcaccaaaaggaagtttgcttgttcgtatctacgattgacatcttcagtacttgctgaataagcacaaatgattccttttctatcgcaatatatatgtttgcatctacctaagagattttagatttgtgagtgtatggagccctcattagtatgagagattaatttatttcagtgtttgagctgttactgagcttaaaatcttaaaaaacacacacaatacaacaccagctctgtaatctttttaccgagtagactataataattccagaagatttaacatagtttattagatgaatggcttgcaactttaagggaccataaacttatatttaaaaattattataagtaaaacaggattctgacagtaatgcatgtaatctaattcactaatgtatcagttgtgaatactttttagatatccagtaaactaaaatgaaacagtggacatacaacaaacatgtgtaacagaagaaaacccaactttagaagaaagtagtatttgtgtaatatttaatgtggtacgatagtagtagcattacaagattagtgatcagctggggttattaaaccaaagtttgcctcatgctgtcgacgttaagcagccacttggtaaagcctgggaagtaacatgtgcctcaacagttagcacttaaagactgtgttttaacgagtctccagatatgtatttacatgatagaccatactaacaccttttagtgttatctgtcaatcaagatttcataatattcctttacaaaatgtatctgctgtccacatccattatcctactctacttactttgtatttttatgtatttattaggaattcatagtcacctgacctcttggcagccatccctaaacttcacattaaccctgcttctcagggattgcaggggtcattttaacccccatgaacctgaaaggtccaaataattcagtccaaagatggttgaaaagggatctgcaaagtctcctcccacaaagaaatgctttatttcatgcatttggcaaccaacccctcccatctttttatttttatttttatttttggtaaagggattttacatcagacagatattattaaaaaattttatttaacactcagacacattttattctaaaacgaatgcttgctcaagagtctaagaaggcttcatgggaagagcaaagcaatctaagccatatgtattgggcaggttgccagttgtttgccaatatgcccaagccacctggctgtgcattcagccaagtatgccattccgaccagccagctttaacctcccggctgcttttcagcacttaggaaactccaaaggcctgggagctgcacttcatttctcccatgccaatagttttcacttatacaaactgcacagctacactgaccggtaactctcaaacgcccattttgaatgagctctccttttgtttaaagcaccattcactggtgttgaaccagtgccataagatgagtctggagatagcagactgaaacctttacccatatgccatagacagacactttgactgacaagcagcatttttttcccaagcctgtagcgacagggttttgtgattctggtttgctgagatttggattggctttatttgccgctggtttcaattttattttgggtggttctaacttttaaatgtttggaaacgtttgttcatttgattttccctttttgtttagtttagaaattggttgagctgtttcataatttatcaagcttgatttcataatctttggcaatctaggtcaggaatcatgcagaacaggcacgatttgatgatgggatcttgaagactgattcgttctttttaaaagtcacgatagagaaagctttactcctgaaaggcggtattctttctttcatcagggcgtaaaaattatataatgccttgtttccctttttgccttggctcccaagaaactcagagataagtttaattcttaaccttggtgaatatttcagcctaagtttttgcccccactacttctctaacccctgcagtttttgttcatgtttttcttcttttatggacttaaatgtgtatgtgtgctaatttactatatgtttatgaaccatctcaaattatttttggaaggtagatgaagtaaccagtaagtaaataaaacttcagattagaaactttagtctattcctaattaaaatctttaagtggccttgtctggtatcataagcaggtgtttcagattcattatctcaggttttaaatgaggaaagctgtgaatatttaagcctagaagtttcattattataaatttttgtgctagcctttggactgaccaatttattattttctatcactattgtggtctgtacattctcaagttgatgccatttccctcttcccggctcaatgaccactatctctcagatcttgaagatctgttttggcttggttccaatttaatcagtctgaatggatcctattgagtaacttgactcattcaccctgctaaagagagtctgaatacactatttctgaaggtttttttaaacctattataatgttcttttttattagaattgtcagtcatttcaggaaaaacatgtgatctgtatgtaagtgtgttttgagagtccatttttcatcccattaataagacccattcgaattgtagcattttggccaaagtcctgtgacacactcaacaaagccgtgagcaaggtggagttgcaccagctcacaagatggatagacagagctgggggaagtgtcccagcgggtttttgcagtctgtcagaggagctgcagctgtaaccacccatctgtgcatccttggcttggactgggcttcagtattgaacacttaccctgaagaaagatgttcaaagaaatggatggtgtggctcaaataataatggccaaaatgtgacagggttaatgttggaagagaaaaactattatgttccagaaactatgagatttagctttttggcatttctaaaattttaaaatttctgcagtattcaattcattcattcattttgtttttttctggacctggtagaaatactgggctttctgtattttttaaaaaaaatgtgtacatgaaggttttcggtgtaatgttaaatccaaaagaatcctgaagatcatattagtagtattttccctgatttatgtttatatcttatgatttaagctttcttcgttaggcagccacattgtatgtctttgctctctaatgtttattatctcctcatttattctgagatataaatttttcttttgaaaacatttgagtgcaacaataagctcaataatcctgaacaaagaaaagactattaattatttgtgcctttaaaggttaattatttcaaccttaaaagaatcttataagaacccattaataaaaaagaatgcaaatatattgcccaaaaaaatacacaaattattgtctttcatataggggaggaaataaatatgtttcatctgaattgtctgaagtaagtcatgaatggagtcagggtaaaagaaaaaaaaaaagcaacgtaattttttcctttattggaaccaaatttcttaattcctctgtacaaatcaacttgaccattttattgaactaaaaagcataaaatataagatcacgttaaagatattcttagaaagataaattactatgtcatttttctcaatataacccgcaaattactcagtcatatattctgaaaataaatatcttttgtatttatgcttgaaattttgtgatatatttatagtgcagtgaatttttcatcccatctctcaaatattttctcatgtacataggcctccaaaacatcattgttgctctaggtaagatcttaggaaatgttttattaaaatttcttgtatttgattttgtttgataagctcaaacaaaaatggaatgtgaaactagatgtcatctcaaagagaaatcaatattggttcatttattgaatgcctactatgctaggtgctataagaatcccatccttgctctgtgatcaaagtctgattgaatcaggagctgtgtgtctttccttcctccccaacatgcatttattgccttttcattcaaattttaaatattttaaatgttgacttttctacaaaaatctgggatacaggtgtgaaaaccttactaaaaatcatgtggaacaaaaagaatttgatacaatttagcattgattccaaattttttaaaaccagtaacaaaggagaatagtatccttaacaggataaaattatctatgtcatgtcaacagaaggaatcatactgaattgtgaaatattggaatcatctcccctaagatcaggaagaaaacaaagatggctgctatcaccattattatttaatgttcttctagaagttttggacaatgtcatattatatgacttagaaataagaattataactatctgaaaggaagaaatgaaattatcactatttggaaatgatagaattatctacctagacaaaaggtttaattaaaaaacatttggaattaataagaaaatttagcagaagatctagttaaaagataaacatcccaaagccaaaaattgtgttatataatcatctccaataagaagctgtgacagaaaaaagatctcattcaggagagcaataaaaaacagaatatctagaaataaccttaaaataatttgacagtaatttgatggaaagacctactgtgaagtgggtgttctgaattatgagagttatatgaataggaaggaatggcatctaatggtatcaccccttaaatatttctgtcaaatcataacctagaagttatctcttactcttctttcatgtttcatatctaatcatccactaagttccccgagtccaccttttcattagcatgcaaattaattcctatcctaccctatgtttccttcaattttagacctttattatttctaacctagactttgtaacctctttactcccagtctttcccaatcatctatcccttcattacactactgccagagtgatctttctgaaataacaactattgctcctttgttaacataccttcattgactccctctcaccagctgtataaagtccactctcctcacccgcatcccgtttttcacacttgggcacaccctgctccagctctgtgttctagctgggttgccatgcttacagtttaccaaggtgctgtgctttaccagtgcctcagtactgcagtgtcagtgcagggccattgcgtcttctggtttctctacaggacactctccatctaaatggcttcacagtgtggaaaactccagctcttctttacattcagtttaggcattggatcacttggaaaaccattccacacactttcttgcagttagggacttaccttccctgtttcctgagaagctttgtatacttctgccacagtacttatcacattatactgtagctactagtgacccccactagagtgtaaagctcgttgcatctctagcatgtagctcagtggctggctctttgttatttgttgaaatgtatatttttaacaaatttgatactcatgaagttctgtgtttctgagataattttatagttacacagctgttttctgggacagttactttaaaatttcctggttttttcttttgcatattggaactaagcaatgactggatataaagtatcactatacacatatttgatgtcaccactaaagtttgaccaatgtttaatggtttttcaggaataaaaataaagtcctatgaattaggatataaattgtgtttatgttgccactgcttaccatttctttgttagatgttatgcctagattaatgtcattagcttatatgctgaaaatgtaatcacataatgtttttaaaatagtaaatgacacaattattatatatatgtaaaattcagatccattcaaaaaatatccatgttcttttatatgcttaggactcaacttggtgctattgtatttagctattgtaaaatagctcagcctttaagaagtttgtatataaggtaagacctgcttatataacagccaatttaagattaaaaatagcagtctaagctgagtatagtggcacatgcctatagtcccagctactcaggaggctaaggcaggaggattgcttgagctaagagtttaaggctacagtgagctgtgattgtaactgagaatagccactgtactccagcctgggtaacacagagagaccatgcctcagtgtaaaaaacaaacaaacaaacaacaacaacaaaaaaaaacaaaacaagaaataatacaacagtattgcattctgagagggcctatatcatctattttatagataaggaaactgactttcaaagaaattctgtgactactatcattacccagctgttagtgacgggtttgaggctggaaccttagttttcagtttcttgattgagggctcaaaacagaactcaatatgcaaaaaagaaatgtaatgcattgggaaagtataaagcaagtccacaaagattaaacagaacagaacagtgattctggatttttctaatagtttttcccttaatttacttctacgtttgtagaagtaaatattgagtaggttatatctgaataataaagcatggcattgggtagcccttcagttttataggcattccacaaccactaattatgaataatccaagtttacaaatattcctctgagtgattgggctagactcattttaactaaaagggaaaattaagccatatatattatatatgtacatatttatgtaaagcatagtatagcaatattacataaaagttttattgccatgagtttgagatgacatgttataagtggtaaagccacaagtgaattatgcaggtcatctcaactaaatgccaaaaatgtttttactgtaccacatcatccagtattctgcctatgctacaaatttaaagagaaccaattttagaaatttccagagttgtaaaagtttttattggcactatatttcaaacttgctggcctgtaaatattagttccattaattgtggcaaaaattaatgcacagagatttttttaaaaaacacttgtgacaggagttttttttaaaaaacatcttcctttccagtttagtttagtttttcctgctctaagtataaacactttctactttcttccctttttatgtaagtttttttcttttttgaaacccatctcaagctccatctccaagaaactctctgtgggtacttacgtcaccccaagtttatttttctgaactcttgctttttcactcattgctcataaattcatttggcaagaatttttcgttgggttttaaccactcttttagttctggtttgttctatttttttctcagaattgtaattgagtgtatattgtctttgctaaataaattctaagctcctagagtgtgtatttagtgcctttatattgtctctggactctggagcactgctttttaaaaaaatgttctttcttttttccccctccctccttgcctttcacagacattgattcagtacctactatattcttgtctaagctatgcattggattttgtagatgaaaggcagcctagaaaaaatcttatacagaaattattctcaaactattgtgtgcacaaaaatcacttggaaagaattgttaagcaagtattttcccaagccttaaatgcagagattctgaactagaggccaaagatcatgctactgaataccaggtgattcagatgcagggagcccacagaccatactgagaaactcagttcataggtgacgggagaaagttccgtaagttgaccgtcacgatgctaagctatttaaaaaggcctgtggtagcaacatgctgcaggtatttgaggagcccagtgaaggggaacctactgaaactggggaagtcagaagagtctcgtcatagttggtgcttactacttgtgctgtgaatagaagaatgaatatttgaatttataattggaggaggtggttgaaatcctggggccttatgaccttgaacaaattccttaatttctctgagcccgagttcctttatctgtaaaattgggatgatagtaaccacctcaaagaggatttgtgagatgaaattaatagacataagtaaaaaacctagcacagtgccgacgcagaggtgctcaatcaataattacactttcccttctgtgccagcagcctcctggagatagctgtggtctctccttgggagggtgtttggccatgggtcagtgtatccacaaagctacaaaattggtttccattacattagtttcaatagttgcttggcataatttatgattttctactgagaatctataggtagatctacagagagctgtgaagagatccttgacctcttaactgtttcttgttttaaatcatctggtcagaaggggaagtgagagaatggctctcctttccacacaaagacctaatgtagaaagtggctcctggctgggcgcggtggctcacacttgtaatcccagcactttgggaggccgaggcgggcggatcacctgaggtcgggagtttgcgaccagcctgacccacatggagaaaccccatctctactaaaaatacaaaattagcctggagtgttggcacatgcctgtaatcccagctactcaggaggctgaggcaggagaatcgcttgaacccgggaggcggaggttgcggtgaaccgagatcgtgccattgcgccccagcctgggcaacaagagtgaaacgccatctcaaaaaaaaaaaaaaaaaaaaagtggctcctgagaccacagacccagctttgtggttttgaatgcttgatgctgataatccttgcgttatgcgggtatacgtctgcctcctctgttccgattgccaactcttctgtgagctctgaaagtttgttctcttgtttctacccacctaccatattactttgcccttactaatcccttcataaatactagcatataaaagaaagtagtccctcagagaggcccctaatggttagctctagtcccagcaagagatgcagtatttaactactttaggcaaaaaaaaggttgtgcttttcgtgttaccataaaactgtcaatattccctcctttctagctgtgctgctttaatggtctgagagcggatgacttacaagttactcaagaagactgagtatgtattttgactgcctgcacttcctgaataggctttttaaattaaaaatacagtttatgttgttttactttttttgttgttgtttttaagtggctacatctgcattgtttcctaaaaacacaatagctgcgattggccataccagttggcatctgtctgtggttcccctggcttcttattttagttcctccctcttcctggtaggtcctgtcttgatcctagtcaagcctttataccccttttaagacttttttcttaagaaagaagctattcccacaaaaataagttgccacttgcagtgaaaggcataatggacaggaggaccagtgtttgttgagtgaataaaggaatgaaactactacatcacaggcaatttttaaaaatgaacaaaggggctgggcgcggtggctcatgcctatgatcccagcactttgggaggccgaggcgtgtggatcatgaggtcaggagatcgagaccatcctgtctaacacggtgaaaccccgtctctactaaaaatacaaaaaaattagccaggtgtggtgggtggtgcctgtagtcccagctactcgggaggctgaggcaggagaatggcgtgaacccgggaggcggaggttgcagtgagccgagatggcgccactgcactccagcctgggcaacagagcgagactccatctcaaaataaataaataaataaataaataaataaataaataaataaaaataaaaaataaaaaaaaatgaacaaaggttgggtttggtggcccatgcctgtaatcccaacactttggaaggctgaagtgggagaatcacttgagcccaggagtttgagaccagcctgggcaacatagtgagaccccatctctttaaaaaaaaaaaaaagctgggtgtggtgatgcacacctgtggtcctagctacttgggaggctgaggtgggaggatcgcttgaacctgggaagttgaagctgcagtgagctgtgatagtgccactgcactccatcctgggtgacagagtaagatcctgtctcaaaaaaaaaaaaaagaaaaagaaaaagaaagagacaaaaggtttttcagcttcatttgtaagaaaaaagactgagttggctcccccactcaactgaagattgtcttgctattatagagacacatagttgttttaggttagtgcctgacaatgtggatgacagatcagtggggaatgatatgttatttacatggttctgaacttcacttccctcctcttatccctactttggggctgatcttatgttctactgctgattcagaacacgttaaaaacagcctgaaatgggcaattcatctgcatccaattcaaggtatacttattgttttggagaaaagtccatcttaaaaaaaaaaaaaaggtggaaagagagggcagagagaagccaatttctctaggtcagtatcaacatgggaacagccatcctatttagagctgacaaacccagtagccatctgagagagttctttagctaaataggtgtgaagcaggggctgtatcttgagggtacttgtagttagggtccccaaacatatggcacaagctatctttgaacaaaataacagacggcagtgtttgctctgtgcttttaaggcaggtgttttatataatttttacgttatttatttgatatgatttctcaccaatgtacttcatcacatctaaaccccaaatcatgacccttacctacaaaaatactacacagagaaagagaaaatgccgaagttgtagggctaacaaacaccttccaagccacactttggcctaatagtattacttggatatgtttttaacaggtactaaacaggattttttttttttcaagaaaggacttctttcttgtttgtgatcattttgttatttttgcaacttctttcttttccttattgtctaaaatggctcagtgtattcatcagtggtattaacgtgtgaaggacataaccaaggacttagtccataggcagatatggtccatttctctaatcatttcctgcccaaagagctatggcaatcactcttttgcttgtcaccagtgagaatatcttaagaaaattaaattttctaagaagaaaacagaacaacctctttgaagccatagccaatgactctttcatacttttattccagaggctgaggtgtttcataattgttgaatgaattaattaatacatatctagaacccttcttctcaagtccagtctaatataagctcctgaagggtggggactttttgtctcttgttcactgctctattcctagcaccttgatcactgcatggcacataggagatgtgcctcacctctccaccaccatgttgaatgaataaatgatcaaagcatttcttaaccctaaaatagttggtgatatagttatctctcatttgcattattgagaacatcaaacttacatagccatgtcgcaagtcaaagcactctcccaactcagaaaaatatgcacttattattattttaattttgtatttccataggttattggggaataggtggtgtttggttacatgagtaagttctttagtggtgatttgtaattctgttaaacagaaggtaatatgagaagctcatctttgttggatgacattagcaacagaagaattagtttgacaattgactgataaatctctggcagagaaaatattgtgcttatgtatattaaaactgaaattcagaaaacaaatagtgttttcatcattggcagaataggtaaaagcaagtaaacaaacaaataaaacccattgtgggtgttctttaatcaacagaatcaacaggagataagcccttttgtttcttcattagttattccatgcaagtttttttcctctcccatcattgttttcaaatatggatttcaagatgcactattttgtgagtttactacattcttgttttcattcttgtgcctgctgtaggaccttgatttacccttaccactttgctgtgcctcagctttcccagatataaaattggcatcacagtactcatctacctagtaagggagtggggaatatgagacttaattagggaacagctgtaaaacctcttgagatagttctgtgagtcagaatggaagtgcatcattattaatcattattattattgttagtattttcaaatggctcaaagccgtctctaaatttaatagtaaaatgagtgcatctaataattctttgtatgtacatgctctgtggtcatgcatttcacaaattaaatggcagaatacttgtaggatatgattataatgatccaagtaaatgatcctcaaccaattcaagattatgtgattaagaccccaaggagctaaagcaagcagtttgctttgttaccttttagcttctcgaataacccattttgtgttaatttatgtgaaagggaagaagttagctctttaaaaattaacttagagttttctgtgtcattagtttggaatttgggagtaagtgggttactccttaatttccaaataaatctatctgtaacaccttgtccataatctacatttaaatggtttcgaatatgattggcctagcttcctagcagttgttgagtcgagcataatttatgaactttcagagtcatatgcggtatcttcagacatcatcggaaaagaaaattatatgttttagttttgcagttgttcccttgtctcctgtacccttctgtcaagaaactgcatttgtctctgaggttatgttgcaagtcaatggagaattgccttccaccgtacactgcttggtttcagcttgaattatctcagacagacatcctggctagctgcaatgcaagctcacagggctcaagcctgagaagacctaagtttggcagcgcactaagttgaggatgagaaaagaaaaaagaaattctatcttttctggtgcttttccctcttggtttctccactaaaaatcaatagcgtggtcgatagttggttttgagttgtcccctacatgctggagtttttctgatgtaaacctttggtgtctgggcttcagacattataatgtgtcagggaaagtttgatagctgtcacagctctcctgggttacattttattcccacgatagcctttgtaatttgagaagggaagaatagatcaatttttataccatttagttgttgggggaatttcttttccataaattgatttttctttgaaaaatttacaatatttattttccttcttcacagcaaaagcaaataaaatgaaatattttcattaatgaatattttaaaataaaagcaatcccaatcttgctgtaagttgttaagactcagttatatcctgttcaggatttctcacgttccttttgcataacttggaatgacacttttaattttaaatgtatccatttgggaaaacctggtgtcttttcttagtagtactctagaatggcaatatcacgaagaataaagtggcacaacaacagctctaatgcttgcgtggttttaatgcagattttggtttctttgaaactaaatgattacttttatggataccaaataattatggataatgaataattattataagtgatgtctgttaaaaagtgtttatttttattttgagtcttttctatgaaatctcgttatcgggactatcagataacattaaatcattaattttctcttctgaaaatatttttagttgcttatctatctttcattctaatatgtattcttcttcaacataataactcttattagaattatccttgaaaaactttggggtaacttctagcatgttctatgaatataaggtgataaaattgtgtttgtaaggtggcttaaagtttcaaaagatagctttctgagtgaaataatgtttgtataaaattgtgttgaaacagcatcttatagaggagcaaatgctatgtctttaaacacttaatatattattcgaaataattgtcaaatatttgaacaataatatttaagaaggaacactagaattgggtgtcttttcatcagatagtgttagatatcaactatgctgtattaattgaaaggatttggtataatctcataaagaaacaggcaaattctggggtttcctctctagtgaaaatatatcattcatgtctttcattactgtgctataattatggtaagtgaagcagaacgagatcgatagagcaatttatcaatgcattccaaactattctagcatggtttacgtcatatctctgcagatactgtcattcaataaagagacatctaatagtataaagacttcagatggatccatttcagcataatgtctttctacgtgatgttctaatttcgatcatggtttaactaattgtttcactctgtatagtattaagtgaagtaaaatgttttctttgttgaatttcaatagaaattttaaaattcagctttcaagtgtaaaaagcactgcagtagtggaaacattgttattaatggatggctttagccttctttttcagtgccattgtaagttatatcaccattgaaactagaatacaagtcaggtatccatcatgcccccaaaagcattaaaattcaaataacaaaaataacagtcattatttaatgactgtaaatttttgtcttttaacatcacaagattcaaaattctttaggctttatcaccgtatttatgatttaactataagagtaggttcacaggctagctcatttagacttttttttccacaaaccgtacacaatggggtcttttttttaatcgtaaatattccccccatactgacatgatattaaatattgataatattgaagagaagatactgaagtatacatgaaagtgttatttatttcagtatggacaaaaaatattttcaaattactagattgtaattttcttttttcatatgttataaaattatcacccactgtcattttggttaattcagttttctacaaaactatataggtctggtaatgatgccagagtcacaccagtgcaaaattgtcatttgtatttcaggtttgtagacatcgagaaatattttcaaggacagaacttattttttattgagttagaaatgttgaaacgtaagggaaaagagtgaagttgaatatgaccactttgtcagaaaactgtatacgtaactcttgattttggaaaaatcagcacctgcaaattttgtcttttggggtttgtttttttttttttagtccagttcataagattacatgtttttggtttataatttctttacctaaggagagttttgtgctgcatgactccttaagagagtttccatgagctcataaaacatgaagtgggacagtctgaaatattgtgatcgttttctagaattatacctgatggaatgtgatgacagcacctctcccttctattttatatgttgaatttgaaagtgcttgggaatgtgttgatgtcaatcgtggctgtgtttttggccatctttctttccttataccttccactttcctactaactggtgcccctctgacattgtttcttaagagcttgtctgttaaagggttaaagaattagatttttaagctgctttcgtgcaatgtatttaagttaaggaaattgggatatcattacctcagtgaggatgttgtaaattgttttgttggcaagatttattgggggttattttacctgatatcacattgtattgtttaatgtggactatttttaactagcgttctatttaaacagtgtcagtgaattctgagagcttgccaaacaaattctcaaaatggttgccaagctgtaagatggctgccaaggtctgagcacattgaacaggttcaaaatggtgaccaacttctcagaatctgttggtcagattcccccactgccaaccccctccccccacacaactaccacccaaaaaggaaggaaaaaaaccacaaacccgaagatgcaagacttggcaccatctccttggcacgagtggctgtagtgtcatccagagattcaagtagtcaccacgtactacttgtttcacatgcttggcagaagactattcaggggaatacatgaggtgaaaaaccactgtaaaataacatggtcattttctttaccttatctaatatgcacaaaataattctttagaaaggggaaaagcctagacaaggcaatactttcaaagagctttctaaatgagatcgaagagcgttaactaagacttcgggctgtgcctttttgtactgcttgcctgaagtggcacaaactttatatacaacaggtttaagatttattttagttttgcatttgtttacttaagtttatagcaattgctttctggcagttgtggtacttagcagattgaaataaaatcataagggtgaattaaaacatactgctgttagtgctgattagaattttagcttagtgtaaataccggatgcagggtccaacttttcagacacttggcatgagctcaatagggatctccaggctacacaggagacagtgtgtgtgcttggatgcttttaaaattcttggataggtggagcatactacttctgctggcatgttggttcattgtgctggctgcataatgtgcttggattccaaggtagatagaagaagctgaggaaatggtaataagggaagatagtttgaacttaaaaaacaaagcctggaaaaaagaattttatttgaaccctctgcagtttgtactctgtgatatggttaattatataaataaccagtactaaactaagttgaaaatggcaggatttgtggtagtttgaagaatgacctagaagtgaatttgtttccacaagttgttgaaatttttctgtgtgatcctttaaaaaatagacagataaattaacttctccaggcagttagtttagtcagtgaattccttaaatagatcttctgtttaatatcagcaatggactaggttttatattctgattgagacctgcattcctaaagatagtttttaggtgataaaacattttatttaatgcttaagtagctgttaaaaaaggctggttgtcatgaaggtactggcgttttgtttttatctcaattggtagtggaatcagctagggataatactatagagcgatatagtttatatagcttgagttttgaaaaatctatagctttaggatttgttcagtcatggagcccttaggtggtgtgtacattttgtatattctctatcacaaggggtagtcaagaaatgtgacttttcggtcctttttttaatgattttctcctgccatttaggcaacaatgttagtagccatcaaagcttctcgtatgtttatttctagtcttttctcacctagtaagcaattgtcaaccaaggcccaatcattcaataggtaaaaccaaatgttattgacagagctgaaatctgaactctgtatccttcagcgtagaagatcaatgttcattaagatgcttcagttctggaaatttcaacataaagctatggaggcatttagaggttagcagggcaaatgtgtgatatgcaaggtgtgtagcagatcccttcttacatatttccagagtatatttgtaatgttacatgttacaaatgtaaaatagtttaattaaaagtctttcttgccaattcttacatattgtactgtaagttagtgacaaggaactcaaataaaacctttctttttaaattagaaaaccaagagtccacacctcattacagtaaatcatagtgcattttaaatcttcagattaagaatgtgtaatactgattattacttgtcaattttgttgttttttttctattacatattcattgatgatttattcagatgactaacgttgttgtagctgaggcaaaaattaaatcattttaaaatatgtcatttttacttattcgtaacaagttatgagtatgtaagcaagtagaattttttcaaattgcctgaagcatgacaaaattctagatttatagtataaaatgccaatcaggcagtgtttacgtaggtagaataaggcatatttttgcaaattcccacatcaccattcttgcttatatgaaaaagcatagtactttttagtattttgagagaaactttattcattttgctgttgtagacacagtccgtgttttaaattagtgaactgcagaaatcttttctttaggaaattttttctattagtccttccaaagtgagtattttactttaaaagagttgtttgtgttttaaatttatgtggtggtatatttagcattttacccttttctacgtagcatacacgtgtaattagtacatggggtgtatgtgtatgctggtgtctacccaagtatgtattgaaatataaaatttactttctatatagtagctttctgcatagggcaacccaaacagctgttattcctttttatagcttctttaatctatgtgccaacaagtcagtttacaaaatctgttttgttgatgactgctgcgataataattgtggtgttttgtggcttggcaaaaggctggggtctcctctgaggactcttgccaaaggctttgaaggggttgaggtggattcactgccaaaatgagtcaccactctctattttatttagtgtccttctgccaaggccttagacactgtctgttttcattcttttgtaggctttcctccccacattgtggttttcttcacagccagaggcctgggtctgccaggataggtgagagaggctgtgtgtagggaaactgaagggctaggggtttagctgttgtataccttgaatgtatatgtgagttaaattatatggttataagttacaaatgatggacttaaataatctagtaccttgtggtcacctgggtttgggtcagacattctcagaagagtattatttacttttaagtaggattcaaataatgtgacagtgttttcataattggtattgattatttaaaaaccctagattatttgtgagttctggctagaggcctaaatcttgaatttttcctcaaacaaaagagtatcatcctcctccttttaaatggcataataatttacttcacataaatgcgttttctacgtacacacctaatagacttcagggaattatgctaaaattttatttctacctgtctagatttaaattgtcaaccattaagtagactgagcaatatgaattgctggtctgttccctgagatatatttgagatttaaacatttttttcttcattaaatactttcagtagattgaaataaatggaactaaatgtcctcttgctaggtttgtccaactcaaacatgtattatgtatagaaaaatggctgggatgaatttgagtcttcaaaatataagcagaaatggcatttcatgcattagtatgaggaggacatacttgggtttttgctaactttcaacctataaaatttagatgggtttttcttaactaaaagctatgacaccatcctgaaatcttgtagattatgtatgcagaattaaattgaggggcatggtttttgttttgtaagtattcattcattgtgttaactctttaaacatcgtatacacaggaaaacttcattataacatcccctgaaaacatttccataaatataaagtaaattttcaaagttcaaagtcctaactataggcaacaaaatgttttccatatattatggtcgaagcttttgttcttcaggggaaaaaatgttataaaaatgattttaacactttgttcacaaaataaattctattaataattgattattatttttcataaatctttcagttagaaaacataattacgtaggtaaagagtgagataatattaggataaatactgatctcattatattctacaaaggtcagtggttagtatccactaagttaatatatgaaagtcctttgtaaactgttaaatatatagatatcaagacatttaggtttttatttttgttttttttaaaactttggattatcacattctcctctctgtgtatctacttcatggttttcatttaaaatagcaaaaataagaaaatagaaacagttactaaaaacttgtagtcattctgtgatataaattcatttggaatttaaatacttagagctcacggcaagagtccaagacagaaattcttttggatgatctataaaccactcaatccctggttaatgctcaaaccatgtgaaaagttccaggtgaaattcactatgagccttgtctgaaccccataaactgagggaagtcctataaaccctatatgaaccccaaagaatcaaaataactaaatccggcacataattaaaaaccactattttctagtggctgctttatgtgtccacagtttgaagacaagctttgcatatggaagtgaactattttatttcgaagatatgaatcataagctacttagtatttaaatatagttatcctgttgtgaagatctaataataatgctgtttaaaaagaggaactggaactcctttacaagtattaccatttccaggatctctcggaaagttgccaagacataaatatagttgtagtaatgattgttgttttaggagtggaattaacagtagatatgttcatcaacgttattttgaaaaagtaacgttatcttggatttgtactaacctttatgccgtatacttaaaatgcaactcttgataatcatttactatgacagtgtgggttgatagaagctaggtattatggttctctttaggcagaaagagaaacagaacccctgcatgacttcagatgcagtatattaatcttttgggggcatcagtttcctcttctgaaaaatgaagggattagactaaaacaatgtctcagattccttccaactcttaaaaaaaaaatctggaagcaactatctttgcgttattgtccataatatccccttcaaaggtgggatgactgatttatggaggacacattgtaaatcactaggctaatatctcttattaattattgcaatcagaagtataatcattgttaacgtgtaccgagtacttactcctagacatcacctgctgggctcctgatgtgaaattggctcactggttcgtctgtagttctttattagtagccttagtatcttagcatattagtgattttattaagttgactaagcattgtatgactttttacaggccagtgtcttggatgctcaagaatcctgaactcattccctttacctgtaaatgttgaccgtgaaccaaaatgagctctgtcagtctcttaaccattttacttttttgaccgtttgtctcatgataagttttgtaagcattaagtaattttcatacatcatctgtttttgcattcattcttccagccatctgccatgtacttggcttttgggcactgggaagagctagatggggtagaaatgcatcttctcttaaaaggagcttacaactcccaaagttacaactctatcacaaaaagagtgtcaagacacaacccaagttcatcacctgaatgccattgataaggatttccagatggacaaaacattaagctgacaccaagtgaaacgtgtacttcacagactttcatgtttcatttcgtgatatgcagtggcactctgaagaactgggctttcagaatgtatgtgtttggtccggttcttcgtatagggagcagtatctttggaacagtcacagcatacaccacaccacactaggttctatctgtggcagggtcagctcattaaagctactttctgggtcctcgttaatgtcatgcaggccttgtgacaggtgttacagctccccacctggcacggtccattgggggtgtgctgtaattgctcttgatgccacacttaatgggtgggggaagaaagtagcattatgtgtgaggggaggtgagagggatgccctcgggccgttgctgacatctggtcaccactcctgttttgctggcttgtctgtttggtgcctacaaatattgggcctttgagttgagtttgctgccaccattgggttccttgcagccatcattatttcacagctgggccatggttttaacttggaaaaagggcattcatctcagggccagaaatggtctactgccaacatgatcctgagaactttcttagtttaataaatgagagaataagtattctcatgagctcctgtatcaagtgtttcctggttttgagcttttttgttttttggtgagaatgttatctttcattgttatttctgaacccttaaaggactaaatttccttttcaagagtttcaagtagttcttgtacatgtgtgcggtgataagcaaacattagtctgagaaagttctgaaaaatctaattgagccagcatttaccaagcccttctatgtcagctactgaactaggtgcagggaaaaaaataaaggtcctcaactagctcaccctcaactagctgtccctccagctagagaaccaaacctctgcataattaaccataataatgggcagatagattcaagggagaatgcagtaaaatatgtaatatcatgagtgcagtttttatctgtgtgcacaattacgcaagccttttaactaaaaggcttcggtgagatggatttcgtaaaaatgcacagaacttcctgaagcacaaattagacagttccctaatattaaaacacagccctgagaggtagggtttcaggctttctggaacccccaaacttgaattggtccacagaactaaattagaagtaacaacctttccttatgatgtgtgatttctcaaatggtggcatcttcccagagctgtgtgttcttttgtttggagcacagctgcttcctattgttaagttgcaccggagagctctgagacaattaatgaaggggatttaaatgttatttaaaggtaatcccaaaacgtttctttgtgaaagatgccccttactgcagtcccaacttaaataccaacttaaataagaaacttccactctaggcatgctcaataaatattcagtgaccatttctggtttctggggcataactaaaactaaataactaaaaaattgccaattaaatcttccccagccccaattccacataacgcctatgcacaaccacttctgaatgctcatggagaaatagcattaaggctctgatctgacctcagtaattttacaaatgtaaaggtagcatctcatggtccctgtagggatatattattagaagaacatgcatacaattttgttttaattgattctcactcttaagtatgcaaccaatctgtgtatatctccttttaattatttatctgagttgtgagagaaaagtaggtaattatttggtgatccattcaaatgtcttgaaaggaaggcatccaacttttatgacatacatcctgaaagacataaaacaatacatttttattttataatttcatcagtatcaagtgtagtgtaaactattttaaaacaatttataaaaggtgcttacatacttactgattgaaaaaatggccacaagaattaagtttatggaattgaaaaaatttagaccacaacaacatggtaaacattgatttttttcagaaggaaataatttctacaaatcaaaaactttactaaccagatgttatagttaggacaaacaatgaaataatcttactgtaagaaaaataattcagccaacacgttttttaagtgtcttctttacgcttaacatgggtatttgctattagatgggggaggtggaaggaatgtatcaaaaatgaataatggccagatgcggtggctcacgcctataatccaagcactttcagaggccaaggcaggtggatcccagcactttcggaggccgaggcgggtagatcacttgaggtcaggagtttgacactagcctggcctcaaactctggtgaaaccccatctctactaaaaatacaaaaattagctgggcgcggtggcagtcgcctgtagtcccagttgctcaggaggctgaggcacaagaattgcttgaacccgggaggcggaggttgcagtgagccagtgagccaagatcatgccacagcattccagcctaggcaacagagtgagacttgatctcaaaaaaaagaaaaaaagaataatattcgttaccatgttcctgctgacagtttgagtacacaagatacactgtgacatagtgaattcaaggaagcaaacatggtatgggttggaataatcatggatggatacttactgcaagaggcagaaaaacacatgcagttccttttctaggaaaatattggtaaattatgcttggttagtaaaagtgcacagaaagcatatggaagtttcaaatctattttccataaatttttccccaaagtatttctgagatgctgggtgcaaggtacggttcattgtcctagtcctctatgctgaaaatgatcattttaattggattgcttctttggaaacaagacaaagcgtacattgctaaaagcttctggaggccattttcaatatttgtaataatataagtgctagaaatgtgctttcatttatattcaaaggcaataatgccttctgtaagcatggcgtctctgtaagacttttataatgtctacttaaatgcaagcagacaaaattagttttcactttagattggaagacctttctccattgcaactttttggcctctctttttgttctgctccccaagagcaatgtaaatgttgctctttgttttgctaaaagaggaatgtttatttttacaagtaccatgccacttccatatgatctacatggtatgtgtcatgaatataatttctgtatgattggccaaatttttcacttttaattaagatgaccagacaaaaatttgaattgtaagaaaattatgggccaatttagtgcctgttgaaatgtacactggatattgaaatgttctacagagcataatgaatgaaagtaaaaaggctctatctcttttctgaagcctacttgaaaattttgctttcataacatgacattgaaaaagatactataaaaatatttattaaaatcatagctcgagttttttcttagaagtaagaaattatgtttaatatcaaggactttactacaggataacatgattgtgtttcacatagaaaaactttgttgaaaaatcagtgtggagttgagttcatctgggccctagctgaaactaattttacttttggatattccataaactgcatacatctctttcttactgttttgtttttctatgtatgagaaatccatagacacagaaaaaagatggagagccttcatttctcttattttcacttttgtcccatccctctgtgcttgttctttgtttaaataaacttttgttgtatgtctttcacacatcatcactctctgcttcaaaggcttcttttaataacttagccctggctcacttttcttttgcatatgaaattgatttaactaaagtgtatgtgtgtgtttgtgtgcgcatatgcctacatacacatgcatccgtacaaataaaaatttcactggaaagggaactccgtgatctctttactacgtacatacacacaccttgtcgaagtgggaaaacttaagtttggagttaatttggttttgagttccagctttttctcttagtgctgtctgtttcctcaccctgaaatgaagatggtaatgtttactttgcaaaagttgctgggaaagttatgtatatataaatcactttatttttattgctagacattcaataaatgctagctgttactgtgaccatcattattgtcatatatgtaacacaattatgtcatacatttattttgaagctgataataagtaaactgataaaaagcagaaggttgagattaaggcttcttattgctaaaagattgatcttaagtacaatcacgtgaaaactgatagttacataacctgaaaaatcataaaatactgaaaaattatgactgttatgtgattgttttcagttgtcagactacgtgatgttaaaatggcagttgattttttgtattaacacagtgcctctaattttaaaaactgcttcagcaatcatgtatttaatgaaaacagaagtaacgatacaaaataacaaaaatataaatagagttcagaatttgaaaatactgtattaggaggtaagctgactatttttcgtgttctttaaatatatttagatcaacttgaatattaagcctcctacagcaggtagatagaggtatcaattcagttaccatttaaaatacagtaactccaatgaggagtttcttataattatttctaattactttttgatattagaaattagagctataccagaatgctgggaaagatgtctttttcaacattgtatcacagcatcaagcattatgcatcaaacatcaattcctactcacaatatccattcaatgtatatttggattatattttctttggatagaccctcatagtagaaactctgtattaaccagcttgcaagatgaaccaagactttttgttttctttgtaatatactgattcctttggcatgttgaattttcatggccaacagttacctactaccacatcctagcactattgtttttaccagttgtgtgcttaccacgtcagttgtgttattccggacctgtttatactagtcttatttgtatcaccattgtgtaatttaattaaatttatgtgaaccaatggcatgcaagttcaaaatggaaaagttttatttctatgaaactaacccagtgccttggaaagaatcagtaaaggcaagctacaaaaatttctgtcagattacatgtcagtgagataactacagaagatgagagaaggttgtaaaaataagagttttgttagattattttagaaatatctttaaattctcccactacttaaagtaaatggaactggaaatcttttatgatgcattatagatacgcattatataagaaagatgctgtggagctccaattattaacagacattattaaatttaaatttttgcctctgcataaaaagattggccaaagaatgtacatacacatgctcaaagttaaaatgtttaaggtgcatatgtctcattaatgagtatcttcttcatccattttttcaaattaaccaatcaacaactggccctaacagtactggataaggtaacttctattctattttgtattcctactctttacagagttttagagatgttttgtttcctacctaccaagggaaaaaaagggaattggcagatagagtttatatcttgggatgagatgtgtaaagggccaggacctgaaattacgtgaaggttgatattctgggattggtagttttgaagttccataaagaagttcagtccagccatgttccaaatgctctgagtataggcactggctggtaagcttagtggagtgttatacaacatggaagtctaactggcagttcaatgtcccaaaagttggacagaaccaagaaatagagaacataagcagatgacagtaatccaggcagaaggttagtgtcagagaagtctgtcagtgggtcatagggctccacgtgctagcctgggtttccgtgccagaattttgttcttgggaggcaggtagggaaaagcaagtcaacatctccagttccagatgagctagggcacttgaccaaatacaggtacagaagttagtccttgaggtagagcttacctgttggagaacatggcagaaatcattgtaccaaaattggagcacaggtcagaggctaaagcatggcttactgctgtggctcatggtgaacttgagcttctcatggcccctcctatctcctgaggatggctgagctcacagatggggactgttatgtaatcagaggtcaagtggtttagctggggtggcagagagccaggtgaagactgaaagtgttcaaataaggaagagaacagaattgctttatgtctgccttcatgaagacaaaccctaatagccaaaggactgaaagtttgcccaaagagacctcaatttttgaaaggaaaatgcatcttctccttatgttagaatgaccacgtctaaataaaataaactcttttgccttttgttgttacttgtcttggtatctaccattgtttgacactaaaaaaaaataaagcagtgactaattattggctaatttaatctgtcatgatggcatttgtaattcaggtacatccttcattaaagcaagtataggcattattatttttaaaactttttttttctatttggatttcttctattttgtttgattatttattttgttgttactggtggtggtggtgttttacagtgagacatactggttagctcagctaaggtgtttgagtaagacttcataaacataaagtactttgtgtgggtttgttttgtgtgttccatcttacgtcatttgtggcactgaaaatgagattgcaattcccagagtactgggatagttcattcagaggttagcccacctaagtttatagcagttgtctgtaatagaattgtaactaatttccactgttgtttttggagaaaactgtagactataattatgtgttagcactttttaaacagctccctgcattgtcatatcattttaaatgggctctgttttaaaatgacctttcatgttttgattgcaaaaatatagcttacacaggtctgtagttagcaaaatacaaggatccagtaaatgatagagcattgacacaactctagaagcatgtgttaaacatcactggcactgccctaggtttaaaggggaagaaatagggaagtagaaattcactgttcttcaacactccttctgttggataggcaagattagtacatagaacagttatggagccatgtgaaaaaaaatagtagttatacaaatgtaaaatgctacacatgaagtatattgcattacctttttgtggcctatggaaagaagtctcagagcacagtaagattcaagtaccatctcccagaattggggtcagcaacaccattttatattttggcaaatgctacccactgtctcccaaacggcagatatctgcatatagttagtcatgtggacacacccttcctctgctacattgcattgccatattagtagtagaattttagtgttgatttaaaagacagtctgccttaaagcagattgcatagtttgcacactgtgaattgtaattaaagtgtaaggggggcttattatgtcaacaactggcatgagaacccccgagcagcaggtgaccctgaccatgtgacgtttgtgacagctaggatccccttttcactggcttagcgatctgaaagtccaaattgaaagaagcccagaggctgtatatttcattagatcccaggggaagtacaggatacagcttccttctgttttcctgggaggtcgccagaaagtttgtagagctctgtttctgtcagagactcaaaagagaaaagaaaaagcacacacaaaacaaaacaaaacaccatacacaccacaaaaccatccaccaatcacccccaggaccataaatttgacatttcccacagtctgagaccacagtgttgctgtgtcagcaatacgctccttgtttgaattgtctgaaaggaaggctcagtgttctagcttttaaaaaatgtgtaatcttcaatatgcagtgattctcttggtgtaaaaccatgagaaattatcaagtacagatatcatatgatttgcttgaaatacttttgcattatgcgttactttctcctgaccttctaaaatggggcataagtccgaatttagaaagaggaaaccacatgtgtaataagggaaacagactaaggagacatgccatgtgtatttcagatcttattgtgatgggtaaactgtttgaaatgtggtcacattaaaagtatgttactttgtgggagactcaaaatcttttacgagtagatttttattgtgttccatagtggaaatagaactagggtttggttttggtgggaagttttggtcttcaagtcaccttggcacctgactggcagttgtgaaactaagtagaaaagatacctcttttttcttggcacctcacacgggatcataggattcttactatcatacaatttatatatcacagaaatgaaaacttcggtactttgttgtataatacagatcttgtgcttgttgatttttaatttggggctcaagcttcccatgtcaactaatgtggccgctgctaggctgccctcgggtagaccaaatgtaagctcactaggaagtatttctagctctgtaaatacctagcatatcgtttagtccaggcatgtccaatcttttggcttccctcgaccacattggaagaagaagaattgccttgggtcacacataaagtacactaacattaacgatagctgatgagcttaaaacaaaaatcgcaaaaaaatcttagcatgttggccaggcatggtggctcacgcctgtaatcccagcacttggggaggccaaggcgggtggatcatttgaggtgaggtcaggagttcaagaccagcctggccaacatggtgaaaccccatctctactaaaaatacaaaaaaaattatctgggtgtggtggtgcgtgcctgtaatcccagctactcaggaggctgaggcaggagaatcgcttgaaccgaggagacagaggttgcagtgagccaagatcgcacctctgcactccagcctgggtgagaaagtgagactccatctaaaaaaaaaaaaaaaaaaaaaaaatctcataatgttgtaagaaagtttacgaatttgtgttgggccgtattcaaagctgtcctgggctgcatgtggcccctgggccgtgggttggacgagcttggtttagtccctaagtgttgttcattttaaaccagaaagtgagaattttctgagcccagattctacctttatactgctatttgttatgttttggtcaaaagggaaatacagaaagaggaaagttaacagtcatggtttgtgtgcttgtatgttgtatactttcatgttttgattgcaagaatatggtttacacaggtctgtagttagcaaaatacaaggatccagtaaatgatccttgtatcatttatttaggaccctctgttgtaagggcccaaaaagactcactcacagtgccatacacatggcactgcatgtgtgtgtgcttgtgccagcctgggacgagaacttcaaggcttgagagaaagatgtaccattttcataaatttggtaaataaattaaaacctttcaacttagagctgcatttaagtgttataattaaaggactaccagttgggttttttgttttgttttgttttgttgttttacagtccatctattttagcaaattcgcaaataattagtttcttttatttatgtttttcaagatcggttcctctattcagccagaggaaaacccaatatccttagctgcgttttacctcaggtacccagagaattgaggcaagaataggttgtgggaatgtgagagaagtgtgtctgtgctgtctcagctcagttaactagtcctctgtagcaggataagcatgtttgtgcagaggtagagaattgtctccagtcatgattttgttttttatattttttactgcgttgtttttttttttttttttttttttttgagacagagtctccctctgtcacccaggctggagtgcagtggcatgatcttggctcattgcaacctctgcctcccggattcaagcaattctcctgactcaggctcccgagtagctgggattacaggcacacatcaccatgtccagctaatttttgtatttttttagtagagacggggtttcaccatgttagccaggatggtctcgaactcctgacctcatgatctgcctactttggcctcccaaagtgctgggattataggcgtgagccaccacacccagctctactgagttcgtaagtgaagctttttcccctctcatgttatttgaatattgtttccttcatctttgtttatttattatttatttttcaaaccagggtctcactctgttgccagaactggagtgcagtggcacacaatcatagctcagcatagcctcaaactcctggacttaggtgatcctctcatctcagcctcctgagtaactaggactacatgcttagctgtttttttttttttttctttttttcttttttttttttcctgagacagggttttgctaagtttcccaggctggtcttaaatgatgctctcatcttggcctcctaaagtgctgggattacagggatgtaatcctggacccttaatctttattattagttcatcatcttttatcatgtatactatgtgccttgaaagtgtgtattattttattatctgcacaattccacatcactttattgatattctgaatatacctgtagtatgttaataaatagcatctaataaaatgtagatacataaaaataagccattttcataacttttggctaattttggaaacagcattctcaactgcaggtcagatttttaaaagaatttaattttatctgtgattgtgtatacatcatgccaaagataaaagcaattcagttgagtgagatagggtgtggaaacaggctacatgttggagtttgttgccagcctgacattttcaacacagtttctagacccatctttttaaatgcgtgctacaatgaaaaccaaaaggactttttcatattgtatttgcagtcatctatagatgtaacttctgatgtctttatttttgttgctcttctcttctcattaacagcagacctgtagacacactagtcccaacatggttgttttacttcctcatatgtgtactgaagtgttctttgctgtctgatgtatattaaggggtcttcagcaattatgaaaccattgctgcagaagcccagagtcacatactatagaaatattctatagtaaggacctaacaggattcacattaaacagaacttgactataaactaatggattcctactacagataataggaaatgtggttttttttttatttttttgaaacagggtctcactttgccacccaggctggagtggggtgacatgatcatggctcactgcagtctcgactcctgggctgaagtgatcttcccacctcagccttctaagtagctgggattacaggcacacatcaccacacccagctaatttttttgtagagacggggttttgccacattgcccaggctggtctcgaactcctgagctcaagcgatccacctgccttggcctcccaaagtgctgggattacaggcataagccaccatgcctggccaggaaatgtttttaaagactctggttcctacaaaatttgcaaagaattgtgaaaactgtctatccacttctttaaattttaatttttgttggtttatatttcaaatattacattgtcaattaggattattatgaccatagatgacacattttgcccatccctgataaagagaagaaatttgctccctaatgtgtagccagtttaggaattttagccttaattgaaaaatgtatacttttttgtaactggactttgtttctgctaggagatagaaaagtctataagccatctctgagatagatttctactcttcctttaaaatcttgcccggactggcccttcccctctctgttcttccattcaaggctcacttattgaacatatattatgtgcaagcacttcatttaggcaagtacgagctgtgtgccctcaagggcttataacttgttgggaaggcacgtgggagttatatacacagagaaatgaattaggatctgagtcccattctcagtaaccagggtgtagggagccagaggaaggaatgatgagttctgccaagaggaagggaaaggattctgacgttatcttctacactggttagaatagaaggatggaatcctaaatttaagacggagatctgtgctgtatacatgtgactaacagagattgggaaagagtgtaattacctcctgtgcctaagaaggttgttggcgtaaacaaggtagaagcaaagccaatttttgggacagtttaaccgaaatcttttcaaatatttggtagaaagcattggatgaagtgttacaattttaattaatgtttttaaatgacaattgagggttaataaacccattgttgccgtgcagttgagaagagtagaatgggtttgtttttgcaatcccagtggggtaattaaacttgcagtgcctgtcactcattccttaggctgagggacttttgagattgcaatagctcatcttgtgttgcagctttgtttttaaatttagctaagttaaagcctatggaaaaaaaatcaagggaatggaagagatgagttttgaactagtgaatgtgttcactcaaggcacagggcctctttgaggaatttaggtcgcagacgtctttcacagaaaagctgtgtccaaactgtcacagttactgcctcagtgtcctgttttgttctgaaggacatgacacctattttccatgcactttttcagaaaatagtatttgtacccatttgttttgtcttcttaaggaacgttcatgcagacttttcgagcagtgagcaggcgccagagactatgtcactgttctgttctgcacagtgtagcgatttgcagttggcgaatgaattcatcagcggatgaatgtcagctcactaggtgacaagcttcctgtgatatagactgggtgaggacagagcttggtgagccttttttgttcacgacttcatctctagcactcacagtagtgcttggcacatagtacatgctcaataaatatttgtagttttatttgtggaatgatatgctgagtaaatgattagagtatattatcaagaaattactatttttttttgagacggagtctcgctctgtcgcccaggctggagtgcagtggcctgatctcggctcactgcaagctccgcctcccgggttcatgccattctcctgcctcaacctctggagtaactgggactacaggcgcccaccaccaggcccggctaattttttgtatttttagtagagacggggtttcaccgtgttagccaggatggtctcgatctcctgacctcatgatctgcccacctcggcctcccgaggtgctgggattacaggcgtgagcccctgcgcccggccaagaaattttcatagagtttccacttccttggttgctgaatgatttgtaatattgtaatcagtatatctatgacacaatttctaaagttatttagtgtttgtcagtgatgtctgaagctccatttgctcttttgaagtcatttgtttcttaggacctacaattcttaggaaaaaatgacttacagtcaaataatttaggaattttaggggaaatctggagcccattttatttagtggccttaaagatgaggtacataagacccaggctaacccagcttctaacagttgattctgaatcccaggtttcctgattctgaacttgatgtccattttgaggggttgttaagccaaataccttcaagcttttcccctctgttgcactcacatttatgaatacagatggtctctaacttaggatggttcaacttaagaatccacattccataaaaatgggactttgattacccatacaatactggttttcactttcagtacagtattcaataaattacatgagatatttaacactttaatataaaagaggctgtgtgttagatgattttgcccaactgcaggataacgttaagtgttctgagcacatttaaggtagactagcctaagctgtaatgtttggtagtttaggtgtatcaaatgcattttcaactgatgatactttcaacttccaatggatttatcaggatgcaacccccatcataagtcgaagtgcatctgtacttactttagactaaacaggaataataaagtactctaggagaagagaactcagtaagaggttaactttacgtggaaatgttacaggcctaatgtaaggtacagccaacaacaacaaaaaaagcaagctggcgatctgccttccatgcaaaggttatttttcttattacaacaaaactaattagtggattttctaatgtaagaaaatgttgctgttagtaaaagtttcctcagtgtgccagaaagcagatggtggcagtgaatagtgttttcttttgccaggttttgtatatgctttctaaacctgcaagagattttgcttttccagattcagatttctgatcttttttattttaaaacagaaatagaaacttatatttaaatgtacttgcatcatgtggtctgtttgacatattatggttacttgaaaatgttgagtaacatttgatgttctgcatgaatttcttctctaagagtcttgggacttttaatgttgttctatactctctctctttatggaaataaagagtttctgccttgagagtgctacaatggggagttttgagtgatttatgaaaagcaatgggtaagatttttttatgtgaaaatttgtattttgtttcactcccaattactgtgcaagtaccagcttttcacagtgaggtttcttacagcatgactttgttcattatgacttcagtgtttgtatacagttttgaataatttatttctgtctactactggtgagatgttactttctgctaatttaaaatgttttgcctaacgtttttaatgaaagtccttataaatatgtttgtttaaagtctgaaatctaaacatgtccttaacagtaccaacgaggcagcattaaaacaaaaggcatgttgattttaaggccaactggaagaatgtatatctacaatggtgtagacgtgaggctgtaatgagcatgagtgtagtcaagacttatggctttgttgactaaaacttaagagatgctttcctttctataggacctccatttagaggagaaaaggaaatcattaagtcaatagatgagttattaaagtataaagtaaaaatggaaaatgaaaacacactcagtgatttttttggaaatcatttgggcaaaagtatcaagaaagaattgtctcaaagttactaaatggaatagtctccttatggaattatgtgctattttgggaggtgatagccagaatcaaaggaaatgaaagaaggactttcatcccttctttcacctcattcccatgtagctctgctgtgttgttccatccatccccaacactaacctgataattcggagacaccttgccgcatattgtttcacctttaattcttgaataaactctgattcttacttataacttttcccatgtttgttgccaataaaatttcccatctcatttgaagagttgctatttctgtcacctgttcaaaggatagcacttcttttattactacctctttctttttccttttccaactatttctcctttgactttgtttttcccaataatgatttgtttttatcttctttcctagtaaccaaaaattaaaacaggacagagtttccaaaggaaatgtctgtagatgttaaccaaactgattgaatcactggttattctttgcttactttaaggctgtaaatctgcaaaaagacagaggtgatactggtatcactcacagccacaggttagtgccttggctgtgctgatgctgccagggtttaaacattgctgtgaggagcccagcacaggcaggagtgtggggtgaggatgtgtgataacagggcatgacgggcaggtagaactgctcgcttgtgttttacacacaggcgccccagccttcctataggctctttcttgtgaataggcttccaccatgaccaaaatgtttgaaaaaccgtaaagccaagagataagtaatttttgttgaatataaaatagataagccattacctattcataggaatatttacctcctgatagactttggcaagggttctaacacagagacactccatgttctcaccaccagtgaagacgagggaagtagctactctcaaaaaacaaatagcattggctgggcacggtggctcacgcctgtaatcccagcactttgggaggctgaggcagctggatcacttgaggccaggaagtcaagacaagcctggccaacgtagccctgtctctactaaaaatacaaaaattagctgggcatggcaacatgcacctggagtcccagctactcacgaggctgaggcaggagaatcgcttgaacccgggaggcagaggttgcagtgagcagagatcacaccactgcactccagcctgggtggcagagtgagactctgacttaaaaaaaaaaaagtgtaaacttttataaatgatacagagttgaatgaatggaattcttggtgaacatgatgagctatctcaagactgaataatgctttgcacacagtaggtgataacaaatgtttgaggccctgacataaacaagcttcctcctcctaagaaaggttaatcaatagtcattctttagagtgagggatccatgctgatttttgaaaagtgaatcagagtaaaagttccaatcgccctcttggactttttgatgatcagctattgaaatagcacgtatgttagagacagtcctcccagcaaacatgattttctattaaaatacatccaggtgacaaaaaagaagcttttagaaaaaaagaatttgactgagcgtggtgactcacgcctataatcccagcgcttcaggaggctgaggcgggtggattgcttgagctcaggagttcaggaccagcctagccaacatggtgaaaccctgtctctactaaaaaatacaaaaaagaaaaagagctgggcatggaggtgggcgcctgtaatcccagctactcaggaggctgagacgggagaattgccagaacccggaaggcgaaggttgcagtgagccgagatcgcaccattgcactccagcctgggcgataagagcaaaactccaccttacaaaaaaaaaaaaaaaaaaaaaaaaaaagaatttcccgaaggtagtttatttggcaaatcccacacaaactattagtagtccttatacgaagacaatttaattttgggattattactaagcaaattactcacaaatactgagttactgaaatggaaaatatttttatctccccccagtgtaactacagacaagaatgtagatagtgtacttaggtgtaaatgacagatggaatgaactttgggtgaaggcgagagcacagaagctcagtggtactgagctgggtttgagtgggtgggaccccatgactggttactgatctttgaaagcgtttcaggatttcaaagctacataagcgaattcacgtgttttagttatctaggtttgttttttccttgttatataggatgtttgcagttttcccatttgtatcaactcatacatctttgaagttttgtaattcagtatagctttggttatagattaaagttcactggaaaatcactgactaatccttttagcatgttccactgttccatagtataaagatacacagaacttgatggcttccaagtgtggttcaaacatccaaagcactcgagattagcaccatgtgaagaaattttaaaatattgtactgcaattaattttaaataacttagcactgcatatgtcagggagaaagccatggtagaattcaaacagaagctcctataagtgaaatgattcacttacatcatttaaataattttatctctcataaagacatagaagcaaaatatatgcctatttccacttaggaaaggcttgggtgaatttctgaagaatcagatattacctgaggtttattataatatgggaagtctgtggagcatttattggttaccaaatgattaactccctatattcatgtgtatttgttataggttcaaaaaccaagttattacagaaaagttattgtcaatgtggaaattgaaaacacattattttaataatataacgtagagaaggtatatctaaaatacatatttttaagtattatcctaaattctaggatctagattaaattctttgaggatatctttttagtagctcctgaaacacaaagttttctggaagacccgatgggtcaagatataaaggaaaaaacttagtttatggccttctgtggtcaggggttagccaagtcactgaaaataaacatttgcaactgttagtgggctatttgcggtcatttataaagtataataagacacagtttatgacttgtagtgattattgcactcatgttatttctaattgcacttatgatcagcagcaaataagcaaatatcactcagtgccttttgatgaaatgagagtcttagccttgaatgcagccgaagaccaacagctcaattgctagtgatgtgtttcaaatgtagaaaggctggaaagaacctttactgaacacctaaccctcaccttcatctatagatattctggcctggagaggtaagaatttacatatccaagggaaaatgggtgatttacgaccagaaagtagacctcctgactcccatagagacccttcttaccacatgaaacataccatcttccagtcatagagtctcctccaaaccagaaagaacaccccaaacacctattgacctttcccaagagagaccctattgtattttatggctctgaaagagctaattttttttctttctttctttattttttattttattttatttttatttttgagacggagtttcactctgtgtcccaggctggagtgcagtggcacgatctcagctcactgcaacctctgtctcctgggtttaagccatcctcccggttcaagcaattctcctgcctcagcctcccaagtagctgggattacaggcatgctccaccacgcccagctaatttttgtatttttagtagagacggggtttctccatattggccaggctggtctcaaactctcctgacctcaggtgatctgcccacctcggcctcccaaagtgctgggattacaggcatgagccactgtacctggcctgaaagagctattttttcatctttgtatttaaattccatttcaacaaacatgtgttagtatctgtatgttccaggcatggtgctatctgccagtaaaaatgagacagaaaattaaatagcatgatgctttaaccagtctatatgctttagaaaacctgcttccaagcagtgaacagttagagaattatagccactcataatttacaaggcactgtaaatcatgccattcagtcctggtactctctagagtcaggtatttggaatgagtcagttgaggttcagggaggtaaaggggcttgcccaattcctcaaagctaatataaatagccaagaagggactcaaacccaggttttcttttatcatgccttttgccttttttcactataccatagctacttctggtagaactgtcatttctattaaagggaggataccaggcctaattcagaataacattctgtactatgtatgcaattgtttctaaggagaaaagtctgatttaaaaaaaaatatttttatacttttaggctgggtgccgtggctcatgcctgtaatcccagcactttgggaagctgaggtgggtggatcacctgaggtcagtagttcgagagcagcctggccaacatggtgaaaccctgtctctaccaaaaaacacaaaaattagctgggcgtggtggcagcacctgtaatcccagctacttgggaggctgaggcaggagaatcacttgaactcaggaggcggaggttgcagtgagccgagattgcaccattgcactccagcctgggcaacaaagggagacttcgtctcaagaaaaaaaaaaattggatactttacaccatttccagcaatgctagttatgcagtaatagcttaatatttcacttaaaaaaagattctgcctaaacctctctttatctcactagaagagctaaccctaaccactaccaccgccagttagtatcagggctgctgtaaattgttccaagggtacatttagtggtattgattgctgctaatagtaaaagaataaaagcaattatgaatgtacacaacaacttgttgctctaccccagtttcaccaggagataggatttagtcaagaggggatgtcacagaatctttatcctgattaggagctttttgaggggagggaccttgccttttttcattttgtatctccaggtatacagggtgaaaggcaccatagtagatgccaagcgaatgaatgaatgaacgagatggataggcccaaagacaactaaatcaaaaaacctgtgttgtttcagaggagaatgatccagtatcatttcccctttgggtaggagtagtggtatgaatattgctatgactgcagaatcccagacttgtctagaatctctagttatagctttcctcagcagtgggattcaccaacacactgaaataacctgtctgtggcaaaactccatacacaatcctgttttctcaaatgcttcaaggggaaaagaaattcctgatttacccaaccacagaatcttcaaccttctcattaaggcttctgcattttttaggcaaattgttactgtgccattcttactcctatcctttcacagaattattttctgattatggatatgacaagacccagttgattttttcagagtttagtcatttattctgtggtttcaaatctcttctaccatgttatcttcctgcccctctactcccctgcccccaccccccgacaccaattcttaattccctttcttccttttattctcaccaggaagggatatgtcacagtaaaccctaccaccttgtcatccaaaatttctagggagccttagttctgagggtcttcttcttgaggccttaaccttacttttagacagttgtcattatctttgtctaaaggtcatagctaaattgaataaaaggaaagctgtgttttcctgttgatgcacaaaggcagtattgacttccctaatccagtttgctgaggggtgagagaattaaattagatatctaagcacagaaattgagagcctttgaaaacaaagataaggagacaagactgtattttcccttttcctgggagctctgggctcaagattttgcaggtgtgtcatctgatccatggcttgcatcgatcaaaactgtgccaatgcatatttaattagcaaggggaccctggatgcattatagccatcatccctatattgaatggactgtcagactctccgcacacttctccacccccaccgtcccctgaacccgtgctccctcccttgcctcgttgtttgggaagcttctgcattttgtctgagcagctaaaaagtttctttgtttttagctgctgatgcatacagcgccactgaggagaatacaaacaagtagagtcctaaagtgtttattttgtctaggaagacaagctaaaccaatttgattccttcggtaagattttcaaaccctgtagaaaaccgacaagaaaagcaaaaagaaaatgaatacactgttcaactcttcacgtatagaatttaaaaaaaaaaaaaagaattggttatattaggaataaagaagacttcggacaaatattttaataatagaattaaagaatactttctattatgatagaaggtattttattttaaaagctctgttttgatacttaaataagacatttgttgttggcaaatattttattgatcagtctaatttgcttgatgcaattcaccattctgacatgaatctgtcattaccattaggaaatccaatgcctgtacaaaagttatttatgatagaaggtgacaaagagttagagctggatgtatttttttttaaagtttctaaggttttgtgggtgtttctgttggtgagaattcttaaagtgcaggaggtttggagttttgccacagacaggttatttcatgggattatggtcactgttcattttcacacaggttccaaagcttgaatatccagacagtgttgtctgataaacagatgtaatgcaccaagtctgcttagaataaagagcaacagactgtgagcacatgtttaggactcatttaaactcatcagcatagtctagctcatagttctctgtctctagtctacttttgaggtagcttcttgctggtaaagtaacaaggaattattttttctctgctacaatttgctgcagagactcatgggaaattcatttgcatacatcttgttacaaagactgactacttcctggcttagacaaagtgttgcctgataaacagacttaacacacaaatgtctgtctggaataaacaacggcaagctgagatttacatttcattatcaaagataatctctttcccagtatatgagaattaagaacctgttctttaaaaccaggtctgtgctcctgatgttttatactagaatcacatcatgtgtcggttggggttgattttcacaaagaaacgaaaaacttgttgggatgtgaagatctgtagggcagaggtaaatgtacattttggggggcctttatgagtttcaaaaccaggttttcttgctttattttatttgaaccacacaacatcctgttaagttaggcaaaatcatcagtagtgtctccattttacagatgaagaaactgagatccagcacagttaaattatatagctgaggtttctaggacaccatctttttaccatttcatactcttttcaatggtggaatatgaatgcaagaaaattagtactttaaggtgctacctggacttaaatagcatgtttacacttgatagagggcattttattatttcaataaaagtttgtgcagacatccaggtacatgaaaataatgcatgtagattataactcaattatccttcattttcatttgaagcatgtattttatagtaggaaagaatacagggacattttctacattaagtagtatagatggctgtatgagtaatcttcaagtatatatcatcctgttgaagaactccaagaacctagtgttaagattaattttgattgtgaaaaaagtgactaaatggggaaattaagcacaattctgctatgcaataatgttgcagggatggctttttaagcaggtctttgtttacatgggagtgggtaggtgatcgggtagactcaataacttgagttctgaattaatcagcaggcaccgctgtgaacacagcgcctcttatggggaaaacaaaattcaaaatgattacctagacattttagtttagtttagtcaaagcgtcttctcaaagaaaatgtgagaagttacaaacttagtcaaagtatcatgtttgcctgtcttttataatcaccagcttcttaccattgacttcatttataacatcactgaaaaagctgatcattacttgaaattcagcctcatgcgaagattgaaggtttaatgattgagtcattttgtcattactttcagagtgactgaatttgtcatttttaaagcttagaaatgatcctcccctcactgtcataacacaacaatagttatgccatttcatttttttctcaacgtgttagaactgtgtatcattctgcaacctccttgtgcatgtagaaaaataacacattgatgagtaggtgataaggcagttgactcactcttcaacttaaacagtcttatcatcgtacacagtaccgactaaacagatgggccctggaataccaacattaatgaaataccagaaaagttgaatttctgtaaatttaatatttcacaaacttgtggccagaaaggcattacaaaaagaaaagttttgagaaagaaaatggtagtaacctagattatgtaacagtcttaagtaggccttgacaatgcggtacaggggagtgactaaggggtggatctccagagcagctggcagcccccagggtggtctggtggagggagcccttccaagtggctgctgcaggaacacagaccttgctccctgtctgaatcaggagtagaggagatgaggaccaatgcgtgcaaactagcctggtccttttggagctaggagttcccctgcaccccgccacagctccccatctcccttcgataaaggacttactctgcatacattaattactgcagttaccgtgtacatatatctagacaaacactcaattctagcttgctgggaaagttataaagatgaaattttgtatttaaaatccagtaatgataagatttcccatttaaagaaccacagagtgtttccatttttaaagcttaagaaaacttttatggtatgactcacctcatcttttatctgttttaggaactcggttattgtacgttaattttcattaagcgggccacagttgtgtacattaattgaccttaaatattagtttggttattcactgagcttaaaagattttattcattctctgtaaatgctaatcataattgcatattttcggtggtccggatttagtaatggtgttacagatttctgtttgttcttaaccagaccatgatggataatattatatttagctgatggtgttgtattcatcaatgtttacccttaagctacaaattgtatatacatgtgtacacctgtacgctgacattctacattctcaaataaggtttttccaatattttcttcacacgtcagtctttaaggtcacggtcatactggaaaaaatagataattttcctaaatattacaaagtattacaataataatttcttttataactgcagctgtgagactaataagcaaaatgtgactattatagttatttgattttctggatttcgttaatgtaataaacttatggtactggctgatcaaaacagagtaattttaaaaattatgttactcataagaacagaattatttctctattacaaccttatagatgtagaaaaatgaattccttggcctcttctgcagagtatttatcttcccaaaccctcagaaactaaaacttatctaaattttgaacatctttaaggtctacagttgtagagggtaactgcttattacactcagagtgtaatcacccttactccttactttcttttacctcagaaatgttcctaactcttcatttatttgcaggaaagtattcactcctgtctttgccttttagtttttatactacaaacaactctagctcatgagagtggaattttcgctttatttctttcactaatatttttgggtttggatgccttctggtttcttcataccgtcttttaatttgggagatttaaaactggacataaaattctaacaaaggctcttcagacttcatctttagtcaaatcattatgcatgtagggaggctgaaacttaggctatattatttttctagtggaaccagaatttgtgcttttatggtccatagactttggttgctatcgtgttgatggaccaggaatgacatcggtttgttttagggtgggaagggttcctcaccagtgtgtctgcttttcctttatcaagaaattcacaacagcagttgtgaggattttgaggcagtctacaggcaccagaatatggtgggtttctctaatcattgtaatttttaaatgtgtgaaatattcctccatcattcatcattttaacctgtatacatttctggagggcctcctatgtgtcagatacggcttcagctcagcctctgtgctgcttgggccagtggatcataggaggtgattgtctgcaatttctaaacactgtgtaagatttccaaaccactcacaaaccagagggatatgccctatattcccttgccaggtctcaagaagcaaggcatcaagcagagatagaggactttttgcgctcctttctcatcttagaagtcccactcccctttcaggtgtaagcttagcatatttttcagtcactgacagtggttcagtatcagaaagctgaacaacaattgaaatttcgtctcttcagttcagcagttattgaactccttggctgggccaggcaccctgtggaaagtaccggggataagagaagagtaggaaggaactcctttctttagaagctgacattctcagatggtttaaactcaccttactacagcataatattaatcacactgtaagagatacatttgcaatgaaagagggactggagaggacaaagtgtttaattctaggtgaaagggaagatttagcaatattctatctttgtttattgcctaaagaacataaaatacatggaagggatatttatatttttgcctcactcattttaccatactaacatgtttttgtcattcctcaccttccccaaaggaatactgaagtttcattctgaaggggagtagacctgaggtttgaggagccgaatatgtgtacatgtagcaaatccagtacaaggtttccgttcttgcattgtacaagcgtttggaagcagagacaaatatgtaggcatcaggatttattttattcctttccctagtgattacgttgacagtgaactatctttgtctgagtactccagcaatatagctgtaggcgccataaaactgcataggtggatggctaccagttcaattaagagttcttaacctagcctcccatatgcaaaccctgtctattttaggtttaaatttctgctcataaattttttaaaaatccaaagaaacattgcttttcaaggttaggttgaagtctaagtttccttaaacaaaaagcaaatccctagatagggaaaaaaaattgataaccctaatgtacttccttacaagagcatttccaaccccatcctttaaacacagtgtaagtaaaattctcttcattgtaatatacagatcttctggctttcaaccagtaagccagagaaactcactggtatgggagactcagatacaagaagaacatccagttctatgcagttgggtttgttttctgaggttcctaattatttaaggtggtagaaatcaatcaaccacgtgatatttgtccgaaagagtaagacacaaagttaccttggcttctgacaggtgtctatggagtatataaaggagaaaagtgaattaattgttaaccttcttgatagtgttttaatgcaaatgtttgagaaagagatctttcatttgtatcaattatacctgggtagaaattaatttataattttggtcatctggttggctccacacttaacagcatcagtgaccttttgcaataccagaaagagtgtccatgcatcctcagcagagaatagcactaagactgggtagttttgctccttcttggctgaaaaagaaaatggtattgaacggccgagggtagaaaataattattgaagttttgagatcatatgcattttcttgtagatctttggctttgcttgccccttagcaggatggtgcattttagtatgcagtcctcagatggatagcggtgtctccagcttttgaataaaactagaaaaattaaattccgttttcagtttggctggatgccttctccagtgtttgtatctgagctttcacgagaatgcggcggccccttgcagaccaactctgagcattttcttgccactcactcctttgctgttggtttgcttatttttctgtggcttggaattttaaactttctttggacatacctaatattcatcttttattgttgttcatgttttctattattatgctatgtatctgtaaaggtaggtgacaaatttaaacaaaaagtgaaaagaagaaagaagtctgctttcagattaaataaaaaaaatttagggtctttcctgatccctttttgctttaatattcatggataaatatcggaaaagtaattggctattgtatatctaataattgagataaaactattttccatttattcatagagaagtgattaattataaagatattacacatagaagtagtacatggatagagatgtatgtttgctagtattattccaaagaaaatattatgtttggcaaaattttatgtatctgtttcgggacatgatcaagaattttaattttccctaaaacaaaattagatattttgctttcattttagttatagaaattaatggtttaagattttccagaacaaaaacaatggaggcatgtctttctcctaaaatacattgaattactactcaaaatatttaatgtgtaatttctaatggcaaaattataggcttgtttcctagaagaaaaagaaggtagtcatgctgtattttttaattgtttgtgatatatataatattaatttatgtagttaaaattttaaatatgggtcaatgtaaatttgtttgcatttctaatttttagtctaggttttgtatttttgtagtttattctgaaggatttctttaaaggtttttggcatataataatacattttgtttgtgtcttctctgtggcaattgttacagaacgataaaagctgtcactttgccagactcaaataaaaattcactttttagcatcttctgttatttaaacctttgaatcaacatagaatttttgctatagtcaccaggttaagattatctgaaaattttaaaatggatattttttgctatagcactttcttataagtaaaatcttcgtttgcttaaaagcagggagtcttttaaagtaataaattagcatttctagacctaaggtcactagtagtgccacttctttctgcagcatctccaagaaagagaagggtgatgctataactcagttgctatagaagtaatattttctgtttaatcacagttaagtgtcatgaccttttgaccttacattaaacttgcagaaatgtggttaaatttcaggcagctaattcaaaacctgtgaagtcaagttgaagttaggatgcaagctctccgcagatacagaggttttgttgaaaaaaaatttttgtgtttgcttttgaacaatgttgtaaacgacttcaagtctcagaaaacgctttatttttaaatcaaaatttttccccttgaaacattttgcctgttttttctctcctctccccaaaaactgtaccataaatatgcttgtttctaattttgtgaaattcttttgatctaagttaattttatctaatttaaaaattaagttactttgattttcccttatttcatttagaaattaagttaatcaaattccttttttagtttgaaaatatgattatattttttaaattaaaaaatgtttaattctatagaggtgtacaaaaatctgtttttgcaaacaagtccttttaggatctcccaaatgcatcagtacaagaaaaaaataattcttataaagcaggggaaacttgtaccttcagaaagacttctttgagttatgcagttatttcaagaaaatgtgatggaatattaggactctagtatttaatggtgttagtctgcgtagtctgttgctggaatgcagagctaaatatcaacagaacttgttactgttgtttgggttgcttttatataccagcttcaaaatatgttttgacactttattatgttctgaatcaagcttcagatgtgtgtaatgaaggatgaagtctttatcagactcgagtgtataaatagtggagaagagcagtttggaaatggtctctctaagagaatggttgctgaagagcttcaagttgtgatctggcaaaagccaatgccaccgtaggtgtccgcaaaccggagcgtcctctctaaaggcacaggctgctgctgcatttccctctctttcttttctctttccatcttttctttttttcatgtctcatgtcatttctgtaatgttccctttcttagtttataggttgaaccttttgagaaagtctggcacctctgatgcactttcccttgcagaccctataatttttggctgtatttttatgtttttcagattcaagtcaatctgaaagtcccagccagccaagtgacgctgacattaaggaccagccagaaaatggtaagtttagcttgggactctagctgctgctttcagagtccacagcagccagcaggccgactaagtgtgaggatttgggggcctaccctataagtagcccacagtaggaacaactccaaagactcggaaaaactcaagtagattacttttaatagggcagcttcttgttctcgggatcaccccagcagcctcaggacccccggccctaaacactattagggtgcccatgagaacctgaattcccaagaacgttgattacccaattaaactatgagaagtggggttaatttaccaaatcagatttttttttaatagcattaagtgaggagtcatggctttttcatttcattttagttctttaatgtggcaaatgccccatgatcatcttcactagtgatttaagatcattcattcacaagcagttttaagccttttgggagctcaacactttgccaattcctttaagaaaaaaaaaaatatctatgctttgaaggatttttctaccttaaattgtctaaaataaaatagtgaggatacagggcagcattaaattccactgctgcataaatatctaaattttctgttgcagatgctttattaaaatagaacatacattatatatgaatatcatagtatctggtaaaatttgaattcgtggcaggcactacaagtatgaaaaatactgtcatgggttggagttttatattgaataaaactatcggtttcaataaaaacagagacttcagtgaactagcagtgcctatcatataacaaacattgtgttacatactttcacagatatcatctcataaaattccaaaatgttcttctttgctgatagcactgaggactctggtggaatgctttaccttgaagggcctgtggggagaatatgccattgtgattaaaagctcaggctgtgggctgggcgtggtggctttcacctgtaatcccagcactttgggaggctgaggctggcagatcacgaggtcaggagttcaagaccagcctggccaacatggtgaaatcatgtctttactaaaaatagaaaaattattcggtcgtagtggcatgtgcctgctgtaatcccagctacttgggaggcttaggcaggagaattgcttgaacctgggaggcagaggttgcagtgagctgagattgcgccactgcactctagctctgggcaacagagcagaacatctcaggggaggcggggcggcggaagctcaggctgtgacctgcattcaaattctgcctctcctatttcttacctgtgtgatactgaataggttatttaacctctcagagtattgatttattcctctaaaacagggtaataatattacctgtttgttgaagagttaaataagataatatgtgtaatgtgtttaccatagtatctttcatagagtttatgctttaaaaatgtcagctgtggttcattatgacttttattatttttcttgtcaatataattctgtcatactttgtttttcacccactttgaatgaccccattgcttgagtctcttccttttgttgttctgtacattgttccatgttgatctccatccaatcttttggaaaagataggcaaacggaattatgttggtattgtggggtgaaggatcaagtttaccacattagctatcctatcactgatttttcagaatatgtttcatttcctacccatgagaaatttgattacattgctggattctagcattaaatatggactgcctggcaattcctctcctcatcctggtattttggtgatattttctttatcaaagttgtctttttaaagcaggcagttaaaaaaaaaaaaagagagaactctggaggtttgtttttagtgtcatatacagctacatcttattttttgttgacattttaaagagtggtatttatagactagtttcgttctttattttccacttgacttgtaggtgatgtcttcaaagtttcacttttttctacatattgtatttgtgcataatctccctaaagatgtctccagaggtataattttattttcatcttcaaaaatgtgtggactgtacgggtgtgtagttcgcgtatttaggtctggccgcccctctagcaggcctgtgattcatctgtcttcataaaatggccaacaagctgttcacatgcaaatataaattgagagcatgagaggcctggcatgcctttctggagctgcctgcaatcccaatattgtgtgtttcccattccagaaagcaaccaggattgagcctggattttttggccaaaggcagagagatactagccaagttcacttttaacctcagatcacttgatgctactacctcaaggatttacactatcattttggggaaatcatgtgagttcaaagaaagaaagtattaatatctaggagataaagtaataaattcctatctttcagttttctatttgtttcaaagaaaaagtagtagaagctggcttatcttagccccagttgaagaattatcagcctactcagttttctgcctcttgtcaatctcagatgaagttagtggaggaaaaatgatttttctcttttccttaaagacacgtaatcccaaaaggaataaatgaagattcagggctgggtatttacatgcattagataaggttctactctctggtgttgcgttgatcaagagaatgtttcctctttttcattacctcaggatatgaagatgaagtgtgtgtttcgtttttgttttgaaagagggaactctcataggtgtatcaacaaagctctaagaaattttggaatcttgctgattgaagaagtaacagacttgattcttcaaataaaatgggaattcattacttcacatatatgtatgtgtgtgtatatatatatatgtatgtttgtatgtatgcgaaaaaataatattctttttatcctagctcttgagaaaggtaatgggaaacgaatggtatttccctagtaaaccatggagaatgaatagacaaatggtaacacgctgtttcatcccaaaccgtaaactgggccatgtaactttacataaagtggatgcagctgtttcttccctgtccaactagtctgctttttctgtggaatttttgctttcttttcttgtactcccttaagactcaactgtaaaagaaaacaaatctttgtccaattagagcattagatgggaattttgaaggaattatctgaagcccagcgataaaatatcagaagctctgaaactcaaaattggtataatataatgggtaaaaactctgcctctggagtcaaaaagacctgagttcaaattaaataatagctgagtgactgagtaaggtacaccccaatctcagttttcttaccagtaaaacagaaatactaaaaggaggccaggtgcagtggctcacgcctataatcccagcactttgggaggctgaggtgagtcgatcacttgaggtcaggagttcgaaaccagcctggccaacatggtgcccgtctctactaaaaatacaaaaattagccaggcatagtggcacatgcctgtaataccactactcgggaggctgaggcagcagactatcttgaatccgggcagcagatgttgtagtgagccaagatggcaccacttcatccagcctgggtgacagagcaagactccatctcaaaaaaaaaaaagaaaagaaaagaaataaaatactaaaaggacgtatctcatgagtggtaaactgagaatatgcatacaaaatagcattctgcctggttcacagtaaggactcaaaggaaggttaccattactaccttccagttaaagcttgtcgtatttacaacgagtacgtatattcaagaggtccaaagctgggagccttggagtggaaggggatggcgtcagaaatataccaagacttttagagacatctttagtgggtacttaccctgctctgaaatgtcagacatgggtttcccaaatccccacaatccccatggtgccacgtctgttttcccattttgttttatcctcacaatctgttcatctcccatgagtttgagaaccagggaattgcaaaaaggattcagagttgctggaaccttcagaatgagtgctcaagaaggtgattctggaaagaagagacttctcctagatgtctttaattttagctgagtttttccttggcacaaaccaaatagaatctggcttattaaaaactataagctgattaagggtaggatttatgacaaattccttttaaaaaaaatcctgcacagcccgtagatctgtgccttgaacttaatgggtacctagtacttatttgcttaatgaataaaattaataagtagatgaatatattgtcattactcccaaatatttttggagtatctgttcactcttgatttacctagagattttaagaaaaacaaacaaacaaaaaaaacaaaaacgctctggagaagctgaaaacctaatttgggtgtgggggaaggctgtcctcagacacatggacagagattaacagatataactagtaggtctaggaagccaaagctgagggctaggtactaatgggaataggacatcaagttgtccctctccccttcctgcccgcccccacccccacttcaatgagcaggtgtggtcagatgtttgaaacatcaccatttcagtttatgcatgatgcttgattaccgtagggaatgcagttcagacaaagttcctagctctgattggtatcatttaatcctttgttatatcactgaatctggcttttccagagctcctgaaggttttaagccttatttgttggactttgacttagaacatcgatttaaacaacttttgtgaactcccatgacatactttggttactttaaacatatttatgggacagagcatttaaaatgcctgcctgatatttacagggcctgtgaacagtcctccaaagcttgcattctgtggtgtatcaggtcagtcattaatgaggataaagctcatgtgatagccttcttacttaattcaaggcacacttctgtagggctgcactgagtcagtgtctgaggcaacagtataggccagcgttggcactctgaaaacacacccccactggctctcactgttatccgtgaaagcatccttaactaaaaaaagaaaatgtggggctcccttgccagaaagtaatgctatcttcacctggttatttttcccttctatttgccatttctcatcacctgcacagactgctagtaataactttatcatagtggtttttaaaatgtgatatttataacaagaaatcagaattggtatttagatgatttcctttaggtttaatcatgtttgttcctcctcatttatctggtagttgcacatatgttggtggcatcaaccctcagatgggtctttgcaatcagtggaagcccattaatcatgatgcttgccccagattttgaaaatttccagctctacctgccaatttgaaaattaccctgtggagtattggttgaatctacctttcatgttcaccatcttcatttatgtcgttcacatcctgaattgttaaaagaggtatcattgttaaatgttgctaggtgaacaaggaatgtacttcttttcatccgtaattgttgctatttcatgcattattatttaactcattgaatttttaatgtttacgaaataagttttagtgcaactgacttcctgacttaagatttatgtgtagggctggacacagtggctcacgcctgtaatcctagcactttgggaggccaaggcgggtggatcacttgaggtcaggagttcaagaccagcctggccaacatggtaaaacccggtctctactaaaaataccaaaaaaaaaaaaaaattaaccgggcgtgatggcagatgcttgtaatcctagccacttgggaggctgaggcaggagaatcgtatgaacccagaaggcagaggttgcagtgagctgagatcacaccactgcactccatcctgggtgacagaacgagactctgtctcaaaaaaaaaaaaaaaaaaaaaagaaagaaaaaaaaaagatttatgtgtaggatttactttgtaatttggggctgagaagagaaacctataaatttctttttctcttttttgatgaacatttttttatctgacattattctctttaaaaattgtgggccttcttgtttaatgttttaaattgtttttactacctcctcacatgtatagtagatatattacaatattatattgcaatatttatatatagtgggaaggcaaaataaaattgataattcaaaactgcaaaaatggtcactgctggatggactgcttgttttaggaactgttttgatgaatgtgtcatttagttgggtgatttaaaaaaatttggaggcaatgcaaccttacagtttatgttttactgggaaagaaggagcattctagcaccattgacttgtaaatgcagtttatcaatatttcataatttgcatgactttcttttacaattacctagcaacagttcttctctgcagtgttccttcaaaaaaccccgcagggacagacacagtagagtgaccaccaaaatagcagcaataacagttatgatcaatattctaaaatatgtaaaggtcccaactcagggagacattaaaacctaaatgccttctggtttccagatctgtataattaaattctgactgatgaattttcagcaatgcaatggagctagtctctcttctttaagagattagggaactagaatttggtttcatctgaaatttcattctgaaactaggtgaattttgctttcttaagaattgttagcaggtgtgacccatcattgtttgcaaaggctcctcagaaatgcctccagacaaaggaaattcctgagtctttctctgtgaaagatgaggtgccatcctaggctgggggcttccccaagtgcatgacgcagtggaggctgcagagcttaagccacgggatccagtgtacttaaggcgccttttcaactgaaaaatggggggtgtggggggagatttgtagccattttaaagtagtcttatcctcacacattatgagtattttattgtcttcacacagagaataactagctgaacagactttaggttagttggctagtagccaaaataggaaatgttttagatcctattcccctgattttcaggttctaaaatggactgactgggtggtctgtttcagacatcttcccctccccactccccccacctccaacccttcacacacaaagagttacacaggaaagaagaaaaaaagggatttcttgctggtcctcaaattcgtttgtgcctctgactcttatcccaggagagacccagaagtgcctattgaatgtaacgttccaagtaggaaagcattttaaagtgtgtatttagaatgtatctggaattgcgtaaatatatacatagatctagattctaaaaatatgaaaatatgaagcaatacaatttatgcagtatttgaattgggctcaaaaaggaaatcaaatgaggagccgtcatcaaatcacagtgcggtagaaggtgcacctggtgtttggctacagctccatctgccattgctctgttttccctgtgatctaagcctggaactagtatgacaggaccctttgacagagatatccttagaaggaccacttctaatggccacttttcatacctccccatcaattaaaaaccagcgtggtgaaagatcagaggggcgagctggggtcaggaattgggtatgagctttccttgccacaaataatagggtcacttctgcttttaaatttgaatgtgaatttgttgtttttaagcctgtacattattttttggaaggaattacctatttgtggataatattagtaaactgaatgtaatatacataatgtatttggggatttggagtcactaatccagattgattagttgcctgctagaaaaattcatgtggccacaaggatttttggcaccttttctccctgcagcttcctcattctttttctcttcttcaggttttactcagctccaggcaactcttttccccctggcattagcttgtcgttaaggaaatctagtgggatatctcaaataggggtggagggtagggggcactatttgctgcagattactctgccccatctcagttgtgcatttctatacttggctgattttaacccaaagggaaccagggagtctcatatggcttatccacaggcatcatatggtgaatatccaaaaagagaaatgtaaggatattgtggcaaggctcggcaaaataggaatagcttttcaacaatctttccacgaaggaaagtcagtgttttcttagatctctgtaggtattttacaaccagagagcttctcagcaagtagcacttgtaaactcagagatgaacaagaagaagccaaatcacagcttccgaataggtcaaattagcaaaagagacttgccattaaaagcctgacactgagcgtctgttaagggaaaatcagttgtccaagtcacttaaagacttgtacctcaattttctcataagtaatttaacagatcattcttaagaattgctggataggccgggcaggatggctcacgcctgtaatcccagcactttgggaggccaaggcaggcggatcacgaggtcaggggattgagaccatcctggctaacactgtgaaaccctttctctacttaaaaaaaaaaaaaattagccgggtgtggttgcaggcgcctgtagtcccagctactcaggaggctgaggcaggagaatggcatgaacctgggaggcagagcttgcagtgagcagagattgcgccactgcactccagcctgggtgaccgagcgagactctgtctcaaaaaaaaaaaaaaaaatagaattgctggatatatttggactaggtattggatgtgttaagggaatacagagatagagcagacatcctgctcttgagaacctgatagtctagtaaaagggaaaagacaccatttgttcgttcattcattcaacaggtatttatcaaatacactctaagaaccaggcatgttctaggcatcacactgagcaaaacagaaaatcctactcttaatttagcttaccttcttggggaaggagacagacaatcagctgattaatacacatgtcacatgccaagtggcatcaaacattataaaagaaaataaggcaatataagggattaaagaagggaggatgtgggtactgtcttataaagggtggtaaaggaaggcctttctgatgtgttgacatttgagttaagtcctaatgaagtcaaagaagtgaattatgcagatattagggacttttattctaagaagagggaacattaaatataacagccctgagacatgctggaagaacactaagggggttggtgtggcttgaagggtacaaacaagggagagaatagttgcagatgagtagcaggaaggcaaatcatattggatcttgtaagccaaggaaaagatatggcacatccttgaaaagccatggtatactctggaagaatgcacatatgagtccattcatttcttggtacagtagatatgtcctgatcccctacactgtgatagtcactgttctagataatgagtgttcagtgggaagcaaagtagacagagtttagtgtggagttgtacacaaagacctcattcatagcattgttaaggaatgagactctgatttgtcatggcagtatcttttagtacctccaaaggttttccctcgtgcatattactaaaagccaagttacttgcatggaataatatttggtttcacatacccaattgtgtaaacaattatttctcaaaatggaggtcgaaatctgtggagtttcagcttacccctgctctcgtgaccccattagattataacccccaggtctcacatacattcaccatgaaggtggattttgttcctaaatagttgccagatgtagcacaatggtggctcacacctgtaatcccagcactttgggaggccaaggcaggtagatcacttgtggccaggagtttgagaccagcctgggcaacatggcaaaacccgtgacagagcaagactgtccccaacccccccccaaaaaaacaagatgccaagttaaatttgagtttcagataaacagtgaataattttttagtactgcgtgaaatatacttacacaaacaaagtattcattgtttgtctagaccaagttttgtattttatctggcaaccagttgtaattctccacatattcctgtggaggttacataggcaatagtaacagcagtgtatgaaaaggtttgattagtctgtgatgatttcactgatcacaaaaggtcaaaccactggaatttaacccactgaaaatgaaatctgggaagagtactacaaagttctagtgacttggctgcttaaattccattccttccgcatctgctggtacctagcccagtagttttcttggaacaataaaccacttgtgaggcacagtcaataggtacaatataatagttgagagccactcagcccatgcaagtgagtgtataagtttaattagtcgtgtattaattgagtaagccactgcgacactgtgtgagcccatacatccagttactggcagaccatttactcacgaaagatgatgaaaataggaaatcagtcaaataatagagcatttggaattcgcacatccaaaggtgaagtagagaaatggcatttctgataaacttgaaaatagaaggggccatatttttcatgtgcaatatggaatgataaatgtatatgttttcatctgtaattgggacaactttgctaggtatgacaaatcttgtttgaacatgttaaagaaatatagtgtaacctttgaatcctcctgctttaaaaaagaatagtgttcacagattcaaggaaaacaattttggaaatagggttaaactctattaggcttaaagccagataataacaaaaataatgatttttggtgataataatcataatagtagctcacaatcattgtggactttctgtgtgccagtatgttagtttgggtcctccaagaataatatgtcctgataggacaagagatttattggggcaatacctatcaaatataaagggggacagagcaagagtagattgagagaacttttaggctgcagtacagttctgacaggtgggaaaggaggagggaagaatgagagattgggttggaagaatcccagagctctcactcccattgcctaggctggagtgcagtggtatgatcatggctcactgcagcctcaacctcccaggctcaggtgatgctcccacctcagcctaccaaatagctgagactataggcacacgccaccaagcccagctaatttactgtatttttagtagagacgagggtctcactatgttgtccaggctgggttcaaactcctgggctcaagagatccacctgcctcaacctctcaaagtgctggggtcacaggtgtgagccactgcgcctggagtaagcttctaagaaaattttgaccatgccaatggagagtccctgagcttaagtcccctgttggaagaattctgtgttttataggaatgggtctgtgttggtatcctccccctcagttattggctggaaacagcctggaggaagtgtggcctttaagcaaatgtggtggtggattcagaggagcagccctgttaggcaaccatgttccttgcaacaggtggtcagggtggaccatttttattcatggccaccagagccatgcactgtgctgagttctatattcatgatcttatatcatcttaatataatcctatggaggtaggtgctattagtgtgcccattttacagattaggaaactgagacacaaagaatttaagtagcttgtcctacagtcaagaaggcataaagggtattcagactcaactctaagtccagagtcttaactgcttaaccatggcattctattagagaaagaatggaattcaaactctggttctataatgtattgattgtataaatttgaacaagttatttaaactcttaaacttttattttctaatgtataaggtgcgatgtcatcaccttcccaggaaatgtgttttcgttgctgttttgttctgagcacaaacaacgttagttccttttccttcctcttgttttgctctcatctaggattgtcatctcttcctttatttcttatctcatcttcccaggtatctgcctcagccttgttcaggcacccacaggcttaactacatcctcagaactaacaggactgtttctgtgtggattatatgtctggatgtagatatgtggaaagtgctgagcacttgcaacaatccataaatagatactcaataaaatgtagctcgccttctctctcatccacctcattgcctcatagacatgaactaggtgccagggacatcttctttttaagtttcttttttttttttttttgacaaaatatacatctttatagaaaaattacattcttatttttttatgaacactttgttctttttttctacagtctcaagtattatgagtatatggtactttaatagatatttttaaacaatggactgagttttcatttgatttttctgctggaggtggagactataaaatgaggttagttgcaaggtatttataccagatgccattatgtttgttagatggcataaaacaattatgattgccaataaatttaaaagtgtttccgttgcaaaagatgtaggagtatagttttactgaaaacataaaatgtttcttttcattccccattttttgtgcagtacaatagaaatttgtgccccattcctttcattttagatttctgaattatttaaaagaattggttaattctccatttcaagtgagcaagacaaagttcattaggatatctgattcctagcaggtcccacattcacagatcatgttaactccatagagaggtttatcttcttttaaaattacaaatgctacccacactgaaagcttttcagtttaatgcattgttacagctttgaactcttcagtaggatcctaaacaatagaaagaaggaaaatgaagcaccttgttgtccgagcttgagccagttctaaaagtagcagtgcagaacgtctatgtcctttcaattctagtggatttgcaacacaatatcatgaaaggcatgcaagtaaaccttagcacgtgctccaccagtagttaccaactggtggtccttgaagggagccagaggaaaaatcttaaattatgcattttttccccttatataaagctgcactggctgaagatttttgcttttgactttatgcttgtgaactcatgggttctcttatacttacagagactctggcagttatagtttggattcatttaatgaaaggtaggggagtgatgaattatctattatttagcaaagatggtaaattaaatactttgagaagctggccttatgagaggaaatgattacaagttgtccttaatggtaagaagatacagaagcctgtgctgtagaccactggttaatagcctttaactttatcttaggaaagacgaagaaagaagagaaaagcaggtgctaggaatagccagtcaagactggttgttgcaggtgctgcccgtcatctccattgtacccctttccggtgttctttcagcagatattgttgaattcagttctatctgagcagaattgatagtgaggccgatgtggaaagcaactcagagtaggagactcaggtggtacttctgtatgtaaattgactaggaaagcgtaactttgaaacaaaagattctaacaaagtttcatagcccaatcacatgtaagtgtgtagaacatttgagttttggactctgatctctgtggatttttttctgtgcattcataagagaggcacaaaaattgactgtggtcaaataatactatgtactgtaaactttagattgtttgaatatgttaatttgatgtaataattctaagatatagaggacaaggaaactgaggctcggaagttgaggcacatgttcatgatcaatagcaagtgagtgcctgcttcatctttcttgggagagctttgagaataaacagggataacggatagtggtgtgctttgaaatgttttgtactcagcagctataatctcaaataatttgtattgttaggttttcaatgtattgactattctgtccccttaccccagggaaagtatagacttgaggtcagggaataacaatggcatatgacatgtaagtatggtgacataatgtcatatgatatactacataatatatgtattatagtgttacatgcattatgtattacattattgagtaaatatgtattatattacaatgtgtaatctgtagtccttataatctattaggactttgactgaacaccagtcaatgaaaatagtaaatgtcacagtatactgaaagcgaagccagtgagagagagtctgcagaattccacattttcctcaggatacctcgcagaccatgggtgacacatgaccacctgacattggtaccaagtgagggagaatgcattattagaaataaacttatcgtttttcaaagacgacttatttttaaaagctacagtataaatggaagctccagtgatttctttggacaccgcaaatttgtgttttaaggagaccactattctagactatgtgctccctgagggcagaaagtagtgtattatattccaaacaaaatggcactcagtaaatattttagggtgaatgaatgaatgcgtaaatgaatgaatcttgtgttcaggagtttaagtcttttcaggggaaaataatacataatcataagttattcccctccttccaattgatctttcttaattgtacatatatttattaatatataatccctgtgccaggcagtgggcatatccacataaaagagaaaccaaccccatactccttgagtacatattctagcaaaggatacagatatttaggcagatagttgcataaaatgtgattgtgatctcctaaagttatttggatggtgtttggggcatatggtggaggcacaagtgataaaggctatgcaagaagcaacaaaagtaaagttagaagtgttcagagaagagcttgttaggtatttgacctaaatgctgaagtgtatacatgttcctagatgttacttagagctttcttgctccttaaaattagctcaaaccccccattccacaacctgaggaaatctaaagcctatcccagtatttctgtgcatttctggggatgcttacagcaaaagttttcttctagctgtcagttcctgcacctgctgagttagtttactttatagatcttcccccaagtcgtgcaatgctcttttccatgtcctgtgcccgtatgttgggttgagcaccttctctgtatttctgtctgatctacctgtagaaattatgtgtacagctggctttggtgaagttgtaggagggcgagtttgggcacttcagtaaagtctcagaacatactaaccgcatcacattgattttaaacaactctgtttttaagagcacttaggtcactctgccatgttaccattgccctctcttcctccctccctctcttctctgagcctctccttgttcttctttagttttccttgagccttgcaaatttatgttcttgggaatctcctttgtaaataagaaatgtgccatcaagatatttcccaatcaatggattctggcactcttgacaaaatgatagatggaatttgcagtttctgtgtgtatgagagggaagatgcaaagtccttgttaaacaaaaggaacattatgggtaaaggcctaggggcagaaaggacccagcatgtaaagctgcagcttggctaagacatagtgtttctgaacagtttcaaatacgccagtcatatcatgttgaattcttggatggccagtcacccagcgtgtttcccttggaatgaagcttgctgactgactggctgacagctagaaagcatccataaatgagagatggagatgaaattaaaatgtgacttctttggcatccacctttcgaacctaggccttccccactttactctaattcaatttagtagatgttggatggaaactaatacagttaaaaagaacttcatgtaatctcactaacattcttagaacatgatgctcaaggttttctggtcaaggatatttgcatttgcatttatagaatagttaagagccagaattctatgcatgtgagaagtccttgctttgagaatgacatttccaagctgtcaaaatctaatgtgctcaaagctcaaaccaaaattgctttttattctgtaaatattgaagagaaggcttagagtggcaccagtgaagttgctagccagggtactagcctactgagttggaatcagaaaaagtccatttgttgagtttaaattataatacaatccaagcctgagggatgcagtgaaaaagtatgaccagtggtcagattcccacattttcctgctgaccacttggtcactttgacacagtttactagagaagtttgatttgcaggtgtgtaagcacagtacatgcatctttgttacttgactcttctcatctccaatttcttaatgcttacattgaactacaaaaatcttcacatgaaatcttcccatattatattcactcattcaaccaatatttatttattaaacatctgctgtatggcagatactgctccaggcattagtcacaagagtgatgaagcacagaaaagtaaagtttcatgcatccaatagcagattcattgtagaactgagagccttgatgttcggttccttgtccagctttctttctcctacatttctactctgcttttcttacacttgctgtttcaccaaaaaaaaagttacttgaaaggcgattgaaatcattcttttcatttgccaataagttgtaaaggttattggaaagtcatttgtgtaggattttgaatcagtttaacacagttttcatattacatttatgtgtgtgattttctgaataatgcctttaaaggcagacattaagtggattgcgaactccatgaaagcaaggattgtttttcttttttactcactgttttctctttagcacagtgcctatcccatagtacatgttcaataaatatttactataaatgcagaactaaatgcatttcttatgcttcgctatatccctgttgtctggtgcagtgtgtgcagtgtgagctctctctgagtctgtcgctggtaagatggtgaacagtgctgtccgtattcagtggacttctgtatagagcatgtcattcccagtctatctcgatattcagtactcgatattcagtacttaagtgtccagtcaagcagcttgtagttttccttgctatgttggggtgggtactctggtacctggaggccccctggctgcagacacagcaagatggtttcgagcagggtgtgaaatgtttgctgccagtgagggagaaaggtttgccttggctaggagtagcaggatttcaggctccacatctgggtcttccgtctacgtcaccaccaccatcctcatatgcgcatagccatcagctgtcctaagtgcagcactctgacagaaaattgtatacgaggcagaggtggctgtaactagtcaaagtgtgagagaaatactcattccatggcaaagctgactgacacgaagagatctttgtgctgagagagattcagcaaagggaggccagagtaaactaggagtgggctccgggttagagttgaagcaagaacctgtatgaaaagaaaggcaatgtccacctcatatttcctagcagacataaaagacatggtgtctctcttgctcagtctttttcatcatcttactgggttcagaacatgggtaaagttcgaagtggtacattggataattctttcgggcagaactttgttgaaaggaagagtgtggtcgtctaattggagcttggcaagtgcaagggtgggagagaaagggagaccctaccttgactccaccgctcacctggctgtgaaacgctttaagaacagaaacacttactaattgtaactggccttaggaaggtacctgacctcccgtgcctcagtttcctcgtctgtaaaatagtcacgaatgcttcttgcccttctttgctcccaaggatttagtaaggatttaatgatatgatgtatctgaaagcactttatgaacaatcaagccatatgtaaaatgagctattgtaataattttgagtcattaggaattccttcatttccatcccaggtcccctggacaatgctgagaaaccagtggctatattgcatattttcttttcagcccagcagtactcattttcaggttgaatatggtaacaaagctgttgcataagaaatgcacactcctctcttagggggaacattctttacattcagcacaccagtgcacccccatgactgcagagtactgcagggtactgaaaggtgtctttctgtgtttaccgtggtatcactttcaccctctattctgaactgatctggcattctaagattttcaaacataatctttaaaagtataagcatccaaaattacctcaaagagccaaaacaaataaatacaacactgaataaatgatgctccagttgatccagaatacacttaagaaatcttttgactctgttaacctatcagtatttgacttcagattgactcgtttatttattcttaaactcccttgaatctccaggcttttttcttatttgcattgagtatgttctccccattgacattcagatcactttgaattggcttttacttaggcttttcttttttggagacaatcagctcagagacaaaataggcttaaaccacaaagatgttttagtaaatagatacatttcattagttgctgagggctgtaggaacacagttgtcccaagtaatttcttctttgtatttggtgatcttaagaggaaatattagtgtcctttttcttaagccactggtctaaaatatctgtcaagcataagatttaaatccctgacaaacaacttctaagattttagaaaaagttttgagtaccttgtgattccaactcttatctctgcttttgagcctcgatttctaccccctcgtcatagtccttacccacctgtaactttaagacatcaaagttcattttaaaaaagaaaaaaataataagtttcatagaaagaaaacctctcatatatattgggagggctaagacaaatatgtttctcttttcatgcatttttctggttgaactgaattctttcacctcctcttagaaaagtcttcgactgtgccagctagaagtacggcagaatgggtaaagtccagccttgctaagacaatttttttggtctgtggtacctacagaggaggttcttacttataatgtgaagtacatggcataaactggtggagaagagcttccttttgttaaatcgttcatttattccactggcctaatgaaagttatatgaaccacaatgagtcacaacaattaccagtttaattcattttttaccctgtatttatttaaaaggtttgctctataaatataggacctgtagataaaaggtttctctaaaaatcactctcttttcaagatgttttcattagttagtattcatttaagtgggttctactctgcataccattaaaggtgtgtgtaaatgtttttattggtttcttccctatcttccacttttgtatttcctctataagaggcagtgccattaaccttagcagggctgagtgtgattgtctttcgatcagccccatcattgcaaaccactgacccatagcttacattacttaaaccactggttcctaaacagaaaaatagccccattaccttccttggaatggtgatgggctgtctgaaaagtcctttcaaaaagaagagtgagcaaaaatactccctacttcctttgagaatagtcctttctttgatataaatgttgcggtagtagtacctgagtttcctattttaactctacatgaaacatttattgagtgtctgctgtgttcagggtgctgttgaagacacatggctatagcaacatgttttggatgcagtcctttaagagccatacttttttatgcaggtgataggcaggtttgcacctaataacaatgcagggtaaatatgctaagtgctctaactgtgaaacaaagtgctctgagaatgtggaaaagagaatgctttaattcagactttagggacaggaagcggaaagttagatttcaaccagcagagaagggtaaggaggatagagaaagaggttccaaaaaaataaaaaagcacccccaaaggcatagtgtggtctgaaagtttatgatgagcttggataatcgccaagtagtgtggtatggcctttgcaaggtaatgaggggatggaggtaaggcattcatgcttttgtataactgatacggtttggctctgtgtccccacccaaatctcatctcgaattgtaatccccacatgtcgagggaggagggagctgtaattcccatgtgtcaagggagggaagtgattggattatgggggcagtttcccccacgttgttcccataatagtgagtgaattctcaagagatctgatggttttataaatggtattttcctgtgctcacacacgctctctcttgcctgccaccgtgtaagatgtgtctgcttccccttcaaccaggattgtaagtttcctgaggcctccccagccatgcagaactgtgagtcaagtatacctctttttttaaaaaaataaataaaataagttacccagttcttggtggtattctctatagcagtgtgaaaatggactaacgtactacccttttagataatccttgcagcataagacaaagaaacgatcagttcacctttggccatggactcactgtcaccagagcttgctttaacccaattctgtagttcagccagtcagaatgttggtagaaaatgcattaaatcaggaacccagaaaacaggcttctattcctggctcagctattcattgactatgattttggataaataactgtttctctctgagccttggtttacttccgtaaattggagataataatactacctacctcatggctgttgagagtcttaaatgagaccatgcctacaaggtgtttagcagggtcctcagcatatagccagtactcaaaaagtagaaacaacttaaaaagatttttatacttcattgcccatcttcattaaactggactttattttacttattgataacttacaacacgctgggagaaacgtcccggtgtttcaaagtgactgcgttaacttggaaaataagatcctatttatttccttccgagtaatagtcatcctaacatactgctcacttgtatttgtagagtagttattttgaaatttttgagacctgaacttatgaaatgtactttcatgcatttctaaaataattgtatactagagctcttttccattgcttgacagttgttcatgagtgttccagtgagtttatagaagctaaaaagaagatgatcttctctagttacattctaagtgctgaatttttccttccttgacagattcccatccggtatcaagaggctctaaagatccctcaaatcactgttggcatttagtgccattccagcaattttgcatcttgatctttttattgattagaattttaccttccttttcaatcttttgaactctcttctgaactttgaagactcaagtgtttgaaatcttgatctgggtctgtcttaggctatacagaagagagctttaacttatgtttccaaaatgaggccactacctctttaatttttctttttaatttaatctcaatgtctgtagaagaaaagctttcacttaaagcacaaactttatgaaaagcatttttgttaaagggaaatcttaatgggaagaactgtagataacaaatttgaggaaaatgtctggcaacacagacttctgcaagtttgaggctcttggtgaaatctcaaacagtccaaatggaaaattacccagtctgtttcctcaagatagacttgtttgtacagcgactcaaagtttaaatggctgaacagtaggtacacacgctgtacttataagctgtttgtattacaatgctctgtttttaacctccttttagtttggaacacaagctggttaatgtcttagttctgtgcttcctggattattagtgaatagctaagttgtatttaataaacagaaagaaagtaacaaacaggccaataccttcactgagaaagcttctcatctctgagatttttacttctgtttgttatgcagaatattttaaaattagataatgttttatactcatgagatgaaagagttttcaaatatctgagggtttgtgagtatatccgtatttttgagagtcccagtaaaagtttctggaacttacaaaaaactcatccatgagctggccaggtcctctcaaggagcaaatcaactgaggatgacattaaaaaaaatttttttaacttgtttcaacagttgttttccgcatttccacagtaattaccatgcttaccagtaagatacaattcatctctggatcatattttatgtgttttaggcaatagcagtgatagctaacaattacactctagagttttacaaaacacttgcttatgcgttatctcatgaggtacctgacagatcttctaagtataattttatgatattccagcagatctataccagtttcactagagtatgagtaataagcatattgaatttttaaaaattgacacctgtctgaaatttttaagaacaaggccatttagaaaattagatttcaagaactctaaatacttacttatattatacaaaaatgttacagaaagtaccattaagcatggctatttctatatattcttcgatagcccacagaaatttatttaaaataattctccacaatgactaatccattacaaccaatattgttttagttctttctcatgaaaatagactactaaaattatagtctttctagttacccagtatacatatacacatatatatatgtatgtatgtatatatacacacacataccatatgtaagctggctatatatgtgtatatatatgtatatacacacacacccatatgtaagctcgatatgtatgtatgtgtttatatatgtacctatacacatagaggtacatacacatgtataaacctccatttttataaagattggtggcttataagaatacatacagtaagatagaaaatataaacaagtaaaaaatgagaattaggaaatacataaattaaagtagaaaggtaaaaatcagagaaaaagaattgaacaaaggttctaccatatggttctacatagttaataacattgagatataagtttgattctgagtttcctggcagccaaaggaaaaagagaaacgtatgattaatcatgtggttctcattacccatgagaaaatacataccagttcctcaagggaaggaagctttccctggcacttaattgtgatgtaaatttctcacgtagaacttcagcaggaggacaccgggtgatatgctaacagtcagtgctattcaagtagatagactaaaggatttggtaagatagcttcttttagggcccactaactagaaactgagaacctaatacaaaagtgtaactcaataaaagtgattctgagtgatccatgaaagtaacttgctgccaatccatcaggacttttataagagctggagaaattcacatcatgaaatttataaatcctgagaagcaggtaggtctcatagtccttggatgattttaaatatttctcacagccaaacttttgattaaagctgagccacagacagttcacattggtgttttttaagaactgatattttcttaaggactcgactttacagagtaaacaaacaggattggccttacaaggtaaaaactgaagctcctgaatataggaaaagcaagcatttacccttgtggttattttttaaagtgctttttaaaaattcctctcattatcttcccttgatagatttcctgaagatttatttaacagtataatgtctattgttatttaaagagaaatgaggtttagaatgcagagccttttttaagagagtatgaacatgctgatttagttcacctccaaacagaaatgattgacatcagattcttcctgaaagcagtttctcctgtggaaagaactttgggttcttcaaggggagtgaaatggtaggttctgtctgagccaggtcacctacaaaagcaaacaacaatgctgtttcctaaggtggttgttggcagcacttagccgctgctgacctggtaacctttcctttgagtctcatccatagctctcctctgagagagaactttcccatttacaatattacttggacacactactgttgcttaggaccaaaagggttatttacacaggggagatagtggtaggtgtgaaggtatgtgttgtgacaactgccatttacccatgcagtgggcagagtttctcttttgaccttgttcattcatagcagtgaagtgtgggctaggacctgtaacatctcctagttttaaatgctccggatgggtactctacaaaagtcttggtcatatagaacctatatggaatgcagtcatgttaagaaattgttaagctgttgatcatgatattatactgttaaacataacagtacaaaaagagggttttgttctccaaatagctaattcatagctacagttatttttttagtgtacaacctcagatttatttcatcagagagcaactgggaggtcccaggacagtgactaagtgggaatatgcagcaatgacgagtaaaagcttagtttctaagaatctcagtttttgtggaaatcccctttagactaatgatacaagagaaaacatgtggtgtgtgttgggtagatcattccccaacaggatgttttattttttgtgtttagtcttcgtccatagtaacaattataatgaatgcatcaaaaataaagcctgcagaccttgtgacctatcttgtaatcagcacaaattagttttagggcaggaaaatccagctgcatattagttttattagatgttcccaaacattttattgcaatattttggaaaaaacatccacaaacaaacctaagttttcaatgtgtttcctattcaatatgtattttgttttgaaggataattagattgtatgtttataattcctttgttcttaattcatcaaattgctgccttttgggaaaataatttcagcataggaaaattactctttttttcaccaacctgttctcagaaagggaaatgtatctttagtacacccccaactcccaaaaatgttctccacattctaaaaatgcttttaaaagttcaaaccattattcctcatttggttctaatgatattgaaatggttttttcctattttgagggtcacaattgctactgttaatctaatggctaaatgatctgtgcactgtgtctgcttttcatcttcattctctttttattggtgaggaaactgaggctcaaagcgattaagtaccttgcacaggtcaaatggcttctaagaggcagaatgtaatcattccttctctcaacattcaggaaatatttaatgagcccatactttattccagataccttggtagttgcacaggatacatcactgaataataaaatccctgcccctcaaggagcttaccttctagttgatggagacagataattaaaatatcaatgagaaaagtatctagtgcatgagatgataataagtgctatggagaaaaattaagaaagaaagaggaatagggagtccagagtagttttggtttgaaaggcaatgatggccacaaacacattgctaagaagttgacatttgaacaagacctagaaaaggtgagggagtgcgacacacagatttccttggggaagactagtgtggatggaatgaagacagcaaggtgagcaggagaaaaggaactcaggtaaaagcctggggcagttcatgcaggacagtggctctttgacttcagcagcataagaatcacttggaagtcttattaaaacacagatctctgggcactacccttacagtttctgattcagaagtttgcattcctaacaagggtccaagtgatgccagtgccactggtccagggatcacacttgagatccactgaagctattgggaggctttggcttttcctcttaataacatgaatgccatttccaggaactgagaataggagaaacaaaatctctttatgctgttccgagtacactgtaggagacaagggcagaagaagggaaaccaactagggttctactatagtaatcaaaataagagatcagggtgacattggccgggcgcggtggctcacgcctgtaaacccagcactttaggaggccaaggtgggccagatcacttgaggccggaagttcgagaccagcctggccaacatgatgaaaccccgtgtctactgaaaatagaaaaattagctgggcatggtggcacgtgcctgtaatcccagctactcaggaggctgaggtgagagaattgcttaaacctgagaggtggaggttgcagtgagccaagatcacgccactgcactccagcctgggcaacagagcgagactccatctaaaaaagaaaaagagagagagagagagatcagggtgacatcattgagctatgctctctctccattctgagtttatttgaggttgtcctctaaagcaaaagcatactaagcattagttatgtcaacctaaaattcctttggttaaatcttcagtttaattagtgtatgaattccttttcaaagagctgcttgcccacaactttgagaaacgggtggaaaatatggggagtttatagttgggatacgtttcaaatatggctgacaaggatctgcctaggaacatggaactcatagaatatcctcaggaggcagtggggaacaggacactgagatggtccatggaagagaaacaacagttgttcttcaaattcctgccatttgatctaagatctgattttttttttgtaggattgaagagatgaaagttcccctggtcccccaaaattttgtttatagtacatacaaatgctccctgagatacccagctgtatgaggaataaataaggaaagagaacaataacgtggcaccaccttttcctccttcctgatgtacaaaatgagggaaagtcataaacctccaattaataactgtgcaaccttgctcaagtctcttaatctcatctgaaaacaggaatagtaatagtgcttgtctcatagcaggggttaagggagggtactcatcaaatgttagctgcaactatcatgatcacaatgaaatgtaagtagatttctattctcttttcaagatggagacttactggtccctaaccaaaattcttactgtatacaaaaatagtgtagtataaagtaagtcaggggcaaaggagaaaacggtggaaatgcggtgggcatgggagtgtgaaaagcagtaaccccttaaaaggagagagaaggaaaagaagtcaggtagaaaatggagatatggtagggagcaggaatgattgatattaaggtagccagaggcaaatacaaaggggaaggaggggatgggaaggggtggcagaagagaaaaggaccagagttcctagaacctgttagcagggcagaggttaaccataagcaactcattaccatgccccccaaagcatcaggccagaacctccgttaaacacaagacggccattggctgcacctgcagaagtctctgcattttttatgaacagcagaaaacaagagaagtattagagaggttgcaagttagagactggagacacctggagactctacatagctgtggtggttttgcagtgtagacttatgaaatctgatacccccatgcagtcctgttaggcagataaactgagagcctagacattttataagcccccatgtaagcatttgaggggtaggattccttcaatgctcttccaataggatggaaacagaagggaagaccatcctgtcttcagggcttgccctcttgtttaatcctcagatggacaacattagtcccgtttaacagaagaagactctgaggcttggttagtaaaagaatatggccagaatccagacctggagcctagctccaaaggattgctttcctgttagcaagacactgtcttcttttgattttttttttttttttttttctgagacagagtctcactctgtcgcccaggccgaagtgcagtggtgtgatcttggctcagtacaagctccatctcccgagttcacaccattctcctgcatcagcctcccgagtagctgggactacaggcacacaccaccacgcccggctaatttttgttgtattttttattagagacagagtttcaccgtgttagccaggatggtctcaatctcctgacctcgtgatccgcccgccttggcctcccaaagtgctgggattacaggcgtgagccaccgcacccagccttcttttgattgttttcggagacttgtactcagcctttttgcttctctcacttctctggttctctacctgcctaccttttagccatttcacctatcatcctggagacccagattttgttctttttttttttttttttttttttttaagacagagtctcactctgtcatccaggctggagtgcagtgaagccatctctgctcacgcaacctccccctcctgggttcaagcgattcttgtgcctcagcctcccaagtagctgggactacaggcgcacaccaccatgcctggctaattttggtatttttagtagagacaaagttttgccacgttggccaggctagtctcgaactcctgacctcagatgatccaccaccttggcctcccaaagtgctgctagattttgttctcaaatagcagctgtaggatttggtgtggtattttttcccctcagctgttgtttcttgaatgctttctcttgttcacccacttcttctttaccacttaccatgattaataacaaggtacctgcaaagtaaggttttcccctgaatacttcctagatggtggaggtttttcagaagtaccacccaacctcaaaaacacatagtggtccacatactggccttggagtcctggaggagttattctataggaacagcaaatccatgcacagccaggcattgtctgtcttcacatatcagggtacggaaaactcttatgctgtaagaagagtcacactaagccaaagtttaggaaccagcctgctccagtatgccttttggaggacttttcttttctaattcaccttgccttcctctgtcacatctaacccaatactgtccatataggaaaaattcagaaagtattgggttggtgaatgcagcacagattacctatttaaattaaagctgtgtctttagggaaaaaaacttctgggggatgggagcagtggcatgagcttggaaggatttttgcattctacagcaaaccacagctgctatggccttaatgtttgtgtccccccaaaattcatatgttgaaatcctgactccatggtgatggtattcagaagtggggccttttgggagactaggtcatgaggctagaaccctcttgaatggaactagtgctcttataaagagaacacagagagctagctagcccttctgccacgtgaggatgtggacggtgtgatctatgaggaagagtgctcccactgggtaataaatccgttggtgccttgatcttgcactttctagcccccagaagtgtgagaaatagatttctgttgtttataagctactttgtttatggtgtttcgttacagcagcccaaaaggactaagagaacaccaccacccaacaccagaaaatgggatttgcttaaaccaatctgagaatcagtcacctggataagtgtgtcgagtgatccattgaatcagccagcaatgcataaagaatcatttccagtacccacatatgactgtgcttctgttttgtgttttattaagttgctctggagtaatgccactatcagtgcttccccagcacaaggaggttggcaattgagttacctgtttgtgacagctaaactttcatgaatctttaggagatccatttgctagcatcttttaaagactctggatttttctgagcattttgtgatgataactgatgcatctgaagtagaggtgggagcccttctttgtcaagagttagaaaatacaggctgtcttgtcttcctataaatgtcagttgttgttgttgttattattattgtgtcagcagtaaactgctccccagaggactaagatacagcattacagagagagcatgccttgctgtgaaaatgggtagtagaagtatgatgatattatttcgtggtaatgaatttacctttatgacagatcattatccccttctgtagctgaactggatgaaggacaagtctagcagaataacctggtagtacttggatttattggctttaaatttttaagctggaaaaatgcagtagcagccaggttatctctgtatgaatgttgcagaggaggacagagatgaaggaagtcacattttctttctagtaatggtagaaagcaggtgatgatgacagtcttttaacgaaacatgaatgcagttgctcatatgctttgccattttagtgcacaagtcaaggagtaaatgagtagaaaaaaatccataagatatcatcatcatcaataataaaaaattgcttaaggtctcattgagtgttacaccataggaaagagcaaagatttctttttaaaatgagttagacgagacttccctctcaggtgtgtataatccaggttcatgctttaaaggctatatgtgaaatagaactgttttatattagtgagctgttggggatagtaagttgcagttttgcataaaggcaaaccatggtacagtgaggatggtgcccctgtgggaagaagatgggcttggaaatcatttaggtttacatcctggctttgtccttttctagtagtgtgacctcaagcaaatcatttaaactttctgtcttagttttctcaggaagcaaagaagttagtacctaactttcagatttctttgcagctttagtttcaggtacatagtaagtcttcaataaatgatcactattgctgttcctgctgttgttattgctgttcttgtcttgattcagaagccctggtggtgatactccatgctatattccaaggagtaaccataacctaattattttgaatgactgagaaccagtgctgatgtaaagctccctaaacccagcacttctccagaagccgtaagaaatccatgccatcatttagtaacctacactgtagggctaagatctcaatccgttttccatttgcacactcatcagagtagatagagactagttgttcactatgtctgtgaatactctatagagttttccccagcttcctcctttcctccaattttccttacaaagcctttccttctttcgtctgagctctaacactttgtacgttgtagtaattttatggagcccagtgccaaacatctctatagaggggatgttgtaagggttgaatatgaagagaccctacatgtgacgtgtgtcctacgaatcttggagtcttgactccttctccaatgtcagtactcgttatctttaatttggggccagatatgagcaccccacacactttccaaaaaagcccccgatccacaaatgtatgcatgatttttccttacataagtcttttcatgtttctggacatattttatctcccttcctcctctaatactttttcccttgctttccacagtgagaaaaacaacaacaacaaaaaaaaaaacacaaaattcacacaaaggcttatgtatataaagacatggctccaggttctcatcagttcaaggagtaaaagcaaattccaaaagtatagaaatttaggtggatgtggccgggcgcagtggctaacgcctataatcccagcactctgggaggccagggtgggtggatcacgaggtcagaagtttgagagcagcctgaccaacacagtgaaaccccgtctctactaaaaatacaaaaattagctgggtgtggtggcatgcacctgtagtcccagctacttgggaggctgaggcaggagaattgcttgaacccaggaggcggaggttgcagtgagccgagattgcaccactgcactccagcctgggtgacagagtgaaacgccgtctccaaaaataaataaatttaggtgaatgttaccttctccctttaattttctattttatagaatggttgcatgcaataaaagcagttgcttctcttttaactttttaataaaatggaagtctgtttttaaagccatttgctttgaatatgtaagaatacctagagtgttttaccatggtagagataatttacaaagtaagacccagttggagttgctcagttaagatgtatctcaggtgaaatgttaatcaattcaatgtttctttgtgttttgaaaatctctttagtgtgctgggccgatggccacattttctgctgtgtatatgtgatatcaaactttaacaagtctgttgcaacaaggataagacacagcagtaggaaaagaccactggagataaaggggctcaactctcttcccagtgagaactgccatgttatcttccatctgatcacattactggaagcttactactcttcaggaactcttcagcactttacccaagctccagtgaggaggcgatgctggtgcttatggggtacttggacaagtagaggctctccctcgcttgtcaaaatgcctggggaggaagcaccttctgccatttagtgtatggggggaaaaggaagagggcagtgagggatcttaaatgtctcgtaatgctctggatagacctgcctaagaaagaattaactttccccaaatgccagtcacgtcccagttaagaaaggcctgcctggttcttcagcctcatcagtgttcccagaagtcccagctccagccatcacaaaccaaacgtgccacttgccttctttcttttctcttttcctttcttcctccttcccctcccctctcatcccctcctcctgcttctccctcttttccttccttccttccttccttccttccttcctctgaatttcctgtatatcctctctgagaggccttacttagatgccacttgctctgcgcttttgttgcccctggcacacatgtgactccacctgggtggtgagcccactgtgtgctctttccactcttactcacctgtgcaagctcctgatgggcaggtcccagtctttatctctgtatccccagtactgacacagtcctggaacatagtaggcccttggtgtgttttagggaaatgaactaatgaatagtaggtatttagttagtattgcatcgcgttttctgaaagtaattttaaaaaaacacatactgtaggccaggtgcagtggctcacgcctataatcccaacactttgggaggccaaggcaggcagatcagctgaggtcggaagttcgagaccagcctgaccaacatggagaaaccccatctctactaaaaatacaaaattatccgggtttggtggcacatgcctatagtcccagctactcgagaggctgaggcaggagaatcgcttgaacccgggaggtggaggttgcggtgagccgagatcgcgacattgcactccagcctgggcaacaaaagcgaaactccgtctcaaaaaaacaaaaaacaaacaaaaaaaacatactgtagggagttcagtaaaaataaggtcaaggtttctcagcctcagcaccattgacattttgggcaggatactttggtgttctgtcacgtgcattgtcctatgtgtgggtcactgtcctgtgcgttgtaggatgttagcagcacccatggcctctactcaccaaatggcaggagcattccccagtagtaacaaccaaaaatgtatccagacattgccaaatgtcacctgggggcaaatcaccccaactgacaatcatcaaattaagataaaagaagaactaacatattgaattccatttaataaacaaaatttctatatgttgtggcaccaataattcactaatccatttagtaaacacattatggaatgatcttcaaattaatgggctgtatagtcttaaccgttaatgtttgagtattctgtaagctcttaagaatttcagtattataaaataatccacccaccctttggaggcttgaagcacctccaccagtggtgaagagccctttggaatcacctttgcagtcataggctcctagaaataacatcaggagtattaggaaatggtgcccattgcattcctctcccgtggcctttactgggaactgtgctggagactgtgttatttcatcggggttggctgccaccaaagtgtggggagccatatgttagctattctgtgcagtaacacctgcactctatatcacaggcaagcttatatgcctgtaatgataagcctgcctatgtagacttgtgagtgcacagttgcagcacagttggcctgctctttgggtgtgggaagtagagttcatggaggtaaaccattgccaagcaagagatttgtactctccctcatgttttgtccatgtgaaacctttgtaagtgcagtgtccacatgcccaaggggccctcaggtaaaaacacagataacaacattgctccagggtttttctttattagaattctgtattgtctaacatgattggtaaaaccaggtgagctcctaaattgtggtttttagtgacattctataattcactgctgaccttctccccaatgttgtgacttggaaaaaaattcaaattaagacttttttttttttttgagacaggattagacaacgtggtcacccaggctggagtgaagtggcacgatcatggctcactgcagcctcaacttcccaggctcaggtgatccttctgagtagctgggactacaggtgcatgccaccatgcctagctaattgtttgtattttttatttttttattttttagagatggggtttgttatattgctcaggctggtctcaaactcctgggctcaagtgatcctcctgcctcagccttccaaagtgctgggattacaggtgtgagccaccatgcccaacttcaaattaggacttctttacaataagggttattctattcagaatctcattagatgttaaaaaaaaatcaaaccaaaacaaaaaaatactttttagtaattctgtcccacaccttttacttttaatttatattacttttaatttgttctttcccaccttttactattaatttggtgtcgctttatccttgcacatatgaacagaaatatagtaaattaagtagtaggcaaagataggccaagtcaaggatagtagtagggcaaggatagagcccagagggaagaagtagaggggaagtgtgttagcggtgacaaattgtattcagagagaatggcttcagtggtattgataaggaagaaacaaccttcccaccaggttgtttgatgaaccacactattagaccattcttgctttgctataaaggaatatctgaggctgggtaatttataaagaaaaaaggtttaattggctcactggtctgtgggctgtgcagggagcatgctgcaggcatctgctgggcttctgggaaggcctcagggagctttcactcatggcagagggtgacgcaggagcagacaggtcacatggcaggagcgggagcaagaaagagaaggggttggggaggtgacacacactttacaaccagatcttgcaagaactcactatcctgaggacaacaccaagaatatggcactgtttcattcatgagaaatctgcccccatgattcaatcacctcccaccaggccacacttccaatattggggattacagttcaacatgagatttagagggagcaacatccacactctatcagacactttccctggactgtaaagctggagttttggtttgggtaaaatctactgagtccatcatttggtgagaaaaaaaaatctatggtacttagatgtgcacatcaggaatttgtatgtacacattgattacaataatggttataatccatcatcatcttccaaacctgttctaagtgcttccgcctctggagtaggtgttcttactcgtgcaattagggaacagtgccttagttaattacattgcttcagttgaaatcccgactctaccagttactgtctgtgtgaccttagactgtgctttatctgtaaaatgaaattataatatgtaatagcacctacctcataacactttgaaaattacaggaaataacacatggcaaagctgaggagaatatctggcatgcagtgagcactcagtaaatattagctcgtatcactttattgttattgttattcttacaaccacaaaaaaactgtgtcactttcctgcacttcacgtcactaatcctgctggtctttgatgacttgtataggccatcactgcttccacaaagccttccctagccctttcactagtttaatgcccccctctgtgccctcagagcctgcttccactaccagagcccttaccacattgtattgtaatgcttcctctgttggcctgcctcccctactggactgcaaggacctgaaggtcaaagaggtacactctaatgcctaccatagtacctgaagcagagaagatattcaacaaaggtttcttgggtaaattattgaaagtttaattaacttgcttaaggtcacaaagctagtaattgagtgaaacccatgtctgacttataaaagtaaataataagctataagaaaaatattcctctaataatgataatgcactaaattatgattccacctgattattacttacagaatactctcaaaattacttgaaaccttccaaattttggctctatcatctcttcaaacctctgtctgacaatggtactcactttatactctgcctccaacatatacacttgacttcctatccatagggttatccttgttgccccccataaatttgacttgcactttcatctcctctcaagcagtcatcagtatttattgaggcctacattgcagcgacctgtgatgctctaaggatacagaaatgatatcagaaggtggtgacatttgaactggatcttcctggtgtgaatcaagccttccccactagctgttctttgaaagaagttttgactaatctgtgagcccttgatgacacgaaatattttgatatatgttctgagttcactgttcgtatttgtttataggttggcatcaatagatatttgttgaatgaataaatcaggctgtagagaaacattttaggtttataattaaagcacctgaaacaaaaaaaaacactacatttagcttctctctaacccttttaatggtagttggaacatcagaaattagccattgagcttactgactctttttctaacgatttactgtataagagagcagaatgctattggcttcaccagctgtggccagaagggctccatgttcaaattagctacaaatcatgtcccttatggcattgttgctaatggtgacactgagggtcagaaatgcctacggtagtgaaaaatatttcaagtgcccctgacagttaacatctgacaagaaagtgcttttctctgtgtgggttttcgagggagtaaatgaaattgaactcgcatacatatatgtttgtgtatacatgcataaacatggtactttgcatctggtctgtgactacgctgcaaccttgggagatttgatcgattttctaatgttagaggtaggaatttaactaagggagtattctttggtaatcgcaaagcagaaggacttccatgcaacctggtactgggtagcagccattggctcttaattttgtaaaaatgacagatattcaataaagtatcagaatgattagagggaaaaatattagagctggaggagctgccctacttctgaacaagcagttgaaacaaaggcactcattggaattcatggttggttgacattatgtagcctgttgttgcttaattttgtttcctgtatattttcagggttgtgttcatttggttttagcaataaggacgggtcattttggtgctgtgtctttttagttcacctgcatccttgagttgagagcagagaacagaatgcatatttattttcaatttttacatgttatttcgtatttccatagagtctgtggacttttaggtacaatgatgctgtcgtgaacaaataagatgctgtctgaatgttcctgagagctttagtgcagtgaacacaccttctcagcaacaacaaaaggagatcagggaggcttggccaatgtactctctcgtccacatacggactgataagccaatcttcaaaatcaagattcttccagaaagtccaaattgtcgagtttatatttatagaccacatgtctgagagtctcctcccaacccccctcaaccaaagatagtagtttagatataacagtttttaaaatcaagttctcactataaaatctgagttagatacttgggtaagggtgaggagtagagggtatggctgaggaagaaggggcatttcaaaagaattgtaataatcagtccctgaccttataagagtttatattctaattacagagaatataagtcagacagctcaacagtggcaagatcacatagtactaaatacctgctgaggtcttaaggcagtgtttatacactggagggtattttcctccagggaccatatggctctccttaagggtattcaaaaatgtgtgagggcatttttggtgctcacaaggaggggatgttgctggcattcagtggtgcaggccagggatgctgagcatcctgaggggacagggcagttctaaacactggaactgattcccctccgaatgctgataaccctgatgagaaacattgtagtggttccgagaagaacaagagcgctcttacttggagccgagtctgagatgtcctcaacacgttctgtgagtcaaaggttatgttccctaaaatcaaggaagtggcctggatcataaagtgcttcaatgatcaaagtcagtcaagtgaaatgtgtcgatcattctcctgcctaaaaggccaaattctttcagcattgatttaaagctataaggaatcaagaccctttctttaatgatgctttctgatgattctccatttgtattgacggaaggagctaaagtgtggaggctctgcactagagggtagtttattttaaaaagttatttctgcatttagtgttaatattaattgcttattttatatgcctttttataccatctgaagtactttcacatctaaaaaaatttaaataactttttttcaaaaaaatactgaaaaataaaatcagatttctaaattaaataaattaaattcagtttcctagagcaggcagcatggcatatttagttatcaacaggaattttcagcaaacgaaagtcttttaaaaaataaagtgaaactggaaaaaggaggccatttttaattctttctctatatacttctgtacattatttatgaaaaagtagataaaacttgatctcctgcaagtaagattgacctaacgtccatttctagagtattagtagtcatcatcccaaaaatataagaccaaaatttgtatccttatgtctagaataatgcttggcctctatagatattcaatatgtatttaaagaagagatggtgatttatatttgaaaatatttgaggaattataaacaattattttcataaacacacaaatatatatactaatatgattatatttaggaattagatttctaacatttaaaatagcttagagactaagtactgttatttctcactttttgtagaaaaatcaaaaaattctagagaatttatttttaataatttgttactagctttagaaaataatttttttactcaaaaattcacttaaataaaattacattatctacattttgatttttatagacaacttttataagaatacttgcattatttaacattccatgtgaaaagaatgtggttatttcttaattttttctgttaaaaattccctgtatgattgaagatctaagatataaagattatgtttgttatttataacagttatcattttttgaacacattctgtgttctaggttctttgctaagcattttaagtgtactatttcattattcctaatgacaaacttatgaagtaagtataatcattagtgtcattttacaggtgtggaaattgaggcttaggattttggaattataatttctgtaatactgcccctcctactttattgtaaataaataatatcttggaaatatgatttttgaaagatgaatgaacattttgccatatagatccctttacaagagaaaagacaagtacattgcaaattcaccccgattcatatttagccctgagtatttgtttttttcagatcacaaacaactaaaaactatgaaacttactatgtttgataattacatattttacattagatatataacttacttaagttcaaaactaagtctggagaaggtggataaataagtcaaaattaacttcattttaagggaagttttacaagcaatggtaataagtcgctgaggagaatggaccccggcatgttggaatccgtggttgcaagctgacactttgagggaatgttcttagcaaaacactcacttcaacggaaattaggtcagccttctggaacatttatcatgtatacctgtcaccagcaagacccagtccttaaagtgaattgagatcacaagcaatggtccctcctgctctgagctgcaaaggacactctaaaccaatagttctacaaatatgtgagcttggcagacgctcccatgaaactaaagccaacacccatatagttgctctgggaattgaattccttaatactttgtttatagaattttgaaacagcaaatggatttggtctgttctgaaaaaacaatctgtcctgtggcttgtttggaataacatctagagttgctatagaaggatggaggcagatgacccatgtctgatttggaagacagtttcgccagtttcttctccttgtcctttattgttcagccaggttggtttttgcccgactcaaggtatttgcatagaggaaaggccaccttctaccgaagctaatttgatatagaaactagagtagttagcaaaatccagagctaaaagagttagcaaaatccagagtaatagaaggtaagatagagtgtatggtaaaaccaaaacaacgtaaatgagtcataacccagtgccctttcagtaatcatatggcatcattctggtggtttcagagcagtgtcagcaagtatggagtcctgtgtaggaatctgagagtgcatctgtgtcagtgtacatgtacttcagcccagtgaatataattcattgagggttttatgcatggaaattaccacattcaccaggtagcctgtatctactggactaagttaccttgccttggaaaggaagtaattactaatctttctcttgtgtttatgtttggcaaactacacctaaagacttcactaaaaaattggtaaaatatatatgaagctggttgaaaaaaagatgaaattatacatatgtttgtgtagtagcaggaatcttccattacatctcaagaatgaaaggaaaaaactattaagaatagatgtttcatttctgtgttcattcatcacagatatactgagtacccaccatatgtcatacattgtacaaatggtagaatcagaaagatgagagaagtaagatccccactttaactgagtccttattcaagctgtgtgtctgtgtgtgtctgtctgtttgcgagtgacagatccttaaacaaaaaataatgataacctatgtgaaatgccccagtagaggttattttaaaactcaaggagagaactctataacttaaagatattttgtctacaaaaaggagcgaaggttttattcgaagaaagaggagcctgttttatatgaaaatcctgaagatttgaaggggctgaagaagtagaatggatatggaagaaatccaccaatgatttcttcctggaagaattaaacacacacacacacacacacacacacacacacacacaccaactttcatgatcacactctattaagccaggaccaggaaacaatttctaatcagcactctgatctgggcagagattgtgcagtcttttataccaggcctcagatctgtgttctctattcacacatgctcacttccagctgttgtcattgaaatctcacataatcttccaaggtcaaagggcagtcacccatggctgctgcagttaaaaggttatgctgatttctgttgtcaaatattggcccttttctcttccaaccactcccattctacttcttttttttttttaaacaagaaaaatccagcctagaattgcattacatgactttaaagtcttaaaagtgttcctccattgtgctaacacgacatggcctgaacagtctaattcattctgttacatttcacaaagaattttctggtacttctaaaatactttgtgctaggccagcaaacttcaaagtattgtgacccacatgattgtggcctgccatagtatctgcagaagtgaataatacaggttccacaatttaataaacatggtgaattttggcatcgataactaattactgggtaaatgagcaagaattacacaaaaaatgacttttgaaaagatgaaagctctttgcattttgtggttctaaacattagctagttttattttatatttggagacgtatataatagtacatttaatatttggagtcttagaaaagtaattgtaaggatttttaaaaaatattattgcttcactccatccaggattttctttccatgcttggtgaaccaaaatcagtgttgagtatcttaaaattagcacatggcccctggctatctactttcattatcattgcatgtgtcctcaggtggtttagcaagcaggattctctgtaagtggtctgtctcacagccctgtgtataaaacctaaaaaggaagaaaagggagatgggccattacgattttttgctgtttaacgtccatgaaccagggtagccctcaggtgatccagtttcatgtctgtttcacttaagataatcagtttctgatgtattcagggaatacatttccctgttttttccctagtatatgtaaaagttcataagcagaaactaaagctattacaaatagcttgattcatttgcaaattaccagttgttactgtccaagtttagaggaaactttgatgcagaacataaaaacaataagtttgctttttaaaaaacctctttaattcaaaaccgggttaattaaaaaatgttaatttatagtgcattaaaaccataaaattaattttaaaatattaagcttataaaatactgatactatgctaattacagaagaccttagcttttctaatatgatgcaaaattgtctgttttttaaaatggtgctaaagtaagtgtttaaatttttaaaataatccctaaagattatttttgtttctctgttcttgtacaagtctaaattttcagttgagtccgcttgcaaaacaactgtttcagcttttaagactaataaatgcataattctaaatgtttcggggaaatggggaaaataatttgttgacatgacgagagagagaaagggagggaggaaggaaggaaaggaagggaaggaaggaaggaaggaaggacggaaggatatttagcctggaagagagaaaattaggttgatgagatgtcttcagatatttgaaggatagtagaaataaagagagccaacatttgttctgcctataccagaggacaaaatctaggtaaattacaagttataggaaggtagacatattcagggaaatatgatttttttaacccctcatttttttattaaccacaatttttttgttgcaacatgacgattattactccactactagatgaactttaaggtcccttccatatccagttcattgtgtgatgccatggatctgatatttgcaaagatacaaataggtaaaaatcttttttcacttttatttttagatattttgatatctaatagacatagtcctttaattgctcaatcacttggaacttaaaactcatgaactttctttctatgaagtcattgggcaatcacatttagtttaattaaatgctacccttcctttattaactgcaggaattggtgaaaagatgtgacaaggcctttggattagactgggtaattaagtctctgatgctaaaaatcatggattaaaatgggataaaattcattatataaagagtggtaaatatacctgtgttctaatcctaattttgccactatctgtgtgacattaagcaagtcacttaacttctcatgtctagtttaaaagcattcctttgcagattaataatacatactgtactagcaaaatatgtttgtagactggaattggcctgagggctgctaagttgtgacacgttagattcaaaagggataagttagtagttatgtgggttagggtaagtgcttagctactataacaaagcaaccaataaaacgcaaaaacatatagtagttaatgtatattgaaatctatttttctttctgttaatattcccagatgagcagcctaagttggcaggatggttctactccacagtgtcattcagggtcccaggttccttctgtcttactgctctgctattccacgggtgtgtgcctgcatggtagaaagtgttttcgctcataaaaaggggtagagacaatgttcagggcaagaatttcctttcaggtacgtgggggtagaagttgattgtatcacttgcgttcactttctggttgtggccactcctaactgtaaggcagtctggaaagtgtgctttctggctatcaaccacgtatatgtgtgacaaacagcagactcatcacaggaagatattgcagtagtctttattagtttctaatgttctcctagaaaggtattacaaaaacatgaattttatataaatacattactgaaaatcttgctgtaaatatctgccttgactggggacataagtccccaagagtaaggaccttgtgttattttacctgttgcatcccaggtcctaggattgtggttgccatgtaatagacattaagtaaacatttattgaatggaagcagtaaattaaatattgactctgtctctatggctatggcagaaatcattgagtgagcaatgatggcaaaaacaaacaaaaaaacacagattaggtgtctgtattgagtaacagtaaatgagcagcacagggaaatttggagccacaaaagaaggccaacagtgtgtaagtcccatgacacatacttctcaaacctctttttgccccattcttcttttggtctaagagtacattatttccataatggtgacaatttcttaatgtgtcatgataaaccaaaatgacaatcatacccatgttacaaatgcatttaaagcaatccatgtattcatctgagaatctcaaaacacctcatccatattattagctgacaaacatttctgcattttgcaaattctcaggcacaactttctagatatagaagtgtttcagccttactgtcagtccaacaccatatgtcaaccttttaatgtttaccataagcacactaccaagtgaatttttctccactatcataaaggttaatctcacaaacagaatatatatgtacttttattgctcctgtgttcttttttagatatctgaatttttgcatttctttaaactataaggaattattctaaaaataagccgtatctcaaatgtcaccaatgagtggcagaacaatttaaatagtcactatacagtcagaaatcagaccagaaatttaaaatttggcattaatggatcagcagaaacatccctgcacctgactcctcaaaaggaaaaactgttttccaagataatctaaattaagagtacagaagtaatatcactgtaggtgagctaacaaaaatttacatcacgctttagaggactaccaaataacagtatcataagtcactcatctgaatcactaaataaatatttattacacacctagaataaaggcttatgctgggccctgtggacaatgtgagataatgagacccaaccctcccctccccggtttgttgtaggagtgcagagataatacatataaacaaataactgtccagtcaggtagaaagaggcaagtgccgtaagacaagcagagaagttctccttaattgaatagtgtctcctgagcacacctaaaatgttctgtgttggggtgagagggaagattaacgagccacattcccacaggtggctcataagccagtggggaattcacagaaggagaaattaaaattccaaggagggagtctggttgatgaggtaaacttttctttagaaggatgagaatgtaggttccctgagagcagtgtccccagggactagcacagacctgcacagcacaggcagtccaaaatccttctggaatataaacagcgtgagaaggagggagcttttcccgtcaagtggccaaggcacaccagcatggagaagcctggtaatcattggcctgtcttgttattagggatggaaccctatttaccaaaggaagactagaatagagatgagttctttttgatgaaatgactggggtattgcagtttgcctacatcccttaaccagacgagatttgatcatttagagctgacagccccttgatattccagcagagaaaacaaaaataccatcttggatataaactttccttctcagatgcaaaattaactctgtttcttggacctgaaaactttctttagtggtcagcctcctgtgtggtttgttcccaggtgtctctggccttgacctctgaacagctcttcaaggttacctgtctctcttcaaatcttaactttgttcctctcctgcctgctaaaaggcggatagatgttcagttcctccatgaaatgagatttagttcccatgtaatggcattttccataataactgctgatatcatcaaggtaaagagagctgcttctcctaactacccatgaaagaatttagctttttatatttctacctctcccatatagtttaatctctccccactgcgagtatgactgactccaaggtattgaagtctgtgctctaattgggaattcaatgaacaagacttcagtgaatgaacttttttagccatattatataaaatgaaaaaggatctgctcctcatttcaatctcctgtacaattgctcctgaacagtagtacagaattgtagagatagcacattatgcaacctggctttttatctgagacatacttaatgaaagcacatgttttgcactttttttctgagaggccctattcaaaatgtaaatcttgggaccttttgggagtgtttaatgtgctttccaatggaggatctttcaatattaataatatctgaatttggaatcgcttaaactcacctttttattttcttttccacttttttcttactttgcagtaaagtggaacaatcagattagtgtcatttccctgcaagtcatttttaagatttggtttgtgttcatgagaatgaaatattaattcactcaggtttgcttagtagttgtgttagcaatatcactttttccatcatttcttaggtttcatttctcattgctgtcttcttacaaagttcatcagtgggtttccaagcaattggtaaaggaacaagagcagtttcatcaccatttaaagttacatggagtgtttacacagacctttccatggggacatattataaacataatctagccaaggctgtctgataatactgtgtgaagagatggttacatcaaaacctgccaaagaaggctaggcgtggtggctcacgcctgtaatcccagcactttgggaggccaaggcaggcggatcatgaggtcaggagatcgagaccatcctggctaacacagtgaaaccccatctctactaaaaatacaaaaaattagcagggcgtggtggcaggcgcctgtggttccagctacttgggaggctgaggcaggagaatggcatgaaagataatggcatgaaacccagaggcggagcttgcagtgagccgaaatggcgccgctgcactccagcctgggagacagagctagactctgtctcaaaaaaaaaaaaaaaaaaaaaatctgccaaagaattatactctttatttttgtgattatagtgcattcacatatgttttaccttctaaattgcacacattccactaaggtaagccttgggaggcaagttgctggtagggaaaagggatgaaattgttatttttgcagtgactttctcaggatcacacaagatcttcttttaagcttgggactagatcctttttgggtggagggagctttatggccatgatggacaatgctactgccctttaactctatttttacttgaactttaaaaatatgaaccataaagggaacaataagacaatccccaggcatttatcatcagaaacgcctgaatcaatctgaccagaagcttcattgcctgtcctgtcctgatcctgtttagtttggagggaatatgtggatggttcattttcatagtttcccagtacagactgactcagttttagttaaactatattgctggaaatgagagaaagagacagaaataagaagttctgccaatgattttaccaagaggaaaaatgacataggtgagcccagtttgagtttcattcactctgaggcatctcaggaacactgaccccatcaggcagtgtgtcaagacctggagggccagaggcacagaagatacttcccctcctcagagggcttacagtctaatgtgagaaaaagacaaagttacaatcacgtacggcaggtcccaggtgagaaatatagagtataactggtcagtattcagaagggagaaaaaaagtgttccccagtggtgggggcagccagggaagacttttgtgagaggtgacaacaaagctgagttctaaaagacactttaggaggtggttaagctaggagtaggaagaacagatgtttcaggaagaaggagctgtatcaggggatggcagtgaagcagtgcaacgaggagcttgcagttcacttaggtcaagggtagggccagaagtgagagagaataaacaagaggctatatctaggtcccatgccatggaaaggagttagtactgtactctgaacgttctgtggggctcttgcaagcattctttctttttaaaagaaaaaaatatatatatatatgatatgtatatatctactattatgatatgtatatatctacttatatataaatatatatttattatatattttttcattttaatagtttcccagtgcagatcagctcagttttagtttaaactatattgctgcaaatgagacagagagacagaaataagaagttctgtcaaagttttacagtatatataaaaatatatatttacatatatatatttcatttcagtgacctttggggtaaaagtgatttttgggtacatggatgaattgtacagtggtgaagtctgagatttcagtgcatccctcacccaagtagtgtaacttgtacccaatatgtaggcatttttttaatccgtcactccctacacagccgccccctcctgagtctctgcggtccattatatcactctgtatacgtctgcacacccatagcttaacttccacttgtaagtgagaacatgacggtatttagttttccattcctgagttacttcacttagaataatggcctctggctccatccacgttgctgcaaaatacattattttgttcttttttatggctgagtagtattccatggtatatatatataccatattttctttatccgctccttggccaatgggcatttaggttggttccacatctttgcaaatgtgatttgtgtggcagtaaacatacacatacagttgtctttttgatatattgacttcttttcctttgagtaggtaccaagtagtgggattgctggatcaagtggtagatctactttgagttctttaagaaatctccatactgtttcacatagagatggtacttattcttaccagcagtatataagcatacccttttcaccacatccatgccaatatctagtattttttttttactttttattaatggccattcttgtagaagtaaggtggcatctcattatagttctaatttgcatttccctgatgattagtgatgttgggcattttttcatgtttgttggccatttgtctatcttcttttgaaaaatgtctgatcatatcatttgcctactttttgctgggatttttttttttcttgttgatttatttgagttccttgtcaattctggatactagttctttgttgtatgcatatttcttgtaaactttctgatagggcagggggctcagaacacattggatttgtctcagtgtctccaacatcttgctctttcctgcctcagggcctttgctcatgttaatcctctgcctgaagagctctttcttcttttcctatttggctccttcgtatctttcagatatcagctcttaaacaagacctgccctggccaccctttctaaagcttttgatatttttctccttcatatcatttattttatatatatatattttttttcgagacggaatttcgctcttattgcccaagctggagtgcaatggcacgatctcggctcaccacaacctacgcttccccgttcaagtgattctcctgcctcagccctcccgagtagctgggattacaggcaagcgccaccatgcccggctaattttgtatttttagtagagacaggatttctctgttagtcaggctggtctctaactcccgacctcaggtgatttgcctgcctcggcctcccaaagtgctgggattacaggcataaaccaccgcacccggcctataattttttttttttttttttgagacggatcttgctctgtcacccaggctggagtgcagtggcgcaatctcagctcactgcaacctttgcctcttgggttcaaatgattctcctgcctcagcttcctgaatagctgggattacaggtacacgtcactacagccggctaatttttgtatttttagtagagacagggtttcaccatgttggccaggctggtcttgaactcctgacctcaaacgatctgcctgctttggccttccaaagtgctgggattacaggcatgagccaccgcacccagcctccatttataatttttttctttttttcttttttttttttttttgagatggagtctcactcggtcgcccaggctggagtgcagtggcgcgatcttggctcgctgcaacctccgcctcccaggttcaagctgttctcctgcctcagcctcctgagtagctgggattacaagcgtgcgccaccatgcctagctaattttttgtatttttagtagagatgggttttaccgtattagccaggatggtcttgatttcctgaccttgtgatctgcccacctcagcctcccaaagtgctgggattacaggtgggagccactgcccccggcctgagccaccatacctggcctatcatttttaaagtaatttttttttttttttttttgagacagagtcttgctctgtcacccatgctagaatacagtggcacgatctcggctcactgcaacctctgcctcccgggttcaagtgattctcctgcctcagcctcctgagtagctgggattacaggcgctcgccaccatgcccagctagtttttgtattttcagtagagacgggtttcactatgttggccaagctggtcttgaactcctgaccttgtgatctacccaaagggctgggattacaggtgtgagccacagtgccctgccgtaattttttttacatgtttttagctgtttctgtaaactccctgaaggtgggaactgtatcttgtgcccctagcatgatgcatggcacatagtaggtactccgtagacatttattgaataaatgagtaactcatcagatttgcatatctgtcagacagccctggctaaagggtggagaggggattggagagcaagccaagagagatgatagacagcacagttaggaggctttcccaccatgctggtgaagagggaaggtcctgagccacagtcgcaggagggtgatggagacatacatagagtcaggaatcacagaagcggtggggactggttggatgtgggtgattgtcagaggcaggagtcagggatgatgccaaaaaactagatgagtggccgatggttcattgaaatatggaattcaaaagagtaagaacgggttttgggtgcagtagaaaatggattcggctttgcgcatgttggttctaagaatacctgtgggctatctggatggaatgcccaacaaatacttagatttatgggtttggaacccaggagatagatctcagtaaatgataaagagttgagagtcattggcctgtagattcattcatctactcattcagtaaatattcacttactaacgtgctttgtctcaggcattaagtatacagtggtaaattaaaacattattttagttttcacaaatatcacagtctagactgctagttgatgacatggaggtagataaaataacttaggaaatagatacacccccccccacacacacacacacgcacacatctgcacacacatacagggagagatgagcacagaccctggagaacaccaacatttaagaggtggacacaagaaaagggggcaaccaggagagggtggtaatttgaatgaatgaacgcaagggtcttcccaattcccaagtccttgcacctaaatcaccctagcctttaaaatatattgcttgcttttttggtggcaggattaaattgccttgtgtttacattcacgctatacagaaattcatgttagttcatccttaaaatgaggaatttcaaagattggaactgaaacaagtatcagcctgtaagtcaagtaaagaaggtagggatgagcaagagctggagatcaacccagattttcctattcatctatgaatttccttgttattgttctatgtgttttaagtcaaccttaatgtacattgtggttagatttcctttgctgtgatctgtgggataaatgtaatgttgatggtctccctataagaaagagatgttgtggtctgttttgccaagacctcattagagaattttatttatttattaattttttaacttctcagttctcttaatctaagagacagcatcttaggtgcttaccaaagccaattgaatacctgggtgtgggtggttttgagaggtgaaatttcttgagcactttgatggtaaaattttgccattttatttcaaaaagccatttacaattattgtctatcctaaaacttggaactgtttcatctcaaataccatagattatgtgtttgatataaaagttaactgaaatttaaaaaaatctcagtagaaatttcttatgcaaaaatccagtgtaacctaaaaaagacaagtaacttgcaggtccatttatactcctccaaaacatggcaactttttgcatgtgtttatgtgtatgacatttagtaaatttattggtggatatgcagtgccacaggtaaatttgctttccctcagtattgtatgaaatctagcttttattaataacaaattttgtttatggattgttatatattcagattggtctattttcttttattgcattttctcaaggtatgtttcttatgtcaaagaacaattatttcaaaaatcccttcggccaacaattttttgacccagattttaaagcagggaaagactaagctgaccttggagtgatctctcaactagactctacctgtgtgagagtcatagaatcagaaaattttagaggtagagtgggaaactacataccatagattatgtgttccttgtcatttataagttctatgtttctgaatgcatcataaaattaaatgagtagttggtgatcgacataataccaggtgtcttaaagggaattaattgcatccagcaaaaatgaagcagaaacaaagttcgaagattaatcactttttgaaccattgatttattatcttttctcaaaaaaatcaacagacacaaaaaaaaatttggggtgtataaataatctgaatttttatttgtgctcaaaagaatttgttttcctgttttgtgagttggggcttgctttttctattttgactttttaaaaattcaccctgtggtgcctctagaaaagaacacctttaaatcttgtttgagttaaatgaatagataactaattccaatcaaatgtttctttagagaataatgtttaaaaaactatgatggaatgcagctctcctagtgattcttagatatgctgtttttatcccaattgttaaggtcttagaggtcacccaaggtaactatttattgtaaattgtcttttgtttcatatttccggttgaattttttttaaccatttcaaaaatcagctagttgttgtaccatagctttgcacaaccttgaaattcaaaccaaaaatctatctgcttagctaaatgactgtgccctcccacataaaccccaaggagagcagagaatgagattaggcaccacatgtgttaatcataatgaaactaatatttaaagctctgttgtcaaatgtcttgtatttatgacactttgttttcttttgtttttgtttccccaggacatttgggcttccaggacagttttgtcacatcaggtgtttttagtgtcactgagctagtaagagtgtcacagagtaagtataattttgctttgatttggtacagatttgccttggtttgtgcttactttctgcctaggactcctagagaccaaaaaaagctttcagaatctccttttcattcacccattggaagaattttgacacacagtttgtttgacaaccaagaatttaaatcaggaaaaattaaatattattttgatgtgaggcataaaagaaagaccaaaatcctgagggtctcatatattctgaggcttccctgatttctaagaaattctgcattttaaaagaatttgtttttgacctttaaaaaatgctaatgccctcagtatgagtgacacagtctgggatgatcattaccagtttgtcaataatcactaacagtgaatgaagagtacctgtcaccatcttgctccattgatcaaaggcccattcaattgattgtagttttgttatgacataatctagcatgcacgcacacacacacacacacacacatacacacacacacacacacacacatacacagttgccttcccttaggaatctgttttttcttatttaaaagcacaaatacaatgattatgatgttccaggtcccagtaagaagaaggaaaaataaataccaaatattaaaattttattttgttttactcctccaactacttcaaaataccacttgtaggtaaaatttacatggttaaaattggttttgagcagcatcagccctttgtggaatgagctggagtaaaaagaaacattttcatttcaggttcataccccccattcactgtgttacaggcttgcaagattgactgagtaagccagtccatctcagggcatgacgtcaggtcaaacaagtcaagccatcctggtcccaaaatcctggattttgtctgttcttattttagccactcataggctaggagagtcttgagagcacagaatgtgatacacagtgtgggaacaggggagaatctaatgactactgttcatttactgtctgccaggcactgtcgtaggccttagtgtaaggtacataagttaatccttgcaataagcttttcagacaagaaattaccccatttttaaagatgagttaaattgagggtctatataagttatttatccaaagtcaaacagtgaggccaggcacggtggctcacgcttgtaatcccagcactttgagaggccgaggcaggtggatcacttgaggtcaggagtttgagaccagcctggccaacatggtgaaaccccgtctcgactaaaaatacaaaaagattagctgggcatggtggtgcacgcctatggccccagctactcaggaggctgaggcaggacaattgctcgaacccggagggtggaggttgcagtgagctgagatcacactaccacactccagcctgggcgacagagtgagactccatctcaaaaaacaaaccaacaaaaaattcaaatagcggataaatcgttaagctaagtctctataatgccagtatccgtactcttagactggcccaaaggaacttgaagagatctatagcatgagactagacagggaaacagtgggaaggtaactgtcggggttagaattgtgggagtcaaggactcccaggttgatgctgaggtattccagtgtagaagagttggaaccctaagaaatgagacattaggagcagcaggtcataacttggaagagagaggttgctgccatggtattgaagcgtacttaaagtaccaaccggttaagtagacactacattgccttgttaagctggagaggatatgctcccctagttatagcacagctgattaggcagttatttgccatagacaaataacagtgcatctgtatatatcttttttttttaacttcttaggacttttgaacacaataaatatctcacattttcttgtaattttaataataaccgtaatatggggagtatttgtgtgtgtgtatatatgtgtgtgtgtgtgtgtgtgtgtgtgtgtatatatatatatatatatatatatatgtatcagaccataccagtcatagtagcattataggaaaatacattcattgagccctcactgggatctaaaacatagccttaaagagtgaaatgaaaatccttttaagcgtaagattggagcactagccattttattctgccctggatgctgcaattcttacatttagtcctcattaccatcagccttcccaggcctgggggttgtatgagaaggcccacacagtacagaatcacccccagcctctcctcctccttccactccctgtctttccttttaaggtcttatatcccaaagcttatcagttccaagtttgagtagaactctggtcagtctaagatagcttggctgccaaatgaattctaaacctgccttcaagactgccagagattatggctgaacagggattgagtttgcagagggacctggacttgtttcctgtccctgcttagggggttgcttagccagtgcctggcatcatgaacatcctttggctctcaaatgctttttgattctgcacactgctgtgtaatcgctctgggactcactcacacatggcctcgtgctgacggaaactgtttggcaagagtgggtctgggctgtgtcagctcgatcatggcttcaggccaaactagtcgactgtagtcaggagacccctttttcttagagataatctaggtttgtcggggtatatttcacaagattaccttggctgcctgggtaaggatccccagctcaggtttcgtcacctacgcaccctcctgaaaggcttaacactcaagccgcatgctggagttgaaatccctcagcattgccttgcaaggctgccctcttccttgttcccccatgtgggaaaagagaagcaaccgtttcagaactatggtggatgctttttgcagatgagtggacctggggtgcattctgtatcctcgaatagaaataagctaactggccaggcgcggtggctcatgcctgtaatcccagcactttgggaggccaaggcgggtggatcacctgaggttgggagttcgagaccagcctggccaacatggagaaaccccatctctactaaaaatacaaaattagccaggtgtggtgtcgggcgcctgtaatcccacctactcgggaggctgaggcaggagaatcgcttgaacccgggagacggaggttgcagtgagctgagatcatgccattgcactccaggctgggtgacaagggcgagactccatctcaaaaaaaaaaagaaataagctaactggcacaaaaggtgattaaacacatgatgttagccctgttaggagtgtgatgtcatataatatgaaaaattagagtagctagcatttatcaagcatataccatgtaccaggcattgtgctgggtactttgtaagcattatctcattcaatcctcccatggttggtgttactgtccctttttatagatggagtctgtgatgctccaagaggttaagcaacttgctctttttcctttattctactcagctagctgactgcctaccttttcatcaaaacctctcctataattgcattatagaactaaatagaatccaaggattctgtgcttttattgaataatcagttcttgttgatttgatacacttttagcttattaatttgtgcattaaaaaaaggttaaaactattttcatgtaaaccaaagcaagtaagatacttaattaattttttttcctggatttgtttttaggtgtgagtttgtttttaattaacagactttattcttttttagggcagttttttaggtttacagttttaggttaacagaaagtacagaagtcccgtatacccctcctccaaaacagtttcccctattgttaacatcgtttgttagtgtggtacatttgttaaaattcatgagccagtattgacgcataattaataattaaagtccacagtttaccttagggttcactcttgtacattctgtgggttttgacaaatgcatagtgatgggtagctactattatggtatcatatggaatagttttactgccctaaatatctcctgttctccacctattcattacctcccactccccaccactgatctttttactctctccatagttatgcctttcacttagatgtttttgatggtctcagtgtcctacaatctctgactgttttgcagatttcttcttaaccttctgttatctatcccagccccatccagtcccctgcaattatacctaattatgactacttacatgggctgaaaatttcacagtcatcattaatgatggcttaggttgagatttttctccctttctggatctttagtattcgatttttaaatttgctaatacaaatatttacttacactaggtttccagttagtttttgtttttcattttcttccttttaaatgtaagagaggagggaggtgctatttcagtatttcctcatgtggattcactgaaataactatgtcctaagtgtgttgtttttaatagcgttactaccaaggtggcaatggcagagaaactcaggagaaagctgctggcttagcctcacaaattcagaggtgagggatgaggcaacaaggatgcttgccattgaattatactgatcagatacatgaacctgttggaatcagggactcctgctggccaactgaagctgcaatcttccgtgaactcccctttcctccttgcctcctgcctaccaccttttaatttttttttttcattatcatctaaagtccacgaaaggcaagaatggaaagttctgcttccatggcaaagaaaatactgtagcataaaaatctatatttgttctcttgctagtttttcccccatgtggtaggaccatctgaaagtagctcaattatttattgccttgttccaggggaggaggaaaatacagaccactagatgctgtgccagagagagagagagaagtattctctgctttggggaagggggttttacaagtgttaacaatgtggttcagaatcactaaagttgttttagcataatactatgaggaaagagacaagaaccatctgttgaaatggctcttacatgatgctgcattttcaaacaaagccttctcaaggcatttttagattggtctctttcccttgaagttgctacaaagagagcccactctactagctgctaagtgatgctgcttagatagctctctctgtcagcacccactcttttgtttattttgcgctagtgttttcctcaaagtatgagtgctaaggctgtcaaatatcactcctggtaggaacccagaaagttctcctgaaaaatccactacttctgcccatttccttccaaattgctgactctattttacttgaagttggtggagtgacttcgaaaccctaactacttcactgggaaagaggaaaaccgcaaatacacacaggccattgtgactctggcctggtgggctctaattttctagcggcggtttgtacacccaagccggctgcaagggttaagtaaacttcgtggctaaggatgacttcatggccctggaattttgaaaagccaggattctcagtacactgtggccagccttagagtctttgggtgtgaaaaccactctcagttacccggactgatttttggttcctgttgcagtgctgcagaatctattaaaatccggcagctgaattgtcctggctctgccacaaagctcagctgccgggtccactacaggattcctgagttgtttgtcaatggagagtgggagtgaatggaaccaggcatatgcctcagcctggcatgaggtggcaccctagtggctgttttctgccttagaaatgtgcgctctttctatattttcacacaggaattgtcattaacatccaaattgcagttcatttctaaagttctttttgaagtctgtgggtccttgttacgttttcaagtacccatattcagatgcttagattttcaggctagtaatttagtaagaactattggcaatattctaacctgacatggtggaacttctaagacagaatgaactcggctacaaggcacaacaagaaaacgaaactcttgggtaggaacaagcccaaacttgaaaatacaaaatgttcttgcacagaaggactaatgaggaaatgggtgtaggataagaaattccagacatccagtcatttggggtgccatttaaacattcgcagtactttagatcttaattaaagtgggatagatttaaaactttctttctaaactagtggcctgttggttttcctgtgttaagtaacacgatagctgtgatcattgcatggaaattaattttaaaaatagcttatattcttaagcaagatcttctttcaaaagaaaccatttgggctcgagcattaaaggaagaaacaaaaagaatataataaaaaatagattgcagccctagcatgaacagttgccgtgaccttgccttttgtttgccattacacaattcaatggcagtctactcaaactatgtgctcgatcaatatcctattaaagcagcacaaaaagtctccataaacttagtggttagctatgtttataaatggaactcggcataattggatggtcaatagcaggctctactagtaattttaaaatgaacgtcacacattttatatctgtagaagtcaatggcacctcttctagagtgaaggtagagtgtggagcagacaaaagagtgggtggccctttaaaaaaatcataatgtctatttccaaatgtagtttttaaagaaaatctaagttatggaagagaaaattctgattggcccctatatatttttattttgcctatctgaaccaccttcttctgaatatattatgactttgcaaatgttacattttctagttttaatcaacccctcatagagaggtaaaataataaatattgccatactcgtaggaagaaaaataacagtctggctggcttaattcagccagcttcctctactataattcaataaattttcaaaataaatattgaaattgaattagttcaggaggatgttttgttgtatgattttttccttttaattttcttgacatgtttggggtgaatatttgggtagtaaagctggcagcaagtgcaatggactggtagtaatagaaattgtcgtcaaactacgctttcttctgaatcctagctcgcagtatgggtggccaagcttgattttttcctatcctaccctcctcacctaatgaagccatgtaaggtgagagtatccccacccttagactgactctgtcctcagccgactcagccctatgaattaaaaggtgcatataccttgtgttcgatatgtgccctggctgttgtcatggaccactgagctgttgaaattagaactatggcaggaatacgcttatgacattagtgtatccttcagtcactgctctgcatgaaggtctagtcctttctcttacatgcatactcctacaatcttcctggttagagctggcagtgagagttctcatggcagaatttggggccgttttgatctctgttctcagctgaagcttctgataaatttaccagactatgaatactcttattataaagatttgaactggggagaaacacaacataccccttgatgtacatactaatgtgttgtcatggtctctattcgtatgttcatctatttctaggtcattcatcagttatgctttctatgtgtcaagtataaaacctatattcaagatggcagcatgatattgtaaaacagtacaggatatagagttggggaattgagctttgcaacttatcaactctatagctttgggcaatatttaacccctcttggctgtgttttcttctaggttacaatcatttattcattgagcaaatgtttatgaagtcctaactgtgtgctgagtctaagtccaagtactggaaataggaatacctctcaggagtgtaatgagggttaagtgacagatagtctagtgtctgccacatagtagatgctcaacaatgataaccaccacgattattgaacagagcctcagcccctgatcgttcttcactgtgtgctcagagccaatcttggagctgaccactatcagtaaatttattgaaaatgcatgtgtgtgtgcgtgtataaattaagaagggccaattttagaattcatgttctaacaaccaattattagaagagccactctagtgacccttacggagttagtaattccaatagagtaagagcatgccaatagtagacctcattcctctgttttgagcattgtttttcctcaaattttcagaagattctttttcctcaaattttcagccagagcctgtgtttctgcattattctagaaattgttctcctaggatatctcgtggatagcagaatgttttaaaattctcaatctaacactgacacattaacaactttttaagtggcaaaccacacctgggtcatctgtaccggcattctttttttttttttttttttttgagatggagtctcgctctgtcacccaggctggagtgcagtggcgtgatctcggctcactgcaagctccaccttccgggttcacaccattctcctgcctccgcctgccgagtagccgggactacaggtgtccaccaccgcgcccggctaattttttgtatttttagtagagacggggtttcaccgtggtctcgatctcctgacctcgtgatccgcccgcctccacctcccgaagtgctgggattacaggtgtgagccaccgcacctggcccatgtaccagcattcttaaaagtagtacttagttttacagtattttaaaattttgctttcactcatattatgagcaaaaattccctatgaatggcagaagcatgctacaggtcattactgacaatgtggtttgtttgggttttcttgagacagagtctcactctgttgtccaggctggagtgtggtgatacaatcatggctccctgtaactccacctcccaggccccagggatcctcccacctcagccttcccagtagccgggaccacaggcacgcgttgccacatccaactaatgtttgcattttttgcagaagtagggttttgtcatgttgcccaggctcgtctcgaactcctgggctcaagagatctgcctgccttggcctcccaaagtgcctggattacaggcgtgagccagtgtgcccagctaataatgtgctttttaataaacctttatttatgcactcataagcctcaactttttaatggtggatattcatatccagtagtaacactgaaaaactagaaggggtttttgtgacctccaaagcttgagagaaatcctatattaccctgcagtagggccacaaatattattgagatttggctggagtacattatcatagctaactcttgccgagtagaagggctgttggtagtgaccatcttagcatgtctagaatggggccggtggagtccacattcagcaaaaccacacataggtcaaatactggaactgaactaatccagtgtgtggttaatatgagtacatgttaatacccaggatttttcactaggtggaggagaaaaaaaatgaaagttattggtggaaatattgaaaactattttttttttttgtaaacagctgaattagtcagttgttgggatgggactctgttgatacggtttggtttcctaatagctaatggtcaagtagtcccagtgcactattggttgtggggcttatgtttagcttagcccttccctggtttatagatcactgtggcaaaaagacctcttaggccatcaaatcccatccctgtcagagaagacttaatcccatgattgaggctgtatcagatactaagcaggtaccacatttgacctcaaccaaaagctaagacatgatgatactctaaaatgcagaaaatcaatttcagcccccaaagcagaaggcactaatgcagatcagtcagcattgctaacccctctgtggactgctctgttagaccaagtggcagggcccttcatccaatggaactcttgctgacgcttataaagtttaagacctgcaaaagcagagaggcgagaaggagaatgatgagatagaagttttgccacataagtgtaggcgataattattcttctatttaaacgtgttgaatatatctccttcataactgatgacaaaggaaagacagcagcactagaaatgtgaatttcactcctgtttctttgaacagatatctaggaaatatctacattcaagcccttcttctgtcacttacttagttgcatgatcttgaccatgttacttaactctcagcgtagtttctcatttctaaatgagaataatataaatacatattccatagggataatgcaaagattaaatgagataattcaggtaaaatacctagcacattgcctggcatgtaataaatgctcaataaatattagctcttagctatttttcattaacaagctcgtgtaattttagttcaactcagtaaacatttggtgcatatgtaatatatgaagcaccctgcactgtgtactgaggagaatacaaaaataagtaggagacagccttttcctctacagggtatatatttaagtttcttgagatctaagactgagcttattttatggcaataaaaagcctgaatacacttaatttacaaattaaactcacagtaattatctgtcaaagataaagtatcttcctgattcggagtggggtgggaaaatgtatcggttaatttttcctattttaatgaaacagaaacattttttgaaaaataaaaattcctctcttcacctcccttttctccttccgccaccatgtatatattccttaacatgtgttcacaagacagggatgtgtgaaaatagggctctgtctgtgttagcggatgcctttcatggggttaaaaaatattctactggcttttgtcacctaatagtacatttcgtaaaaagcattgcttaaatcttttaatagcaggcaagttcattttcacatagagggaaatccttgttttagttcattgcctttttttaatgttcctgtttggaaaaccatactcttagcctgcatttggtcagaccttttagaaaggaaaagtagaaaacaggagatcagcacagggtttacagaccagaaatctgcttggcaaaggagttgctgaagactgtggcgtagaagctgcagagaaagtacctttatgattgatttccattcaagtcagactgactgcagtgtggtcatttttctaacccataactgctcacactgcagcagtctgctatctgcagggtgtctgaattatagcagtctatgttcgtgttacctcttatacaaattacttacactggtttctttttccatgcaaattcatcagttttacagcctctcacagccacagtcaggaaactctggcagagagcacaaattgataaaatgagttaatttttactatacttattttttttctttctaaaagccctttctcataggcagtgttcaggaagcatattacggtaaaagggagataacaaaggagttgaattttcttgccataaattactttccaagttaattccctttaacgatgattccagatttgcttgagttttcatagcattgtgcgttttacaactgtgcctttgatagaaagaagaacaagtattttcccatgttcagtccctttgtgccagtgacatgaactttcttacaagatctttgccactggaatgcaaaacaacactaaattgtgctgggtccatagaactctgtgctgctattggacttttcccctcccccggtcttcaaatacaagttcccaaagtctcactgagtgttttagatcatgtaatcagaagaaaaatatctctccattttttcatatttgtaagttggaaattgagttgggttacttattgccattctttcatattcctcggtggccatacagatttgaagaagggacaataatggtcagtctctgaaatgtaagccccacaagggcaggggttttctatatcttgtccactgatgtttctcaagcatctggaatgatgcctggctcactaaaagtgctccataaatattgttgaattccattgaatacagcctctctgaggatatgtactattaaccataggctggacaaactagtcatttcgttaatgctccctgctgacttccgttgaacaagttggaaacttagcacactgtaatctctcaggcagagtagctcaaaaatttgtatggaaattttttccatcatcctctctttccaacaatgcaagcctgagcagcttgtctctggtggatggcagaagttcaataaccacaaccttatccaactactaatgtgtacagaagagcaggtcattaagagggttggctactaaaataacccctttcttccagtagcctacattactataatgattccttaatagcaaaccatttattaagaaatgacacaaagactacattctacttatgacaggaaagaggcaggggtagaggatgaatgacttggaagtaatatttgaagagaccatttccaaaagttaaccttttgagaaaaactcctcgatagagcaaaatacttcagattcgttaattacaatactacttaagaaaattgaggagccttcaacacaatttatatgtatttatagaattctgagtttcatttggtattgtttaaagtttagagggggcaaatagggagggtaattattcactcttcttaattcaaagcatatttattgatgatcaactgtgtacacaaaactggtcaaagggagctctaggacctgtaggattaaagtcatgtgtatcacctctgacttcatgacctgggagagttatttaacctctttgtgcctcagttccttcctggtggtatggtgaggatcaggattccccagtgctcaggctgcagactagtaccagtcagtggcctgttaggaaccggactgcacagcaggaggggagtggcgggtgagtgagcattgctccctgaactctgcctcctgtcagatcagtggtagcattagattctcctaggaacgcaaaccctattgtgaactgcacgtgcgaaggacctgggttgcagcctccttatgagagtctaatgcctgatgatctgagggggaacagtttcactccgaaatcacccccctactctgattcatggcaaaattgttttctatgaaactggtctctggtgccaaaaaggttggggacttctggtgaggagtaagtgggatgatgtgcttaaaacccttagcccaacttctggttcataaatgatgcctaataaatcgtgatggtgatggtggcagcagtggttagtggtggcagttcatttttgccataattattattagaattatgaggcccaaagagttccagtgacttaatcaagtaaacaggtggtgattggcaggattgggaatctagacaatctctccccgtcctatactagcattttttatgccccatgacatctctttataaccttcaaaatgcatctcaacctagatagggagaaaatgttacatatgagacaaagcatgataaagcccagagtcaattacaaatggagcaaaactggatttcacaataaatggaacagaaaggcagtgctgtgcttggtccagtcctacctaacatctccacatttgattggcagcgactgcatcgtttttatagcacaccagaaggcagttagtctttaacctcaaaaacccaatgtgataacctgggcaggccagaatttatgtgacattggacaaatcatttaaccttccacaacttttattagtttcttaattttcaaaagaaggacttaatgccattattagttaaaaagtatactgtgttacatacatcttattgatattttatatttgttagaagaatatgatcatttatttatgccctttcaagtgcacaattgggaacaggtctttgagacctgtttgctctcctggaggaggtgtcaaatttccattgtaaaaattctattttctttcccagcagcagagtcttggcctccattcccttctgctgggacacttgcatcaatcttctgatttccccacctccagaatcttagcccccttccatgcattctgaatatggttgctgtgttagtccgttctcatgctgctatgaagaaatacccgagactgggtgatttgtaaagaaaagaggtttaattgactcacagttctacatggctgggaaagtctcgggaaacttataatcatggcagaaggcacctcttcacagggcagcaggagagagaatcggtccccagcaaagggggaagccccttataacaccatcagatctcgtgggaacttactcactatcacgagaacagcatgggggaaactgcccccaagattcagttatctccacctggtcccacccttgacatgtggaaattacaattcaaggtgagatttgggtggggacacagagccaaaccatatcagttgccttgtgattgttcccaggtccacagtgatcttatcacttccctattcagaaactgtcctggatcccacttttttttttttttttttttttttttgagatggagtcttgctctgtcgcccaggctagagtgcagtggcacgatctgggctcactgtaagctccgcctcctgggttcacaccattctcctgcctcagcctcccgagtagctgggactacaggcgcccaccaccacgcccggctaattttctgtatttttagcagagatggagtttcaccgtgttagccaggatggtctcgatctcctgacctcatgatccgcctgcctcagcctcccaaagtgctgggattacagtcgtgagccaccgtgcccggcccactttgcttcttatctccaaacttatgcacatactttgtctattgccaagaaagcctctcctgtgtcctgtgcctctttaaatctgaactatcctcgaaggctcagcttaagtgcccactcttcctggaatcaaacctttttctgatctcacaagccaatgggatccatgactcctttgaactttcctagcacattctttgcattttttcctatgaaatttagcatgttcggcattgcattagatattcaggtattattttagtattccacttaggttgtaaaccttttggggacagagacactgtgtatctttttatcatttcaagtttaagacaaatactatatgtgggagtcagtgtggcgcagtaagaaaagcccaggttttgaggtcagtatccttacattttaaccctgactctctctttttgtctttttgtaatcgaggacaagttatttaatctcacttcaaggcttcgttctcctcatctagcaaatgcactttgaggtttgagaatgaaattaagtacagtaagtacagtgcttatcaaaacatggcatcatgggtgctccaaaaagcctgcctaaagcccacctcttcagttcttcatgacctgccaaaagctctttctgttctccagattagaggtactgagaatacccaacccaatgcaaggatactttgatagggactgctcccctcaagtgtgaagctttctctttggctgtgacagtgtcactgagtcagaatccaacccaataagccaactgtccatgtgattcatacctacaggcagttgcagggggatgttcctttataagactcttgaagaaggcagagtttgggtctgtgaattactaggattatttaactcagggtgtgaaacccattctcatttcagaaacttagtgatgttttaaaattcaagacacacataaccagtttgccaagctctcaagttactcatcagaagtctgatagacactttcgggacgtgccaggccacctggtgccatttgccacattacaattccagtgtacttaagtggttcacaggaagtatatatatgaccaagctaagcccgtttatgtgggcttaattattttttaacatctggaaggtgggcacaccatgtttacacaggcttttctttttcttcccctattctggctctcttgacatttaaaaaagataaggcaaaagacatttttctaggatagataaagtattaaatttaagtgcagctggatgttcaccacgagctaggaggcctcttcttctctccgtctgatcaagtccctcacattcacactttgctctgtgttcctctccttccaagagcgagggagtgagggccagacagtgtccgccatgctcaggaatgaaacggcttctccacccagttgagacctcatctcccttctgacatttgtgaaaaacatctaaatccagagctatgacactgatcagccttataacccttctttggttaatgagaggtgtgaatctctaatctccaggaaggcacaaagcattaagtacctactgtatgtcagcttgctgggagtgaggatgagtgatctaggctcatatttgactaatctcccccacccttcctccatagcctatttcatacataaagattacctaataaaagaggaaattatgcaaataaatttaatataaaaagcaaattagggaatgactatcagaattattaattagaaccctgtttacacttattgtcaagcctcaccgtttttttttaaacgaaaggcccttagagcctgttactgagagatgtgtttgaatttcagaaagtagatgtgaatttcagtcttccattttttttagcagtgactgtttttgtatattgacagttgtgattaaggtttattcattggtattaatcaaataactaagtatttattcttagaaattgttttatttcctcataccgtccctcgattccatagttccattatggcacctcaattcacctggtttcccaagtgctaatcgtgggagttatcccatactcccctgttcccattattacgatagtcaagaagtcagcatgtcttctttttatttatttattttccaagatttttattcgagatgggttctcactccattgcccaggctggagttgtagtgacatgatcatagttaactgcagcctcaaactcctgggctcaagtgatcctcccgtctcagcctcctaagtagctgggactacaggcacgtgtcactacacctagctaatttaatttttaaaaaaaatattttttttttctgtggagacatagtctcactatgttgctcaggctggtcttgaacttttggtctcaagcaatcctcccacctcagcttcccaaagtgctgtgattataggcgtgagccaccacacgtgtgcccagccagtcagtacatcttgattctaactcctgaataacttacatcaggctcctcctttccatcctttgagtttagtccccatccccactataccttgcataaatgccccagtggactctctggtttgcctattatattcttcaagcgccccccaccctttcacctccatgcctaccctcatgacagactgatctttctaggtgataaatgcaaatttgatgatagcattcccatactttgctggtccttctttgactattgaatacaactcaatgcagcaacccattccattgaccagtgtttactgactgcctcctggtgtcagggactatattagatgctgacagtataatccccagttatagtggggtgaggtagatgctttaatagcttataaacttgggaatctgctgaattcaaatttatgttccttaaataaacctgccagatcccaccgggcacatgttggctcatgcttgtaatcccagtgctttgggaggcaaaggcaggaggatcgctttagactggaagttcaataccagcctgggcattatggtaaggacccatctctacaaaagaaatttttaaaaaattagccgggtgtggcgtagcatacctgtggtcccagctattccggaggctgaggcgggaagattgcttgagcgcaggagctggaggctacagtaagctatgatcacacctctgcatctgcacttagcctgtgtggcaaagtgagctcttgtctctaaaacaaagaaagaaaaacctgccagatccttcataacctgaccttaaccatccttcctctttcccgtgtattctacactatgtcatcataccaagctatcagaaatccagtaaacattttctgctctcttgatgctgtttcctctacctagaagtcctccatccctttcagttgcataattcctcctttccttttaacattgtttccaggcttcacgttttctgaggccattcccttgaacttcttatccccaggttgggttagataacccacttctttgcagccacttcaatttaggaatgcagatggtccccaatttacaatgattccacttaaaattttcagctttacgatggtgggaaagtgacatgtgttcagtagaagtcatacttcaagtagccatacacttattctgtttttcactttcagtacaatattcaatcagttacatgagatattcaacactttattataaaataggcatattaagtgcattttaagctgatgatatttttaacttatgatgagtttatcaggacatagcctcattgtaagttgagcacctgtagctctatcagatgacttcgcagacttttaaaaaattaatctgtcagactttcttttccgtttaagggtagggaccatgtctttcatctaagtgccttcctcactcatcatagttcttggcagtagcaggctctcagtaagcattcattggatgtacaaatgtccctggttcatgataacccttattgttatttcttctgatggatactaacctgtaatttatttattccagtatcaaatcatgtgggcttagctctcaaaccagtgcctcagtacagtatctattgttcctgctttgacataacctttcaaaaagattatttgcactaataatttacaccactaattttacggagttgttttatagaattggtacttgttatttgtccattggaaaacatgtattaaactactgtcaaaaaggtatctaaagattcaaagacagaaaatgcaaggaatcagtctcacacaagggtcatttctgaaaatcacaaataatcaaaattaaatcaaaggtcagaaaatcattttataagaggccagctaataaatatgttaggctttgtgggccatatggtctctgttgcagctactcgtctctgatggtgtaatgtggcagcagtcatagacaatatagaaatgaaaggccatggctatgctcccgtaaaactttattcataaaaactatgggcctgccttaaattacaaggttggacaaatattcagttaaggtgtatgcaagatggagaggtgattcagagtaaagagaaaccacacatttcatgttataagaaactgggaatggacagcttagaaagatgactttgttctcaccaaagttcaaaacagaattccaaaatacagatgagtagaagctgtcaggatcagataaagttagaaaagtctaaagagtgttttggctggtcattccagaaaagtgtaagaccaaaatgtggggaagtatttttgttaaaagcatccaagaatgttgcaaccttggtgacaatttactattacataaagagaaaagatgaaaaatatattagaaaaaatatgcctttcctgtatagactatttttagtcaatattcctttggagtcatagtttattactgattattttcgattcgcttacatataaatgcaaaaagaaaatgtgctaaatgcaacactgaggatgctgtcattgatttttttatccacagaatttaactgatttttgtttgttttcttaattctagcaccaatagctgcaggaactggcccaaatttttctctctcagatttggaaagttcttcatactacagcatgagtccaggagcaatgaggaggtctttacccagcacatcctctacgaggtaattttattggcagctcttgaagaaattatgctacatggttgcacaccttgattttaactctgggcccactatggatttagcaatgcgcctttagtaatagaagataacaaagtagtgggttcagccccaaaagactgtcggtctcgttggggagataaagcaaatatgcatgtggcaagattaaatacacacacacacacacacacacacacacgcacacacactaaaaaactgtgaactaaattgtgtgacacaggctaaaaatagttaaagagagctttatgcaaaaagaataccttgtttccagctctaaatgttggttagggttggtgagatagaaaggaaaaggaatggaattctgggtggggtgaaaaatgagcaaaggcttggaggaaggatggatgatgaacataacatgttctcaggaaatgaaggacaaggctggactgcagcaaagggcatatgttttggcttgtttggcaggaagtgaacactggtgacagtctcagtgtcatgcccacagcagacattacagctcagtgccagctcttttcccaccgagcccccaaagctctcaatatccagtttactggagttgccctaaaaggtgaaacccatttgatatcctggtgtgaggttatacaaatggaagtagtcacttgcataacctcaagtgagggtggggccagaccacagaccccattgtattgagagaccttaaaaacagtaaagctagagtagtgtaacctgataatgattctggggttcttgctccctttaacgtcacaaagccaaaatcaaaatgaagcatttttgcaagatcgtgttgtctctagataacctgtaccagagggaaagggattaggcattaaacccacagtattcttttacaaattggctttagcactggactgtgacaacaaagaatagaatggtacagaacgatctttaatgtttgtgtactttgcagaaaaatgtctgacaaaggtatattcctcctaaagcaagtacctgagtcttatgatttaaaacaatgcccaaattatagaacttttccttggtgcacactcgttcttaccttgcctttatatattttaaacatcactactttaaaaaaaagatcaacttagtcatccctaataccttgaagacagttaaagaaacaggtattcccttaatataactatcaaatcctaccatcatctttcatgttgtttaaatgttccctttagttccctgtagtatcagctcctcagggggacaaaaaagtcacacatccaaagtatatttataatagaagaaagagattgtgaatatatttgggtgttcatacattttgaggattttgaatgtttgctgatgggagagaccttgtgtgtaactgtactcagtcaacatgaaaaagctttgcaaatacctgtgggcagtgattaatttaaaagtttatgggctgtttgtttttcatgtgtgtgctgtatgtgtaccatgtacctcccaaacagtgtttccccctttttatgttttcacacaattctccagctatgttttattatcttttgtgactctctgagaggaaagctcattatgaatgtcatttaaaaggccagtgtcgttctcatattctgcaaataactaaccctgataaggagctaattataacctgcatcagtagttaataacccggtaatatgtttgttttactctcattaggctcttcctaggatgatttttaaaattctttaaatacatagattcagcagaattaacgatgtacaggttagaaagtgtgcccagaagaatatctcagatttatatatagaaatgttcaccgatcaatatgtcttcctgctgtgccaatattaatgggtcattttctctgtggcaggcaccatattaggtgagttgtatacctgttctgatttattcttcacaataatttgacaacacacacagtgttttcatttaaacagtggagcaacacaaagctcagagaagttaagtaacttgcccaaagtcacagtcctagtgaatagaggagtctccattcacactcaggtctgttggaactttaaaaatatgctcttttcacacagaatcctcttgagaataggactgactcttttagtaaggaacaacagaatatgaggtcctaaaaaaggagtttctagcatctctattcctccctggcatttagtgtttgccgtcttgagttattcttaaccatctttgaggccaacacgtgtgcagcctccccatctagacagtgagtcccttgaacgacagcgtctagctcttcccattcagcagcgaacgttattagtaagaaacaaggacaccgtccttggcaccatgggtgtaaagtcaaataagaggggctttacaatctagtggtagagactgagaagtgggaattttcagttcagggtcctatgaacactcaggaaagttaaggcattttgcagtcttaggaatgctaagtaagacttctaggccgtaattacacagagtaggaattaagatatttggaattagggtaatacttttaccttattttttagatataattgctagaaatacaagaaaaaattccacatacaagaagaaatagtgcatcactccttaggagaatattcatccttttcgtgtagatcttacagatactttcctgcttccctcaagtgtttctgggaaaatgagtgtgttagaaagagcaagaaaccaaaatcaatgactgattcatttcaatagatagataggtaggtagataatgtgatgcaatggtactgactgtaagttctgtaccccttcagggtaaacatcttcaaaatcatagaaagagcagtgtaaaaattgggatacgatacattttttattccaaaaaactttatcaagataaaccagctgtcaaaagtttgtgaagtcagagtaaagttgtctcggaagcctccacctgtgcttcctaacttgcttcattcctgatctttttatcttttccatgctccctccagatgttaatttttttttttctccaatagagacagagtctctttctattacccaaggtgagtgcagtgatcataattcactgcaacctcgaagtcccgagctcaagcaattctcctgcctcagcctttgaagtagctaggactgtaggcatctgccaccacacgcggctgatttaaaaaatatttttttttgtaaagacaaggtctcgctatgttgcccacggtggtctctgaactcctggcttcaagtgatcctcctgccttggcctcccaaagtgttggaattataggtgtgagccaccatgcccagccctcttttgtcaacttctgaaaatccttgctttcaaactaaggcatcaaccgatagctatagaatctttcaactctaggatttaatactggcttggggtatttgcattttattagaggatgccaaggaaatcaaaacctttaaaaactcagaaaagtatcaataatgggagaatgatggacaatggagttggcctttggggctagatctaactgaattatacttggatgaatccatgtcacatgtatttgtatggctgtttctaagtcagtagcccaattcagcagttttttagtatcttctgttagccagacactgtggtaggcactagagattaaaaagtatatagtcattttccctgaagatcttacagccccatcagaacatataggcttctcattttatttgccagagtacttcagggaaatgtttatttttttctaacatgtattctttctgtttccaagatgatttccagtggctttccattttaaaacaacaggtaatattaaatgtagaaagaggccagaaaccatgtggaaaaaaattgttatagcaggagcctgaaccaagagttatgccttaagtttagccctgagcttcctggttgccaaggcaaaaagggttatatagtttgcatttctaataaaaggatacaagataaatttgttcaaagagaccatatttttctgattatgttttgtaaggaattcgctgtgtatatcgtcttataaaggactcccattagatgtagttttacataaaatatagaaaagttcttcagtggctatttttcattgaactttcaaggaaagcccagcaaagaacattaaataagcattaaaggcatttcctttgagtactaagctagcatggcacagttatgttgctttcctgtggtctggctttaatgagaatagaacttaatggctaagaatactggaatgccaacattaataattagaatttcttgccataaattggccctccacattttttcattcagattgctgcaatagcttaactgtctccctgccctaggctccattttcctgttttcccctttgcctttctaaatctatcatctgcacaattaccaaagtaacttttctaaaatataactcccctgtcattccctgtttagattatttcggggagtctacattgcttataggagaaagtccagacgtgcaatatcttctataacctccacccttctcactcgctgtgccccttcttccccacctcagccatcctaaacagctggcagttctctgaacatatcacacttcactcacaatgtggcttcttcctgataggctcctcccttctgggggttatgttcgaaatatctgataacctgtgtgacatgagcataccaattagaacagacactgccctgcttgcagggctttctttggctaggtcctggaatgctcctgatctgcaagacattaaccctttagatttcggactgtgagggtgtctgggacaaagaaggggaggcaaggttggaagaaatgtatggagtttaagacaatgacagtttgcccattgataatatttttaataccaaatggctgcctgagtggtacatcagctgtagagcagccctgcctctgccctttccttcattcttccctgtctccttgaccctcttgaagatagctcaggagccatttcctccaggaagcctttcccgaacccctggctcatcactgtctccattgtgtgacccactgtaccctgtgtgtggttccatcataactcctatatttctcttttgcacagttttgtttgcctctctgtctccatgtctgactcatctctatatcccagcactttgcacagcacctggcatgtaggatgcgcacagtaggtatttcatgaatgaaacatacgaaaacttctgtcccctgaaacgtgaagaagagatttcccaacacgcactcccagtagatatgaaatctactcatcctaataatatgggtagatttgacagttttatcacccctgcaaacttcctgattctgtggcattcaattaaaacaactacagcaagcatagcagcaggcggcatttcactacgttttcactcctgaagcctcaaactggggagaatattcagtccttcaactggaaaaaatgagatatattctgaaagtttcttgaccgtacctctccaaaaaatgaaaatccctaccctgatggaataaaactttgttttgataatctttgcatagagaaagcacataaaagtcattgggccactctttttttatgtctcttgttctcaggggacagagcactccttcttccttcctttttatttgttttgttcactgatttatttctagtgtttagagcaggacctggactagctgtgcagtaaatgtttttttgaatgaacaactccaagtggaagatgggaaaatgtggcaaaagaaaaaaaagcaatccaaacttttcattttcttttcttttctttctttctttttttttttttttttttttttttgagacagaatcttgctctgtcgcccagggttgagtgcagtggcacgatctcggctcactgcaacctccacctctcaattcaagcaattgtcctgcctcagcctcccgagtagctgggattacaggtgcctgccaccacacccagctaatttttgcacttttagtagagataggattttaccatgttggccaggatggtctcaaactcctgacctcaagtgtgatcagcctgccttggcctcccaaagtcctgggattacaggcttgagccaccatgcccagcccaatccaagcttttcctgaaggatcacgagccctgctttttatcctttctgaggttccagcagggattaaattgatgcccaggttcattgctgatggccaggccccagccaccacctgtggagataggaaatatgtggccttactcccaacacttccaggtggaggcaggagctagagccagccgcttattcctcaaaggaaacaggaacaggatgtggcagcagcagcaacttgattgacaataaaaatcaaactcagacacttggaacaacacagacccaagactttgttctacatccagtgactcaccagactgaacagaagtttaaaaggagtcctagaactacattaagttgcccaattgcttcctcccttggctttctttcaaccagaggtgcagtgtccaagagaaaggtggttgcgattgcttttaaacatgcacccatttgttatttcagctccacaaagcgcctcaagtctgtggaggatgaaatggacagtcctggtgaggagccattttatacaggccaagggcgctccccaggaagtggcagtcagtcaagtggatggcatgaagtggagccaggtaagcagagtggcggcacgggcatgtggctaacactgtgaaactgaaaatacgtgtggggtcccatgccacgcataaaagtgaagaaagaaagctcaaggtagttcactttttcaggatgagcacttgtttgtattgtaatctgattgccacattcataaaaggatggctgtgcaaagcagtagtaattcaactgaaatgcaagactggtgagatggtgtatgattttctgctcttacatattttcccctacaccacaatccagcatttgatttgcttttggtttttttgtttgttttgttttgtttgtttgtttgcttttttgagacagagtcttgccctgtcgcccgggctggagtacagtggcatgatcttggctcactgcaacctccttctccctggttcctccttcttctgcctcagcctcccgagtagctgggattacaggcacctgccaccacgcctggctaattttttgtatttttagtagagacggggtttcaccatgttggccaagctggtcaatttttgtatttttaaaagagacggggtttcaccatgttggccaggctggtctcaaactcctgaccttgtgattcacccacctcggcctcccaattgtttttgtttttatactatcttttggtttagtttttgaaattatcttttaatcctaataaaaatctatcaactttttcagcaggatcgataacattcgaaagaagaatgggttccttgcgatagtttagactcagatttttatataataaggacactttgcaatatttttcctattactggatatcatcatgattatttttctatttaaatggaacaactctctttattctgatctgtactaaactgaacaaatgatgactgctggtctaatctcctggggtagtctaatcttggctctggagtcttgggagtaatatggataagtctgattgcaaaaactatttgaaaccctttccaatgtctaacacgtggtttagagggaatcttctccaaagcttcctgaatatggcaagtccaatgggtataaaggatagagtatgtgccttgaaatcagacagttggagtgccaacctggcttcaactcctgctggctgtgtgattgtgggcaagttacctagcctctctgagcctgtgtctccctttttataatctgacagtactaatagctatttcctagcatagctactacctagcatagagtaagtatgaaaatactgttctatggccatccttccccagcttttgcttcagagttaattccctgcaagtacagacgagcaccaagaaaatttctgaaccaacctcttcatctataaatcctagctcccttgtctcctcccttaattttttttcaaaagacaatgctcaggggatgtgactataaaggtgtagcacggggaaaatgttggggtgatagaaccattctgtatcctgattgtggtggtcacagtaatctatacaatcgttaacattcacagaagtacatacctccctgctcaagttaattttactgtatcataattaaacacaaaacaaaaacacctcaggcccattggcggtgtcttttatcttgcccctgctattaaaatgcaaaaatgtctctttgctttgcttctgcctagtctttcattcattcactcattggatagtcttcactggggactttctctgtatgaagcactatgccaggttctgggaactcaaggatagatgggaagatgggaaggttatggcccctgctctcaaggaattcacagtcagaggtgggaaacaaacacataagcagaacattatacagtgatatgggaagcgcagagatggtggtgttagtcttccgtgacttctgtttctaattagtaccaaccacagcactcaaggtgtggtggttcttctatgaaggtcacacatcatcttttctccgaattcgtgttcacatcagtttgcctaaagtgcctaagaaatagtcccagccctaaatgagaaggaaaatgctgactctcactgccactacccgcatcatcagcatgacctctatatagtgccaatgaaaagtttatgtgctattaaaaaattaaaagatggaaaacttctttgaaccctttttcaaaggctaattagagccctagtcaatttacctgcttcagtgaaaatcagaattaaacatataggtttggtacatttgtgcttgattattgtgtagatgcatttttgtgcatattgaagctgctttattaggttgaggtactcagagctcccccatcatgaggctgagctctaggtccttgcatttaattcctctgggtatattgggggctgtggaggttgattgataattacagaatattttgacctagtgactcttttattcagggcaattcctattcctatctgtacattatgattcaaacgatcataaattttaacatttgaatacctgaatcctttgtagtcattaaataactgaagtttaatggctgaatcctttttggtaagaggtgtgtgtgtgtgtgtgtgtgtgtgtgtgtgtgtgtgtgtgtacgtacacatatatattcttagagaatccctcacagttgtattcctggactgactctccattctctatccccatttcattacagaaaaatgcagtttcatggtatatgtttatagggagtgatagaggacagtggataaacgtacatttggccatactcagcaagcgcagaaagtcataattgcaacaaggcctgaggggacattaaaactcaactgaaggatgttgcacatgttcttggtgactttggtgtcattaactcacaccagccattttaaatggataatttatgctgccagatggtcctttttggggattttccataaagcccaatcccctttttggcacagagagcacctttatgttgttcccacacttatgcaggcctgcatagcttttccccaggggtacagttaaattgagtaggaggcttttagtagttcacatgtaaattaccttcagaaatatgttgggagttatgtatatctgaatgcaccagcagcctcttggttgcctacatttgggataattctctcaaacaagtactaaggatactgtgtttaggcctcagatgtgacacaggaagcaaggcctgtacctgctcctcactcagaatgctttggtttccgtttacctgccttaaaatgcttttccaggactccctggccaaaagagggccaaaggttgccagaagagacaaatttcctagagcaacaggaagattgtggaaagtaaaacaaaccagacatgcagtaaattacatgggctatttcaaatgtcttttgtagtatcctgttccccattagtttatctcagcacttttagtgcacagctcttattatctgggaagaagggcataggagattaaagatgatgttagtttaaaaacatcagacaacttcagaatgactttcgcttctcttacaatgctgcatttgtctctcgtacttagttttgtttcccagttatctcaaaactgggttagatacgaagctttgaagcaaatcatgaattgacaaaacgagtcctatgaaattctatcaagcacaaatgcacatatcatcaactcttgtttatctgtacaaatgaagaattacagagaaattgataatgcagataaacaggaaagaaaccaatacacagcgcccacattgggtcagacactcatgttgctttcaaatatatggaaaaattctagttacaattgagtacctactgtgtaccaggtttttaaaaaattaacctcctttaaaatatgcaaaatataatgatcctgcctctaaagagataaaaactgagactcataaaaggtcaagtgacttgcccaagcccacacagatagtaaatctgtggatccaaaatccatatttgaaaccaaatctgacttcatagtctaagtttatcttctacactcagtaacctcttttaccataaacatttggagcagcattttagggtctcatgtcctggactggtactttagttaaaacgttataaagccgggtgtgatggctcacgcctgtaatcccagcactttgggaggccgaggtggacggatcacctgaggttgggagttcgagaccagcctgaccaacatggagaaaccccatctctactaaaaatacaaaattagctgcgcatggtgctgcatgcctataatcccagctactcgggaggctgaggcaggagaattggttgaacctgggaggtggaggttgcagtgaaccgagatcgtgccattgcactccagcctgggcaacaagagcaaaactccgtcaaaaaaaaaaaaaattataataagaaacaataaataactcatgagagagacctgaaaaatattcgattttccttatcccaaagccttgtaatacaacttaatctagagaagaaatatagattattaaatatacataggacacaatatataagcaaagagtattaactgttaacaaagtaaactatcgttttcatttataaaatcaaataaccctcagcagttaggtctttgttcaaatagtagctcatcacacaggccctcagtgatctaaaatagctgctgaccctcactccatcatcctataactcacaacactgttttgctttctttacatctgcatctactattttttttttttttctgagacagagtcttgctctatcgcccaggctggagtgcagtggcgcgatctcagctcactgcaacctccacctccgggttcaggtgattctcctgcctcagcctcccgagcaggtaggactacaggtgcatgccaccatgcctggctaatttttgtatttttagtagagacagggtttcatcatattggccaggctagtctcaaactcctggcctcaagtgatcctcctgcctcagcctcccaaagtgctgggattaccagtgtgagcccaccacgccaggccatctctctgctattattgtctgttttctctctctagaatatatacttcatgaacagtgggacttagtctgtcttttccattgctgtatctctaacatccataacagtgtctagcacataataggtattcaataaatattgattgaatgaatgaagcgataaagcagagaatttggggtgctttcaataaacttgaaagcagaatttgctatcaagaatactctcagaattggtgtttactacactttcaatttgtaggctttcagtcaaatccaattactagcaagtcgtaagcagaacaattgcttaggctcagccaaggacctcttgacgagcagcagtgcattgactttattacaagtatccctcacctgaaagtgtgttcctttaagtgaatcaaaccttttttaaaaaaacaaataataattctgtattatttctaagtttgttgtttagtattagctccgtattaagaatcccaacagtgaatcctttgtagaacattttatgtagtatagacaacctccctgacttacctgtgaaaaattcagatttccataccaaatgttctcttctacaagtgtaaggagcacccatatgagacacttcagacccttgctgctccaagtgtggtctgaggacctgcaacatggcatcacctgggggcttactaaaaatagagaaccctggccgggcatggcgcccaaggtgggaggattgcttgaggccaggagcttgagatcagcctaagtaacatagcaggaccctgtctctacaaaaaaaaatttttaattagccatgcataatggtgtgtgcccgtagtcccagctacttgggaggctgaggcaggaggcttgcttgagccgaggaactcaaggttacagtgagctatgattgtgccattgcactccagcctgagcaacagagtgagaccctgtctcaaaagaaaagagaaacaaacagaaaaacagaatctcacgccccacctagaccaacagaattttaacaagatctcccggtgatgcttgtgcatgttacactttgcaaagcactgatttaggctgcttttttgttcctttaggtgggttctccctactcagtacttgtctggaagccaccttaactttaaatgtcacgctgtccaaccattctctctatgttaaagtaggttctctttaaaacaattctagataggtagaaatctagcctattttcaaatagattagaaaagattggattctgggtgactctagatacctcactataagaaaaacaattctcttgtctccctctctgtcccatattcctccagtttagggcctgctgcatgaaaaggaatggctggtcttctaatcattatcattaaagtcaagccaagttgttgaatccttattaagtgctgattgtatgcagtatactagagtagatacagagaggactccagcaagtccctgtctccaagggcaaacctctgaatttcctcaagtgtcagtcactacctgtaaggtgggaactgttccttctgctccatctctgtcacaaagttatgacagatgaggtaatgaagtccaaagtcctttgtgaaaattaatattctctaatcacgtgaaatatcatcattaggattactgaggcagccaggcttacccagctgagggtagttgaaagcagacagggttaagtgtcacaggagtaaaagaaaagagctgttaaatctggagaataagggatagtttccttaaaaggtggcaattaaactggatttagatggaatcagactgagaaatgttcatgtctcacttgaaagtgagacttgtctcttagtcttttgattgttagtatatataaatttaagtcttcttcctaagttgaaaggcagctctgtggctgttctgtgagcctttctcaggttatatttgtccccgaagttaacgatttataccaggggtccagtgggcttcatggatgactgtgttgcaccactttcagatttgagaccgcatctgcattaagtacagacatatcagtaagttttggcagacctaaaaagtaaagcaaatttttttattgtaaaaaaaaatgaaattacagtacttttcagtgaagttcagtactgtgtttcaaatatatgcataagaagctacttaaattttctcctgtagaaaaacattcaaaattccaaatgccttcaattatactgggattgtaaaacaattaacagacacagttacatccaccaacatgttgaaagtttcaaaacagtttagtgaaagttttgaagtcaaatttgataaggaataaatttagttttatttttataaataacttttggagatacatttctctgcaaagagtaagttgttctcatttttgaaggtcaaaattaagtactttaggccgagcacaatggctcacacctgtaatcccagcactttgggaggccgaggtgggcagatcacttgaggtcaggagtttgagacctgcctggccaacatggtgagaccccatctctgctaaaaacacaaaatttagctgggcgtggcggcgccctcctgtaatcccagctactagggaggctgaggcaggagaatcgcttgaacccaggaggcagaggttgcagtgagtcaagattgtgccattgcactccagtctgggcgacaagaacaaaactcctgtctgaaaaacaaaaatgaagtattttaataacatgttctctgttcctatcacaatgattaagaaacacagttttaaaaaattgtttaaaggcatctgtcaaagaatatttcggtaaacatctggtcagtcagcgacccagggcattcagaactaggggtcagtgtcacaactactggcagcatagttgaattttgcagacttatgttagtcattgtaattttaaatatcacatattaggttcacctggattcccaactctgctggtcctaatttgactgccaacagtcatttatcaattgtaagagtggaggaagtctaccaacttagatttctagctgagacacaggggaaacccattatcagtgccagtaaaaaggcagcgactggtaacaatagtgctttgatcatggacactccactgcactagcatatattagagaaaatgattaaatctcccatcatctcttgctggagtaggaatagtcactgctacagaacattgccatgggatcgatgtcttggcttttcttctgcatttatggagcagtaggaaagcatcatctgggaccacatcctcttctatgatctcatattggcacctgcccattagagactggtacaccaggggacattggtacagtaacaaggggcctcttctttacgaacccttctttatcagagaaatttcacccaaataaggggttatgacaggaaagctgtattaccaaatgagcactgtaaccacccttcaaaaatcccttgccttctttatcaaggctgttttttcttaatgtcagaaaagggcctaaaacagctccttgtaattggagtctaaaaggttacctcttagaggaaaagaaatattcttctcatacacacacacatatactctgtgtatgtgttatatacatatataataaagcatgatccagaaaactgtttggattcctgaagcctctagtacctggcgacttagtagccattcaatcaatatttgtttaataaataagtaaataataagatggagatcacacacgtctcactttgtccttcgagtaggatcaagcgctcagaagcagagcgatgtatacgtttgtcgaacgaatgagcgttgctccgcttgcatcggagaacccagatgtacaattttgtgaatgcagaagctctcaggaaaacagatgctgcatttcagctggtcttgtctgaataaataaattacccaaatctccaaatttttaatttcatgtttgaaaatgaagctgtgtaaatattctagaaggggaggaagaaggagatgcagtgtatacattaggtttatatgtgaaatcctcctccctgtgcctgtcaccatcctcagtacagcccccgtggctcaggtggccaactcatggtgtggcttgggtggagcatactgtaaagaggaacattaaagcaaatttcattccaaccacagcaatcttcataggcttgctggggaggaagataagtgagaaatagaatgtattttaaagaggaaaaagtacaaattaagaattttaaaagttagtcattctcatattctgccatgagcaagcctgagaattttagcaaactacttctctgaattttcatttcctcatatgtaaacattgaggacaataaaacagccttgccttcctaactcatagctttgaaaagatcaaatgagatgataagaacaagagctgccatttattaagcatcagctctgtgtaaaagtatcgtgcagggcactatacatatttttaatatacgcaaagtatatttaataaatcaaaatgctgtaaagaaatactgtatatcctttttagggggtaaatactttgaaaaccctaaacttactgtatgaatttaagatactgtgaaatttatttgataacatatattacacctctgcatctattatatgcaaagcactgtgcaaaaatgatagaagaagtatgaaaataagcaaaacagaacttgccttcaaagagcttacagcccagtgaaggaaggaagggtaactggttaaataagtacccaatggctgtaatagataagatgtagagcacagcaagcttcatatgggtgaggagtttattcagcggcttagaccacagtcctctgctgtgcctgcttaaaatagctggtgcatcagccatttcatcgttaaaggagcagcagtgaatactggcccgtttccttcgtttcgtaatatcagagtcgaatcttactccatctctaagaagcttctagagagctgacatactaggaagtcctcaagaagtgcatatacaaaaatacagtttatcatactatactcatggacccaaatctcccctgcctgaaacagacagttttctgatttgtagataatagattgggtagaatacaagcaaataatttacttggagggaacaaaattaatctgaatggagattaaattcaccagagggtagaataaccagaaagtgtagttggaagaggaggaaggaaagaaaaaagacagagcgatcattgatagaaagataatagatcagacttacctaagagtataccatgttttcctatatctaatattatttaaatatttatagaacttaaattgaaggtagttttaaccatagatataaagatgaaaatactttagtgatcttacttcctgcgttctatcatataaacacagtgtagctattttatagactcaagacaagttgattaacaataaatatatattggcttgtattttgtcactgctgctgaaattttaaatatataagcgttttataagtaatagcaataactgatgtttattgagcacttactatgggccacacattgttctaagctatatgcacacatatataaatatatatgtgtgcatacatatacattcatttaatttgtaaaaaagtgataccactaatactattgtttgcagacttatttccctctctcatagggtcttatatttttcctacatactgatgattctctttaaacgttaaataacctaatatagcaccatcagtttatatggaaataaagttctgtggtttttggccatcaatgtttttaacaaagtagtttgttaacactccagaataagtggcttttacatggggaattggggagagagggaagaaataagtccttggtctgtgcagatcccagaagtcaatcaatagtgtgtgcagcacgctgctgtgcagcagtttctcatgaggctgtgcacatcccaattgctttctgctcagcagaggattacaataatgcctatttatccagctctgtccatccaaggattttagatacatcataaactcatcaattaatcagagacatggcacccatttcaaaatgctgggagaattacatcctggaagattacgagaaatgctcacgtcgacagagtaaatcaagaactatttcctgatggattcctgaatggcacaccaagtactgaaatgaagagggctgtctccagcactgattcacaaagtatatctcaagtggaagaaaacttccggaataaaacgtcactttactttgaagcatctgttaaacttgaaaaattaaactgaggtagaatggcaaagctcattaaatattaatacaattaattggcttccctcttcagagtaaagtatcactgacctccctttcttaacaattaaaacccctctgaaacctttgggttttttaaatacagtgtaactttggttcttgattctctggtctttgtcaagtgaggaattcttcctgtggtccagcacgctcagcccactgtggggaactggctttccagacagctgtgaatgttcggtatttattcagacaatactcccacactttgatgatttactgtggtccaagcatcttgttcctcattttgaagaaacattccagtctgtaggtatcgtctactttgtatgtaatgagaggtagtttaaagttttcatttgcgtagctggaagtgcactcacgtcattagaaattcaaggaatggcaactcaatatccatttctaatctgaagggtcttccctgcccctgccatgttagccccacccagaaatcacttaactatgattagcttccaagattagtgaattctaggatagcaggattacttatgacttaatgccagtcagaatttgccatctgcctttcagccatttcatgaacccagcagaagagagcatttatcaaaatggctgtgcaacacccctcatgtcttaacactctttagggacttatataagcaacacttcatgttcgaatgtcaaaatccacgtgtaaggcttaaaagtagtatgggatgcttaagaatgcttttcagggccagttattctttgatatttatcacttcatggtgctgacacctgcttctaattttaagagttcgttcttccagtggatttttttttccttcagaaatcttatcctcaaaagacttaactagcaatttttctttttttgatgtgcttgatgttttgatgagtttgtctatcagcattgaaaccttaacatacctttcatttagaataaaaaaaaatctttgtgacacacatttattatattggatcacataaatttttgccctggcagtacattcgaagacttttgcagagatataatttattagaaatgtcattatctgccacttggcctacttgatagttgtcttaagttgacaaaagctatagacatagataaagtcttccttgagggagcaattcagtaaataactttcacccaatacccttatttggttgtctttcacacccaagggtcaggttggtggcaattgtcatttgagagttagtaagtggaaagacaaagacagagaggaacctagttttgtctattgagacacatatggaaatagtcctttggtttgggtgtagccagcctagttgtagtgcccaatgtggtttgctttcttgtttttatcttgtctaaagacctttccctcacaagtttcctcacaagtgctggataaagttcattgcatgagtagaagaagccgcaaaagatgatatatagctagcaacccgttctgattggtctatgaagagttgcctgtataaaattggatccttgtgttcggttccaaaaaaaggtgtgaatgtgaagaagaagtgttaaatcatgactccagagaaaatgtcggccatgagcagtttttagtttaagtgaaaaccaaactttaggatttggacaaataagatgaggagaaaaaagggtgaatcattaactccaatatgaaaggattatggtgatcaagtttcacccaacttgaataagaaacccaacaaagactatgactgatggaactaactcatttacttaattgatatgccaaactctgccaagcatttacccttagtgtcaaataagtaatttttaataaaatatttctaagatatgaagacagttaagaaaatagcatgctttttaataattgtactcataagtaaatggatcattacattgtcacaaagaatgacagtgagcagaaacagcctgctaatccctcttagataagtatttaacataattagacagacaccatctcttctgttgaatgtagcattaatcattagaagtgcaactttacacagcatacttgtttctgatatgtcattgttgttaaaaaaaaaaaagcaaactattttgtcagatacagtgcttcagaaaatgactcatgtagttgtgtgatttacataaatacagttatttccctttttattgttttttgtttgctttaatagtgtttaatagtagtgtggtccttttacatccatgaagctgcatttgaggtaagtggttcatacattttgttttgcaaaatatcagtatagtgaacatacttgaatttgaagtatttttaagctttgaagggatcttttggctcatctacctaaactgaaggcacaactctttcagagaaaggttttcttataaggaatgggctagaagttttctgcattaaataagagctgaagagagaacctctttctattaaaaatttgaggttaaaatgatggaatgtattgccctcttccagtattcataagcactacctttaaaaaaattcattttcttttgctgtgtagcttctagcttgaactatgaactacggaatacttataaagtgatagcagctcaattcattgcacaacgctagcttcccactttctctgtgattcaaaggccttcgaaggcaaagaatggggttattgaaggatggcaggcagatttcactaagtaacaggtggaggtcaaagcagtttatttgtgggatgaacagagtgcagagatgaaaaagcaaatgctttgccataataagatttagcaagaaaatgctgacaacacgaagccttagattctagctgacagaaccttttctcgtgttcattacttgatttcacagttcaagcaatttgaagagggctaaaattttctttctttttcccttatgaaatgtttcaatcagtttcaaatttttactttagctgggttctctgcttgtatccaaggaacactggaattaatagagctccagcacaggcgtatcccaaacatggaccctcacagactatgcatctctttcaaattaaattttatccataggacccttaagctctagctctctatcatgttttaactgacagaagagagtatatttaagtaaatactaaagttcacatcatcaaggctaatgttatatgccaacgaaagtattcataagggtgttaaccaagcttgaacactgagttacttccagcttgttggagatggagaggaaaagctttcatttttttcccattatacagttctatatttgtacagtgaatatgtttcgcttttggaagttaaaaaaaaaaagactaaacatgctgaacaatacaaaataaggtttatctactgttgtacagcatgaccaaaaaagtaaaaagttatttggtatcatatcatagagaccagagctgtccaatagaattttctgcagtgatagagatgttctgtgtctatactatccagtattctaaccatgagccacatatggctactaagcccttgcaatgtggctatgctgagcaacttaatttttaaattcatttaattttaattaatttagatttaagtagccacatgtggctagtagctaccatattgggcagggcagatataagccaaacatatgtatgattgagttttttactattcagctggatatctaaggagaatgaataaaacattatgctattttatactatatgtattgtttatgcaaagaaataatttggttttctcagaaatgtcttctttatcctcagtccttctgtgaatgcgtataattgctatgttgagccaaaatcagtcctttcctgaacacatggggggatgggatggctagggggcagatggaatgggtagggaatctccaacctcttgtaagtatatggagcatgtaacacaattttttttatttcagtcctgtcactggggtgtctgtgtttaccttgaaaggagaggaaatcccccaactagtcaagagattttatttttggcccagaaaccagatttttatatgacattttccttgtgtctattctttactctctctggttgtaaattttcactcacaaatgaacatttggaatatattacagaactcatcgtttctttccccctgaataatccatgtaatttttactccatactcccattttttaaaaactgaagaaatcactgatgtccccaagccatttaaattacctgaacttctttatgatgtgataattctttgggagtccttttagctcattttcaatggctacatatagagtaagaaggataaacctcagaagctatattaactttcatttatgctctctatcataaaaatgattttaaaacatttttattgactgaaaaaggctaaaagtcaaaatagtctattttacctttttatcgttgagtgtgctaatcataaaaaattatattagaatgaactctaatggattttatcattaggacacacatctaacaaacgtgtggtgtcttcaacgacctccttgtatcacgcagcctgtgtttatgctcacaagaacagaatggtcccttaaccgtgggattcttctgttcagtcacagcctttatttggcatcatggttagagataatctaattacaaggtatactttaaatggttctagaaaggtcttgttcctgcctgtgggggaattactagagtgcagtatagctctgcatctggaagagatgtgtctgagtgtaaatctgatggtggatgacttgcaaaagatggtactggtactcagcattcatgctgggcttgagaaatgtcactgaaatttatgtggacaccattagtctgatggacatgactgagctgtctgttccccacacttagatctagtggagtaggggaatctgaatgcctgagtgtaaaaaagagtcacaaagcagttagcatcattaagacttggaatgtttgcaagaagaaacatgttcaagtgtcattaatagttcagatttaaatcagctcatgataggtttgtattgataagatacataagtagtactcccccgcgccctcacccagaagtagggatcttggtagcatggtacactgaaaggagcaagagctttggtttcctgggttcaaatcctggctcctccactcactgattgtgtagcctctcaccttcttaaggactgcactgcctcaggcaccctctcttctctgagtcatggctttctgcctgtctgctggaccattcccatcagtagacaagcatgctggactctctcccaccttcagaaagctatcccttgcttccctccctcttcctgtagccactaccctatttttctgctctcctgtgcagattcctccttcgtttcatggaagttgactacaccatttcccctgtttcttcacttcccattgattttataaaccatgctatcctgtcttctatgtgcctcactctcctggaactcacttttcaagactgtcagaaacattcatgttgccaaatccagtggacccttttctgtcctcattatacgtgatctctcagtggcattcaactcagttgattgcagccttctccttgaaacacttcttagtttctataaagatatactctccaatgagttaaatgcctcaacttagttgcctgtttagatgctgactttagacactcgggggccttccttgatttttacacattactgaattctaaataattgtgtgtgtgttatagcctctggttaagtgagctatttattactgcattgtaatatatagtctaggcttggacactatcaacaagtcttaagagaagaatttttgtcctttcttgttatagatagataacatggtttgcaggaggctttatagaaaaagcaacttgttgaataggcaagaggcctatagtaaatataaaacatttatatactcttttgcaactcaacatctggggtcattatcttcttctaaatctatgtgatatttattttgtggaggttctgtgttagaatcgctgataattcattcagtgtgtgtttgataaaatcttaactgatccttactaaggccaagagaaaactttgatatataagacaaatgattcctagtatacttcagagtgggtttttttgcatacacttttgtatctgatatacccttcctttttttccccctttggataaccaaatttaaaacttcagctataaatatactttattgacttaaataggacactgtttttatagtatactagggaaactacatgagggttttataaaatgtatgcacttgagaaccagagagacctggatctgcagtaccatctaatagctgtatgatcctagacaaattgtttaacatcacttgatatctaatttctgtaatattaagttattggtagaaaagataataatacctacctatctcagatgaaaatgtaaggatttggggatggacacggtggcttatgcctgtaatcccagcactttgggaggccaaggtgggtggatcacctgaggtctggagttcgagaccagcttggccaacatggtgaaaccctgtatctactaaaaaaaaaaatacaaaaattagccgggtatggtggcatgtgcctgtagacccagctactcaggaggctgaggcaggagaattgcttgaaccagggaggcagaggttgcagtgagccaagattgcaccactgcactccagcctgggtaacagaccgagactccatctcaataaaaaaaaaaagaaagaaagagaagaaaatgtaaggatttgagatatttataagtacatggcacatagtgggcccttcataatttgtagcttttattattttcagcctggtttttggacgtgatcgacatgcagagatttaatctctgtagctgcctcctgcctctcttgaggccacttgatggatgaaggcttccagttgcctttaagcctttaagtttggtgtaatcgttgttctggtaataacagttataaaaataggttgttgggaattagatgatgacaatgaacaggacactatccaagtcatgaacaattaaacttgtaacattttggggtcctctctaacctgcttattgtattggatttaaaaactaaagtgctgaggttgcttgctttcagagtttctctccgtttgtgactataaatgaacattattgaaactaaactttctattcttgactttgtcactttgaagaaaagaacatacaccagttatatcttctctgacaacttgaattacatctcccaaactcctgcgacagacaagataaggtcctgctgtcccgagcagcacttaccagggatacttttaacaggagaatgaatttttggataggtgctctaacaaagtaagcactaacactgagaagttacagttccttttgaaaaatccagcatgttgttcggttgtcactggaataattatagtttatggtgatccttcccttctcttccattcccattaatgttgtagctcctttgactcctaaaaatctcccctttaagaagatacctaaggaagaaaaaacagctttgtacttcctaatgattcctgcagtgtttcctttactattgtcactatggagttcttggtcaaagtgtctgaaaaatatcataacttgggagtaggggagaggtgaaattaattatgattggttttcttctttttattttatgtgatatcaaattgcagtgaaaaattccctaaaacaaattttaacttcttaggggagaccccaagaatttgagtttttttcccacgtcactcaatctaattttgttattgatgtttctcgaaagaatcaggagaagtagaaattttcaaaagtatttatgtccctcgaaaattaccactttttagttccctttctaagaatacgtcttaccgttttctctaggtgactaggctagtgaaagactatacaacctagggtggattaggtaaaaataagggaaactttcagaattatagagagtaattattgtacagtaaacatctttaatacacacatgtctagcattgcagtcgtcttatatttgaatatcatgtttgttttctgtactgcagaacaaattttcacagagttagcaacttgaagcaacacacagttattaatattatctcacagtttccatgggtctggagcctggccacggctgaactagatcttctgcttaggtcatacaaggctgcaatgagaattttgttcagactccatttctttctggagctcaagggcctgttgctgactctcgtgattgttggcagaattcagttgcttgtggatgtgggactaaggtccctgctttctgaaagctgtcagcaaggggccccactcagctcccagaggcccctgcagttccttaccatgtggctgtcacaggccctttcacaatatggcagctgacttcttcaaagcctgaagaagaatctctctgacttctaattccttttatacaaggctcccctgattaggtcaggccctccagggataatatatttttccttaactcaaactcacctgattggggaccttaattatatctgtagaagtcttttgcaatataacataacctaatcaatataatcacctttgcggtataatataacctattcacaagaatgacatttatcatattcacaagtatctcacacatgcaagaggagaggattatataaggcatcattatacaaggctggaaactaggaagccatcttagaattctgagtaccacaatttttttttcaagataaggtctctctctgttgcccaggctggagtgcagtggtatgatgatagcttataaactcctgggttcatgtgatcctcctgcctcagccttctgagtagctgggactgtaggcatataccaccacactcagctaactttttctttttcttttttttttttttttttttttttgagatggaatcttgctctgtcagtaggctggagtgcagtagcatgatctgggctgactgcaacctccgcctcccaggttcaagcaatcctcctgcctccacgtcctgagtagctgggactacaggcacatgtcaccatgcccagctaagttttgtatttttagtagagatgcggtttcaccatgttggccaggatggtctcgatctcttgaccttgtgatctgcccacctcagcctcccaaagtgctgggattacaggcatgagccaccgtgcctggcctcagctaacttttaaaaattaattttttgtagagataaggtctcactatattgtccaggctgctctcgaactcctggcctgaagcaatcctcctgtctcagcctcccacagtgctgagattatagacatgagccaccagcccagcctgactaccacaaataccaatgatgaatttgaaggaatctttgtgaatagtgcatttgacctgtattttcaaggttttcttgttgaactttgcacttataagtgcctccagagatgaaagccactacatgactagaatcccatatatgtttgcccttgtctactgaacacaatttggaatgactcatatagcttagaaaaaaatggcagactagagggaaattgaaaattcaaaaattctggatgtttagaaaaccagtgacaagccacaggccttcttgacatgtttctccaattctatttactctcattgggtttttttataccaatcaaaaggatgaaatgccccattgaaacaaaacattatgctagatttctgcttctcattctacaaaagtctttatttttctgcattgaactttgaagtaacatttcatttcctccagaaaaagagtaggattacttcatccgtagtctttttttaaaaatctggtacttctagaaaatacattgaaattaaagttttaatgcattgaaagaaagccaatcagtcattaatccatacagtaattttgtaacagttgtgcataaataattggcaaaagagattttaaaaaggagtttatttttaaagtaatgtacagaaccaaatttgatttcaaaaataaaagccaacattaatgttttctagcttttaacagaaagcagtttactagcattttggaatttcatctggtcaattaaatatacaaaacaaattaaccaaaacatacattatgtatgtagagaaaatattaaagtatataataaggaaatgtgctcaatacgaactctttaaaaattgaaaacacaaagtaattttgagattcatgacagccttagggttcatattacttgactgtgataaatttagaagattatacatagtttggctggttgttcctgcatgctgacggtatttcttccgtctttaacccttgcaaagaagatttaaattttgctatttttgaacttgtttaccaacttggtcattcttgatacttgttattgcccaaattttacttgtaattccttttagaagcataaatagtggatttcaatcatgtcaatatttctgcagtatttagaatggcatgaattagaaaacatgaatttttcaaagaaatcataactttttcttgagtccagccatttgctatcatcaataagattagttaggatactggatttcatcagtgattccattatctgaaaaaaaaaaaaaaatctgccacctttaaagttttgatttttgttttaattatctgttctgcttctgttttatgacatgtagttcaggcattggactaaatttaaatcagtggaatggttggcagcctataaattggtctacacaaaaaggtttaaatgagttgggagatttgtttacattttgctagctttttatttctttcattttttttatttgaaatctcctccttagtggaattacatgatgataaccttaggttaggttatcttacagtgaatgttcacccaaaatctcagtgcatcctacattagaactttggtatggtgtgactggttactgattcagcaagcaacaaatataactaaagtcacttaattacttcatttttaattcaaatcacatggatgttgatctagaaaggatctgattcaaattgtcaaattagtatgaaatcacataccactctatgttgtacttatatctgactatgcaaatgtgtttaccaattttcaatttttctttcttggggtgaaaattctaagctttgctatgtttaagcatctattcatgaagctacagataaagctgagacctgcacaagtagtttaaatatcttttcagaccatttgggtgtttcagacccttggaggtcttggacatagaggggaacaaagcagacaaggactctgtccttatacagtctgagtcacactcaaaggtcatgttgtagaattgcattaaggaaatctgtgatcagaaataacagggacatatttagatacacgcaaaactagctaaatttctggaaagatctatacctataaagtgcttggcacagtacatggtactccataacagttacatgttaatatcattatgatttttattacttttccagttcatccaaataattctctggtcatgggcagaacacagcacatgtaaacatgtataagtaaaatggaatttggttcttttaacatcagtgcagaccagttttgtgctacaaccttaagagagcccaaatttgtcccctgatgcggagactaggagtcatttcttttatttttatatccaaattttcattgttttaattggcaccctatcaaactgatagatgcctccagttgggtatgtcagcgtggttgccgagaacattacaaatccagtaattacaaggaactgtttctccattattttcttcccaaagcattttctatgctggaaatgctgtgaaaactttagacacaataataaaagtactatttttaaaaacaagcttttattgtattaacatgaaagcaatatatgttcatcatagaaaagacaggtaagcaaaacaaaggcaatgaaaatcacccaaattcaatacagagagagaactaccattatagtttatgcatattgccttccagttctttctctgtgcatagaaatagccttttcaatggtgtcatagtataacatcctattttgtaattgcctttttcaattaacattatattataaatgttttgccacatcattactcttttacagtattgcttacattggttataccatacttatttaaccagtccccaattgtagggcatttaagatttttttacttttcttttttctttttttctattctaaagaattcattgaatgaacaactaagttgccattgttgagggtattcttatgttaaaacagccaaattatttaaaatatggagaaagtgatttggtgtcaaagcaaggtaaccaacaagatgaaacgattgcatgtgaagtcttcataagcatacatggtttcctttttgggagtcacagaggtcacagacacaagcagcaacttttaggaaacactggaaaagttgaaccctgtattattattgaagaccaataacccaaaaatggactgtgattaattagaataaattgaaatcaaatacagaccgacttatcaggggactattctgtcacctctttgtttctgtgacaaatgcaaagcaattcacaacatctttttcattcacaggtggatttctctttttgtttgtttttaattctttaaatgttatcttttaggttgcacaaatcattgttccatgaattaaagtgtacttaccagttgatccttcttgccaggaatgccatctccaaccacactgaagaagtcggagaagtctggtttcagcagcccctccccttcacagacctcctccctgggaacggcgttcacacagcatcaccgacctgtcattacaggacccagaggtgagctgctccacaggcacccttggttgtgcttatatcatggcctttggacccaagtagcaaaatgagaaacaatgaggactccccctgaacactcgtgaggcagtgagtgttccaatttcttacccttgggggcagccttggaattttagagaccaaagagatttggcatcacattttttgtcctttcctaaggcaaaaagagaccaaatctgttttttgttggccagtgagatttttgcagaaagatgggaagtaacttgaattgaaccaaaatcaaatctgttctacaagttgtgtgtgtgtgtgtgtgagagagagagacagaatgtgtgtgtgtgtgcgcacatgcgcgtgcacacatgcatgcattgggtgagtatatttccatgtggtcaattacctgttttcaagtagtagctttttctcatccctgctgactctctttccataaaacctgatttcaatatgtggcattttgtgttgaggttgtttgcatcagggtgttgacgagcagtcttcattcactccttttgaagtggtagatagtttgtctggttttcattgcaatgttttcattatttttgtctcatatgcttttaagtttattattaaaatgtgtccacgagaaatatgatttgtatttcgcattaaagacaagccttaagcctcaagagaatgtcagcaaatcacttaacttgatcttattgcaagataaaaatatttattattttgtttatgaaactcccacagtagaagtatgaataattgtagccatgtttgctttcctttatcagattttcttttaggtaggtctgtgacctaccagctggtttcataaaacatcctagaaaattatgatctcttgtctgctttgacatatacctggggaaactgatgtttcttgcattaatctcaatgttagccccaccaatctgaatccctttatgaatgtgctctgtgtgcatctcagggaaatgtggcaggtaagagggctgtccggtgcacacatgggagtcatattgaagaaagtaagcattttgaccactgtgggaatgaaacttacttgtttcatctttaaacatcttgtgatcattggtagaactttctcaagatcccttctttcatttgtgtattatgtgtggtataatcagagaggcttactatcgatatataatttgaaaacctgcatcagaattagattataaggtcccagaatgaggcttattaaatagtattaagatattatcctcatagttaacactcattgagcatataaactgtagtgggggatcagagatatgaagcccttttagtcagaatatttatggcctgaaggagatgaggcatgtgttgtttttcatctgtttggggtcaagttaacatattctaaatgctaactgaatggtaaaagttcctgcaggagctcagtattggggggaccgtggaggttcattcactctttaaacaaggatttactgagtgcctctatagacactgggaccagtggttcctgtcctcatagagcatgttatctactgcagaagagaggcacacaaggaaataagcaagtaaaagatgatgggccgggcacagtggctcacgcctgtaatcctagcactttctgaggccaaggcgggcagatcacttgagctcaggaattcaagatcagcctggccaacatggtgaaaccccatctctactaaaaatacaaaaaaaaattagccaggtgtggtggcacatgcctgtaaatcccagctacctgtgaggctgaggcaggagaatcacttgaacccaggaggcagaggctgcagtgagccaagatgttgccactgcactccagcctgggcaacagagcaagactccatctcaaaaaaaaaaagagacttcaaagtataaataacattgaagtcaaatcttaaaagatgcttagataaatggagggccatcctaagcaaaggaaagatttgtggtgtagtaagttagtaagaactgagaagaacagtatgccagcaatcaggagagctgggtaggctccctcttttccttcccactcaccttctgggttttttaatgtcctcatcaatatagtgggtacaatactaataatgaccatttcctcccaatcttgtattcttatacagaaacaacaataaaacagtatttgtggagagtccatgaagagcataatgcaatctgtatatattatcattagtcagtaaatattaagagtgtctaatgtgtgtcttgccttaaaactgtagttctagaaattactgtcatgggcacttccctatgggtacaggttgagagcttgttcatgctagatgactaagcacattttctaaaatgacccacgctgggttgaaccagagtggacctccttagctcacagcataacaagttgcaatctattcatattcattcataaaactgtgtttgaggaaaagagaaagatgcctagtgtaagaattatggaataccaaagattctttgttttcaccagaattcaagatggctcccagcatcctcggctctcctttctggaaagtctactcaggtacccgttcttaccgtgtcccaccccgcttagtggtctggtgaagggaattggagtagttgagatgaaacttcagttgcctctttgtggtaagaatcataagaattgagataggctaacgtaagacatttttctggctaagacatttttaaaaggttggaattcagcctcattatttatttgctgtgggtactgtaatttccttcatttctctctgaactagttggaaagctaatgcttggaatgataccacatttgggagtaagacgtggtgttttaggaagatgaggccaaaattgaggaggaagagtatagctgcaagagtcagtgtggaatcgatgtcacatgtgcgcataaaggagatttcaacctctgacactccttgtattgggcaaagttgccacaacccaaaatagtaaattattagataatccagagaatcaaactttaaaaggatcttgaagaaaagaaaagaatgtcctttatcaggtccccagggcatggggcagggatcacggaggccattgactgctctctggttagcactaggttgtgaggcttctgctgccttccctagcatttatcacgggaatgcttcaactagactagcaccagttagtaagcaataactgtccaacacacatccacgctcagaatggagatgagattttacagagctacagcaaatcaaggtcacctcactaaaaacacaagggccttacttttggctgcaaacataagctacatttggaaatttcacagccaccttttacaaagaaaatctctctcttaagattgcaaagcaaagggagaaacacagggcgttgaagggaggtagcgtagcacagcggttgtccttgtctgttttgactgccagaacagaacaccatagactgggtggtctataaacaacagaaatgtattgctcacagttctagaggctggaagtccaagattaaggctctggcagcttctgtgtctggtgagggcccacttcctggttcatagatggcatcttcttgctgtgtcctcacatggcagaaggggtggggtcgctctctagtgtctctttcttaaaagcactaatcctattcatgagggccccaccctgtgacctaatcacctcccaaaggccctgctacctattaccatcacattgggggttaggatttcaagatatggatcctagagggccacagacattcagcctatagcagtggttaagcacaaaatctcagggggtcagataggctggtgtctgaatctctgtccactacttggcacattgcttttctctctgaaccaaaggtttctcatctctaagttagagattatcatctctaactcaaaagaattgtattatgttaggagcaaaggaaataatgtatttgtagtcatttgcacagtgcctggaagtacagtatgcacgtgggtcatacaattaaataatcctttttcacccaggctttgaaagtatcatgctgtccctattgccttcgcccagcaacattctgcccatcccccagatcagctcaagcactttcttttttttttttttttttttttgagacggagtctcgtcaagcagtactttcaaagtgaaacctcctctcctccacccagcttgccatcatctcacactgcttaagctcctgctgcctttcatgtctgcacattgactccaccaacctcatctggccttgttagttaatctacatgtctcctggaggagaacctccaaagggaaggatctctaacttagacatttcactatctttgttgtgcctcacacagtgggttttatgctcaaatattggttgaatgaataaaagtagtcaaattgcatataaatgcacacaggagacatttatcccctctctgaccctgatgagttttcatttcttcagataaatgtgtgatagttcatgcagtacttccttgtaagaaatgtccaagacatggaagaaccatggcgttgcatccaaagaaaacctatgcaagattctctaagtagagctttgctattaagagctatgggctttctttatgttgttctaaccacttccctatttatagtgtaaaggtagagacatgtggtttcttaaaatgaatcccctctctgatagtggctttctttatggctttgataaatcacttaaccttgtcgcctcagtttggccatctgtaccatggggacaatactttaccacctgtttctctgtgtggttagaattaggtaaagaggttatttgggaatatcctatcgatagggggaagatattaaatttcagtagaggcatttgtacatcgttatacgttagtataattactgtgcactttaagctgaaagattgagctttcaaagactttcttttaccactacttaaaattgtaaccatagtaaagtatttactcatgactatttgtcttattcatgataattgaaaaaagaaatctttcttcatccctttgccttttcaagaattgtaagtttgcctggttgatgatctgaagggtctaacttgttagagaattatttagagtaatcatcagttacatcttaaagtttcttgaaggtttagatcttcttgaaacttatctttttgcttaaaatctttgctgttttgaagattaagaagatagtgaatgatactttatttaaatactctgcactaagtaaaacaattctgtgccttagagatttaggaacagagagcagcctacacgatccacattgggcagcacaattgaaagtaattgaaagagttatggtctgggaatcttttggtataatgtgttcccagtatcagtgaagattgtttttggctgaaagtaacagaatatctgactgaacaatggcttaagaaaataaggagtcacatttttctcatacaaaaacaagtatgtggctaggtatggtgactcacacttgtaatcccagcacttcaggaggctgaggcaggaagcacttgaggccaggggtttgagaccagcctgagcaacacagcaagaccctatctctacaaaaactttttaaaattaggagagcatagtggtagagacctgtggtcctagatactcgggaggctgaggtgggaggattgcttgagcccaggaatttgaggctgcagtgagctatgacggcactccagcctgagcaacagagaaagaccctgtctcaaaacaacaacaacaaaaaaaagcaagtatgtgattcaaggctgatagggtggcacttgcagtgccatcagggattgagatttcttctcctagacatgtttcagtgggttgtttttatgaggtcacagcatgggcgctgccccctgccttatgtctgcatgccaagcagaaagaagggaaaaggtgaaggcaaaaaggacctgtcagcttatcctgccactttttcataggatcttctgcagcacaatcagactgtgtcccatgatcacctgtagctgcaagggaggctggaaactccaaatttttagctgagcatatggccactctctataaaattaagcttttatcagtgggtaaataagggataaatatgctggttgacagttagcaacatattccccattatttttacagatgagaaatctgagctagccagaaccaagaccagaaatcaagtctctagttcagtgccttttttgccatatcagtagtttctacctttttctcccccgactgggagaaattaactgcatttatttaaacaattactttgttttcacattttttatgagtcaaagtcataacatatccatctagatcttttgataatcataatataacctgtgccatcacactgagttttttttttttaatagcagccataaacaaatcacttagccttttttattagtccataagtccttgctactggtaaatttgtggtttctcttaggtgcacgccactttagagacagtttttgaggtcagtttggcttttttcaatattgtattagtttgcagatacctattactatctggggacccattaatttttttccacaaatatttatcaggctcttacagtgtacaagatgctctagtagtagagtgaacaagagaagcatggattctgtcctttgagtgcttgcctcctggaggacgagaggacaaggaaaccagcagttgcactgctgtgctagaagcacagggtgcggtagaaaatgaggggaaggacatccttgtggacaactacagtggcatctggcactacgcaagtccagacacacaggagacccaaccgctattgtcaaacagtttgccttcgcattatgggcatggaaaacagaacaacagcaaataaatcatgctcttagataactaagtaccaaagaattcagacatacgaaatgcaaacatgaggttaaacccccacctctttatgagtcaaaaaaaaaaatacacgatgggagtttagaagtaaaattgcctggattctgaaaatacgcctaagatacactaaagcaatcaccatataaaccaaagatttattgtgcagctttcaaagaatcattccagtttctgtttggagaggtagtcagaagtttatatgctctataaacctctctaagtccatgatcctcctggcccaaatagggatcttgctctcagtgatgaaacatctgaaggtctgaagttaacaatatctcccagtttggccaagaaaaatatactgcagagaattatgagaattaagatcacctttcaggaagttggggtcaccaagaaaggttagaggagtgtggattcataataggcatagacaataatagaggagcggggaaggagaggtaaaataggagggtgacagtcatcactagatggcagggcctattagggcaaggaccacacctttatcatttatctctgaatccctccgccttgtgcccggcataaggaaagcactcaataaataattgtcaaataaatgaatgaatgaatgcatggatttgattgaagaaacagaaagtttgagaataataggaagttctttccttctccactgtgtagtagtataatattcaaatgcatatattcagcagcacgtagaaagaggcatggcatgtttaagtgctcagtatatatttgatttgtttgtttatttgtttgtttgtttgtttgtttgtttgttttgagacagggtctctctctctgacacccaggctggagtgcagtgacttgatcacagctcactgcagcctcgacctcctaggctcaagggatcctcctgcctcagcattccaagtggctgggactacaggcgcatgccactatgcctagctaatttttaaaatttttttgtagagacagggtctcactgtgttacctaggctggtctcgaactcctggctcaagcaatcctcctgcttcaaccttccaaagtgctgggattacaacagcaaataagttatgcccttagataactaagtactgaggatttaagacatacaaaatgcgaacacaaggttaaaccccacttctttatgaatcaaacacacacacacacacacacacacacacacacacacacacacacacaggcagtttagaagtaaaattgccttgattctggcaggcgtgtgccaccatgcccagcctaatatatgtttggttttaattaagatctaccttgatagaccttaagagaaatgagctcaaaattatttggtcccctatttgtagaatatttcctgtggcattttaagtttttctctccaaactaaggtccctccagaaagaacgtcccctggcgtttcactactactgtaattgtggcaccccctcccctggcctaggcccccaagtgctaggtttgttcatctttctcctatcacatccacaaacttctttgcctcttaggaaagcttttaacttagttggagaacatgctggtgatccactgaatctaatttgtctctcctggtttagtgcaattgaatcatctcaggaaaatgagaagcaattaggtacctgttgctaacaaggcactgaaataatctgccaacagacgcacggtgtttatttattattggagtatgtcacttgagcaaacattacgttgcctttctccaagaagaattgccagaattgattttcaaatgcaggcctcatagacctaacaagtaccacctttaaggagcatggaacagagaagcaagagggcttgtgagcctcgttcagggttagttcaagtgccagtgcctagcctaatgggcagcgttgtggatgggatttgaagttgcaggacactaaagaaaaagcagcttttttcttttttttttgcagaggtcctttaagtcccagttcaggaaattattaaattcattagccagatacttagaaccagctattactgcccagccaaaggaaaaaaagagtgccagcaaatgttttaaaactacaactaaacaaaagtcaggaagcgtgtaattaaaactgtacctttattgtattgtaaagagtttcactgtgacatggaaaatatttaaaggagaaggctgtttagctaatttgtctgcaagtgaactgcctagtggaactatcctaaattaactgtaaggccacccaccgagccaccctcataaagagccatggctgctcagcttgggtttgtgtaacgttcaataattactagataaatgcacaactaaaagctctattacactaataatttgtactgtgatagatgtgtgggacaccctgctgggttaatttgtcatccctgcagcaaacttctaaagagagctcttccgtagtggaatcatgttaatatgttgtccctgggaggacaggttagagcagtgagaccacttggctccttaatctcttaaagaggcaaagggcctccagggtgagtgctgaagagaatagggtgatgaacccaggggacctggatttaaactcatcttcacaaaagaagctgctttcccttggaattcctttgcccctttctctctgtccctctcagtcacacgcaggcctatgtgtcccagtggtgcacgtgtgcgcacaggcacacacaggcatagacccacgtatccatacatagtgaaggcagtggttctgagcaaggtttcttagaaaccccctcattttaagacttcctggtatcgtacgcttggactgtaccttgcgtagtcagataagccccgttctttctggtttagcttaacctaagttgattccatgtatagactcattatttattttccttttttcagcatagaataaaaaattcaagattgaacttgtatctcctctttatgtggaatggtttcttctgcctcgccctctccctctctctctctctctctctctctctctctctctctctctctctctccctctttctctccctctctccccgtctctccccctccccaaccccacccgcacccaggtctgctattctctgtgtgagctttgtgcttaggctaaatatcctcagactgtggcccagatagccacagtgagcagctccagccttaatttccaccaatttaataatcccaagagaaaaaagagcagcttttcaacaacagatttagggaagggcctactcctgcatgcttatgattctgattatctgggtttgggtcatttgctcacttttaaaataacccttatgtttaaaagacaatggagtgcctcattggtgtgacccggcttccctgtccacccatggagtcagcgggttaagtccatcctaaccacataggctgaggctgagggacagagagttccccaaagaaacattagagctctgtttccagaagaaggggtgaagaactgctgggcaggcaaaaataatagctacccccaggagataacagcaaagctggcctgagcactggccaatgggctcagcttactcactagctgtggcttgttcctgcagttagtgtttgcagagcacaagaaaaacccaggcctatttgttcatgccacagacccccagggtcacttgaaaacagttcggctcttgattctcaattagctggtgttacctcattgcattgtataatccagattacttttcatgtatctctatttattctaaaaacaatcctaagaatattaaataacccagagtctagcatgctgtttggcacacagtagattctcaacacatttgttgaatgagtgatcctactatgaatgaggcacctgtgtacattaatgctaatcctcagaaaagcctttcaaattgcgctattctttcttacccccctctgccccacccaagacagagtcttgctctgttgcccaggctggagtgcagtggcacgatcttggctcactgcaacctctgccttccatgttcaagcaattctcctacctcagcctcctgagtgtctgggactacaggtacacgccaccatgcctggctaattttttgtatttttagtagagatggggtttcaccatgttgaccaggctggtctcaaactcctgaccttgtgatctgcctgccttagcctcccaaagtgctgggattacaggcgtgagccaccatgcctgaccaattgctgctactatttaaagataagaaatttaaagataagaaactgtaggtttggaaatgttaaataattttgcccagattaacacagggagtgaatgattttacaaccagaagagtcaagctcattttgtagtagaggacactaaggaatataggaggctggcgtcttgctagtcaatacccaagctgacatgaaaacttggtaccctgactttaatcactagactgattattctgttgcttattccattccttgtgtgaaatttacccacagtaggattactcctcaaatcctatggggtgaattcaggaagatacttcaagttcaggaggatgccttgaaagtagtctttggctgggagcggtggctcacacctgtaatcccaacatgttgggagaccaaggcaggcggatcatttgagttcaggagtttgcaaccagcctgggtgacaatgaaaccccatctctactaaaaatataaaaattagccgagcgtggtggcacatgcttgcagtctcagccacttgggaggctgaggtgggaggatcgcttgagcctgggaagcagaggttgcagtgaacctagattgcatcactgccctccagcctgggcgacagagcaaaaccctgtctcagagagagagagagagagaaaagtagcctatgctttagtaatcatgttgcacagaaatagaggcttccatttcagtataaatctgacaatttggtggagagaaatgctgcaaaataacccatggctttatgtttgttatgagatttgcttttctgtctgcttattttctgtgtgtgtgtgtgtttttttttttttttaatgcaggaaaagacttgcaacagcctagatccagcacttggtcgttacgcaagaagcatctgcatggatcttgttttttgaagtcctctttcacaggactgcagtttgtaattccatttcacttccaacaggtcattggatgattccctccctttttctgttaatctctggaatcatccaatctatggtggttagttttcttctcaagtaattgttttgatttgtttttcattcttcatttagtctcacagtagtatcgcttacatgttacgtaaaagttcaagttcccttcatgtaactggattcttgtcaactttgcctattaaaccatcactctaaatatttccaataatcacagctgttgcgtggcgtttgaacacatttcacatcagccatcatggaagcttaggcaattagtgtgagaatatggtcaattttgattcaaagaggccctgtcaggacaaaggctggggctgtatttcacagagcttaaagtagcacactcaggtttttttaaactctaaatattacagtctccccaaagccaaagtatcttaaagactgagtctagatatactgtacaacttaatatcccataaacatttttaaaatcatttgttttaaaagccttccttatttcaatttttagattttaattttatttttatggatcagttgtactatttgtaaatgtaatcccagagactgaattctatacatccactagagcttaaactagatgagcttcagagagtatttagtccaagctgcttactgtgagaagagagacctagggagagagaagccacccacatttataatatgccaggtagtggcagaaactaagttaaaacccaagtctctttatctagtctgaaaatattcctaaaaaatgccctagatcttctgaaaagcatttgtttttgttactgtttttttgtttgttggttggttttttagatatagggtcttgctctgtcacccaggctagagtgcagtggtgtgatcatggctcactgcagcctcaaactcctgggattaagcaatcctcccacctcagcctccaagtagctggaattacaggcacctgccaccacacctggctacatttttaaaattttttgtagagatgaaatctcactgtgttgcccagggtggtctcaaactcctgggctcgagtgattctcctgcctcagccttctgagtagctggggttacaggtgtgagccatcacacccagccgaaaagtatttctagtagtcaatatgtattagatttctgataagcaaactcccaataactaacacgatgggactttcaagggaaatgatagagatttccactgtttccatgttttgggaggccgtggggaggccatgctcagattgtggtgtggtcagaaacgtgcctgggggccaggcacagtggctcatgcctgtaatcctagcacttggggaggccgaggcaggtagattgcctgagctcaggagttcaagaccacgctgggcaacgtggtgaaaccccatctctactaaaaaaattcaaaaattagccaagtgtgatggtaggcacctgtagtcccagctactcgggaggctaaggcaggagaattgcttgaacccagaaggtggaggttgcagtgagccgagattgcgccactgcactccatcctaggtgacagagtgagactctgtctccaaaaaaaaaaataataataataatgcccggttggcaggggcctacgtggtgaagagggaggtcagtatggacactcaaggattgtaggtctaagtgaaaaatagcatctaaagggagatggccccatagttctaagcttctgggttaaatctcacagtctgaaatttaagtaaaggcaggaattcacagtatgtttggtcagcaaagactatttgtctaggtctttaaagaacttttatctttacttagatatctatggtatctatgattattaggtcaagattgttgctactgctgttgttgcttttacttttcattttgttgtttgtggaattattttcaaggccctcatgtcatatccatgctgatagtatatactattttatcaatatttatgtacttttttgtccaagagacaggcgagcaacaagtacctcttgttccatcactcctttctttcatgtattctacaatcagaacaggtcctagcacacaggagcaaatttcaatgtattcattgcctatcccattcttgtctatgatagtactatcatactacaaaagaagctattgatcacttaattgtgtgatcagaaactgtgccgtgtgccttatatacattgtctcatttagtcttcacaacagcgctatgaggtattattagccccattatacagatgccaaaactgagttgtagagaagctcagcaacctgaagcatagctcgtgatagagcttagaatttaaactcatgtctatctgactccaaagccctggtccttatattatactgcactgcttttctgagtcgtatgtttaacttagaattatatacgcacacacacggatgtggtcagccagcacagaccaaggcatattaagtaatggtgaaggcagacaatcaaaagtctaccgtggagagttaatgagatatcaaaggtgaccagattgctttggaaagcttcagaaagctgaggtggaattggtattgactgtcaggggtctgactcacagagcacagcaggtgcttggagagtgaacaagaattttgtgggtctacaccagggactggaaaactattgggcccacagatccaatagccctttgcctgtatttgaaaataaacttttattggaacacagccgcgctcatttgtttatgtaatgtctgtgactgcttctgcactgtagcagcggagttcagcagttgcaacagagaccatatagcctgcaaagtctaaactatttagtatctggtctttacagaaaatgtttgccaactcctggtctagtcagggccttgagcaacaaaggtcttgaagtagctaaaattgatctagataaaaattttaaaagactttggccttctgttttcttgtgtgggtctttctttttctttctgtttttccaaaagacattagaatttgatctcttagaaaatcccctcaattcaaatggaatagactctatcaaccatcttggaaactaaccgtggcataaagttactttgtctggtagcagtaatacaaaaacactggtgttttgcaagctgtcaagcaatgtcatatatttctctcaattgacatatctgggtcctttcacgtgcatcttcgtgatgttaaaagatatgtaccatatgttttgaaaaaccttggctcacctcgagtcaaaagctttgttatttagaaaaggcatcacctcttaaaggtttgaaaagcattgccaattcttctttcctgtatctctgttaaaataaatcccttaactccaaacttctcagctttcatcaatggcaggcctgattcatgcatgatttataaattagggctatggaccattaagatagatttctcagctttaggtggggtataatggtgttatatagtgtggttttgaatttctgaagaagcaagatacatagtagttgacaacccaagccatttttatgttctatttacccttatggaaagcttcttttgttttttaagtgggatttttttcttcgattttcttttccttttgaagctttgccgtattacaaatttttacttctaattatgagtagtcaagagttcttaatgccacccttacgctatggaagtggtaactttcatctaaagaacatcttatttctgaagacagataagaaggtttttcttataatggcgctaacagagaaaaactgtttggaatctcacctgttgccactgcctttgtattcattaacactaagactgtgaagttttgcagatgccagggctcaggagtgattattcgctcttgtgagggaagaagcctgtatataacactgccttaagagcacactgtgcctgaaggaggattatattttattgtttgtgttgctctcttgacagcttttctttggagcctcccatagaagagagactgggatttaaaggctgatgccagaaagcaaaagctaacgtgaaaagaatccaagtctctgtccagtgtgtgagaatctgcaacggttcatggacaaggaataaaacaattaaggcaatgtcagggttataatacagaagaacatatttcaacccataaaattttggtttgagggaaaatgtgtgagagttattagagttcttggaggatgagcttgagaaaaactactggaaatactaagagattactttcttcttctatctctttttcttccctaagacttataaaagcagaaaaatgcaagattccaagcttgtctggacacagctccctgataccatcctatttcatatggcccacgcttagattttctaactagttctgactcctcttaagagcactcttatgtgtctacaagacctcctccccatagtggactctcagaccaagaatcactggttgtattatagaagtcttgcaacatatccaataatacaataatgatcctgaccttctcctttctcagtcttaataaattctgcttttaacggaagaagcatttttgagttaaacatgtatatgtattttttcaattgtttgaatttttaactttttctcctttaaactaaaaccaagagaggatttttaagaactggtgggctgctggactggtggggagggaatgaacaagtaaaccaacctgactgacctgctttcgtttttcaaagtatccagtaatatgatcattttgtaataaatagctgagtattacaccctttgggaaattgtggctctctgtttcttttcgttgtggctactttgttcaggatgtgtaggcagtgccattgcagccaaagaaacctgatcaaatttccttccttcccatcttatttatattctttgtgaaaagcccaaacagttgttttaaacaagtctggccactcgttaaagtttaaactagtagtgagatccatcaggagtgaagtgtttctgacactctctgctgctcctggcctagggtactaagagtattagatgccggaagcagccaattttgtagtgtcttttaatacacaaaattgtattaacatcaatgtggatacagatggatgcactgcaataaactgtaaccacttgagaaaagcctttattgactctcaagtaaataatgcacattttaaaggatctaaatatgcatttacataatgtgctataattttttatggtgtcaactactcacacacacacatccataagacatgtttttcttcgtcaaaaatctggactcataccattcttcgtgcattccattagcatcatgccaaattcataatggtagtttttttctataaagcctgatctggccacctcaaaatatagttgatgaattttactctttaattgatttaaccccagtggctctttctaaaatgatttgagacaaataaaaacttaggtacagtaaaaacatccaagatgaagagagaaaacaagaaataggagagaagagaaacaaagttaggcaggcattgatgacatcttaattctgagtttcagtgggtttcattgtctggtagaagaggaatagcaggttatctagagaaatagcatctatttaataataactagagctttgtgatgtcagtaacgtaactattttctgtttgaagaaatgaaggttcaggatctcgaatgatttctctccagttgcacagtgaactgatgactgaaccagaaagtccaaagcatgagaaagtaagggttgcaaaggatgaccctttaaaatgcagactcagcaattgcccaatttgaaactacaggctaaatgatttcctggtattaattaagaattaattgattcttataaatcagtcattgtagaattaattccatatagtaccatatgttcttgtgtttgtgttaaactctgttccacaaggaaatggtgaataaattgtttttagtaaaataaaaaacgaaggtctaaatttaagttgctaatgattgtcttttacgtatttaacaacaacaaaatgagggaaaggatgtttataacagttaatgaggagatgacagggtgcttttgagttatttcttctatctcatttctttaaagatcagctctgcttgatctttgctcaagtgaatttcttttttgggcagcattttctgtaggccaccgtgatttcataatctaacaattacccatcactttccattgagcacctgaggcagcggcactttatcttcaaggtcagcctaccaggggctcttgtcagcagaattggcacctttgtgtttggcattctgcaaaagttgagtgtttcgttttgttaggctcagtatattctcagcctagtttgggaaatatcacattctgtccttaactagtgactattccatcagacgcagggtaccgagtacaagttttttgccaccagcaaggaggactgtaccatgttggatgaaaaaattcctttgattcttgaaagccaatggcataatttgcagagtaagagatgaccagagccatttaactttttagcttgtgggttttaacaagcaacaacaatagatcccaagatttatcattcattgcaggaagtcctaagttttactcatttttctttttttttttttttttttttttgagacggagtctccctctgtcgcccaggctagagtgcagtggcgcgatctcggctcattgcaagatccgcctcccaggttcatgccattctcctgcctcagcctttggagtagctggaactacaggcacccaccaccacacctggctaatttttttgtatttttagtagagatggggtttcaccgtgttacccagggtggtctcaatcccctaacctcatgatccgcctgcctcagcctcccaaattgctgggattacaggcatgagccaccgtaccaggccagttttaccgatttttctaaaagctccctggctcttgaccaggtggagaaaccaagttttggttttagcaaattttattctatgtttaacggtatgattatcttattaacctctgtttattcagtcattcactgcacattcaacaaatatttattgagtgccagactcagttctggggatattgcagtgggttgaaaaggtatttacgaagatggagaaggctgggagaagtgtaagcttgagaggagaaggtaatgaaaattctgattcaaataggttatgtttgagacatcctcaattgtatgaccgatggcaaaatttcatctgttttggctcagatttgtttcttgagcccatagtaggagcctatgaatatttattgggcagattaaagattgcataaattaaagggttgcaccagaccacctgcaagacatggattggaaagttgcttcccctccaatcgcccatttccagtctttttgaaaactacagatgtcactctgaaccccatagcatgagccatttcagtcattagtcagaaagtgccccaatcatgaggagatcccggtagggaacaaagaacctatgcccagcaactaatacagatgcattctttttcacagcctttagccatgcaagtgggatagtggtagaagtgatggcctgtcttactgagtttctcttcagtattatgagtcattcttggtattggaaaggtcttattttccaaaatgtggacattcctgtgatttttagtttaaagatttaaaccgaagaaaggaaagataaatactttcatctcctctaatttgggagaggtttctctggctctcattgagaagcaagagctgctgctatcttggcttgacttggtttgaatatctgcaaccttcccatgcactgctcttatcctccagccagttttatcaatcatccttctaattcaagggcaaaagttctcttagagaagttattaggcacctcacataagtttttttaatctaatgtaatcttcttgttcacatgaaatttaccagggttcaaatgtaagggagcagtagttgtctgagtcttttatcagtttttatgggcacagggccaacattttagcaggggtcactgcctgcttaccctgtgggttcccctgctgtaacatatgtgcatttctgagtttgtctttgaaatggcatctgaaggcgacataaaccatccgtgtaaagtgaggcacccaaattgcatgggctcattaagtgatcatttactacatacttcaaaaaattttcatcctgaattagtccctagaaatttccttgaaaggggtataagaggtttaacaatgaattattgtctatggatagctcagcgtgaaaggggatccatatgtgcaaactagaatttgtcatatgtaatgtcagttaagtcaggtctaatctaccaaatacattttttattgcttgcttcattaaaaaggctcttaaggtaatgaataatcttcagcctcaccaaggattattaatgcctttataactcatgtccactgaaaatagaaagacagcttgaaactctaccctaatctaacctccgtgtttgtcttagagccttaaggaagaaaatctgtcagacctatccagtgttaaattcagtcacatgagcaatattgtgaatcgggccaggaagagaaataaaggaggaagttgaatcgggttcagctatgacaaagcaggtctttcttttcataaccctgatgttttcttttcctgcagcaagtccgcatgcaacaccatcgactcttcatttcccgacatcacccattatccagcagcctgggccttacttctcacacccagccatccgctatcaccctcaggagacgctgaaagaatttgtccaacttgtctgccctgatgctggtcagcaggctggacaggtggggttcctcaatgtaaggaaacctctttttttccatttctttagaaatgttagccgaatataaaaataacaaggggagaccttatgatcatgtgacgttgtgctctaatgttgtgctgactgactgcaggcaaatgtcatatttattctagattgtgggaaagttaacttggtctaagagtgattagtcagggtttaaaaacagtgtttgtgttaagtttgcaactgtcaagtttatggatataaatcagctcaagggtgaactatataaccttctaagttctgtgggctgatcattccacctcgtgcattctaaccccagggctcatacagttaacaaaatagaaagaccaagtagttttaaataatgatttggggtggtagagaaaggtagggagatgaaggggacagatgtttcagatcaactaagttgatatttttgaaaaatacagtcttgtaacactttagatcaagttgaccagtacttgaactcaagatgctgaaagtacagtttattatggtttgttatttctgcaagtcattatctttcccacttatcttggtataaagctaaacagtgttcaatagcttcacatgaatgtttttatttttcctcaaataaaccaaataatcacaatttgaaatggcattccaaatgtaaaagtgatttttaaaaatcagaaattttatttcaaatataggattagatgtttacagtggaaagctgtatctcaaggccaataataataaacaacgaccagcataaagccaaatttgattttccttttctactaataactgtgcatgaagtcacagactagccataattattactggccaatttaggatagtatgtcacaccatcctgtcaccgatttttttcacttgcagaaatacctgattctgcatatctgcgccagaacaggcagctttgactaatgtctggtgatgtgttagcagatacatttctgtctagacaacaaatcaatatggtgcctcttttctttttgcttgtacattcatttgcttggcttattctaaagcattcacttatggactctcagcccactcagaaataacgcaaaggcaaggttgctggcaagaaagcacagcattctgatcgtcagacgaggtagtctttgaggagcaatactaaatatataagtactaaatatataagtaaatgttgatgggggagtgagactgcctctgtagaattattaagcttaaatgtaaaagcctgggacagcagaatctccttcaaccgaattttgattggggactaaatgtgaactgttgtcgttggttgaatagaggcctcttgggaaacaatgaaaaaactgagctgatcaccagcatcaagcatctgacttctaaattattaaccatttttgtaatagtcctgacaccctatataactgtcaaatgcccagttttgcattttgatcaaaattttataggacttaaggcaggtctcttcatgaaactattttgaaaaaattgaaaataaaatgggttttattgctctctttggaggggaattttttgttaaagagctgttatttggttgttttaacatcaggcagcaaaataaatatgactcttatggcatatgcttatataatttaaatcaaaattagaagtgatatttttccctagcagacttctgacagctgaattctaaagtttctgtgcctgatgttatacaatatgtgaacaaaattttctatgttcacttaacacatttattaaatgttatataatatcaactttgaagagtgaaaataaaatattacttttttatctcaagtgcatatttaggaaaatttattctatctatgtaaagaaacatagtggaataatgccacagtccataaaacacttagatattaaatatttaataatcatgagaaagataatgaaggtagcagttaatacagaaaaatacaaaagattccaagcaaaagttggttactcaggggacaaatccaaagtgataattggcaggtgattttatgaaaccagatgcaaagaaggacaatgtagttcaagagataagtttaggatgcatggagcacatgtggctaagagtacttttgtgaaatgccttaagaacagaacccaacaatggacatttccgtatgggcttatggaagaattgaagcagctagatacttagtaatttacattaaaggtgcctgatgaatattttgttttcagaagcagctaatggttgctgtctctttcttctttttcttgtacgtgtgttttctgcccccccccccctcacagcccaatgggagcagccaaggcaaggtgcacaacccattccttcccaccccaatgttgccaccgccaccgccaccaccgatggccaggcctgtgcctctgccggtgccagacacaaagcctccaaccacgtcaacagaaggaggtgcagcctcccccacgtcaccaagtaagtatggctgcgacaaggcgccggtcacttctaaagctgtatgcactggaatccacacttaggctttgtccctcactgtataggctctagaaagaggcacagatccccagtgatgttgtagcatgagtttgccagaccgagaatcaaagtgaacatgactcttgggtactccaccagatgaggaaaacactgggtgttgggtggatgagatggtgtagctacatacctaggactgaagtcaagttatgagctattacattttgtatattatttgagggatttcaaatgctattcccatcatcaagcagcagctacttacatggattctgcttagaaaaagttcctcattcttacagacagccctgccttccaggaacttgcagtctaagagaaatgcacttgaaagttatatacctcatacatcaaataggagaaaatgtctagatcaaagcaccaactcaaaggtgtgtacactgaccattcgctgagagtaagagcctggcagaagatcaatgctagtagccctggcagtcgcatggtgaggtttggcagaggttggggtaggggctggggtacggagatagaggggagagtaggatggaaggaggagagaagtcttggctcttctctgaacagtctgagaacatttaatcaaagaatataagatttcacaacccttttagatgatgggaatgattacttgaactagagagagagtaattctccagatattccctgatgttttagatatggcaaggggatagaaatagtttgaatgcacaaatgtgccttttattagtgcctggaataatgacaaaaagagtgatggctggagttcctaggggatggatgccctagccttgatagatggtgtgatgagcaccttccctaaagctgtaaagaggcagcaaagtataagagaaggataggagctgtggcagtgtgaccctaaggaaagccttcaagggggttgtcaaaagaagtgagactgaggcaaggaatctacagaggaaaggatgtaagagcagcataggaaaggagtgttaaggccaagaacttgaaccacagtaataggtgtagaatggaacgggacatggtggggagtgttttgtagacataagcatcgggattggacagtcctctggatgaatgcggtgaatgaagattctaggcctctcagcttccttaccttcagtattggaataataatgatagtgaatacaggagggaaagagacaaagaagaaaactgagcccctgtttatgccatgttcatagaatttgattctgggggcacggaatccagatggctagaggccctcatggacacatcagagagtgagctttgggttatccagtatttatgcattttgataatatatgcagaaatgagcagcactgtgcatagattctgtatcaatagccaaaagattgaaggttcaggggcaatctagggaagacctacttctcttggtaagaggtgattcaacacttgtcaacaaaggagaaaaccctcagtgtccaatgacagagaagcaagctgggcttggcccatggatcttagaagctcagcttagaaggaaagcctctgcttctcagaggtttgaggcttgttcaaagatgtcacataaatacacaataagtgccctgctcgttgtgtatttatgtaacatctttaaacaagtcagagaaataactgccccagactctacttacatctgttccttgaggatgttggcttacagattatgcctactgtgccctgtccatgcctctgcataccattttctgctcgtcttctctctgtctgtgcaggacattgccacagtcttttaaaagctgcatagtaatatgcaatcaattccgtggaaacagatcctcacctccactctcaatggctcgtgtgtcctaatgagtttttcagtaacgggaatgaggctctgctgaggcacagcagaagagtggaaatagtaatgtgtggctgttcaagtctaaaggatgggggctcaaatgcccacctttcaaattactaactgtgtttctctttgaatcaatttcctcttctataaaatgtagatgataatatctacctggcatgtttgttgtgagatcagttctgatcattggagtattttattatctgcccaaactcttacatagtggaagactccaggcttgggtaatggtaaaatatatctgtaggacttggagaagctactcaacccctaaattgagttgatgcctttgggtccacagttctagactccactccgtggattgaaccaagtgctatgtataagatgatacctatcatcctcttgtgcccagcctcaagcatcttgtcagcactaaggggcaaagggcagaaggagtcttggcagatccaactcatatggttgcatgttagagcagcacttaagatttggggtggggtgggggtgagagaatatcaggagaaagagtcccagagcttgatacagataatttgatacttactttttgaatcatgggattctagaaatatagacaaaacaaaatgttctaccgatgacacagaaaggtttttatcatcattcattttagcccttgttcagctaaaggcttttctagggtatgatgaattcatagtaatatgtagtttcacagcatactattgcttaccattttctgctttcttaacaagatggtgttaggctgggagagctgtaatttatagcgtaggagaagcctttcaaattaaaaatcttgaagcccactcatccttatttggaggggatttaagggccctcattttaaaatatcgtctcccatgccctgatttctaaaccaattgataaataaaatatttttttaaatcagaagacaaaatatcacctttattatgagagaatttagtttataactgtgggcagggcacttcctaacactgaacccccaattacatcgtcatagctaccaggtcgctggcaggactagaccacagcagcccttcctacatatggtccgccctagcctgtaaagctgatggcatgaaggtgcgggtggcagtgtgcttcccaccagcacctgtccccgaagaggaagagacagggtggggtggtagggactagtcatgtccagtttttcctttgaagcccttacaacctagagagtaacaggtgagagggtggagagaagccaagagtagatggaagggaataaatatcaggagtgaagtagcttctccctcccttaacattcatctttgatgactgcctttttcattcatttattcagcctgcacctatcaggcatctgtgacacggcatggctgtgttagtgtgtgggattcagagatgatggatccctgctctcaagaaatggggatctattgagggaaaggtaaacaggcagtttacacaggatgacaccgggataaaggtgtgtataggtgccatgtgaagacatgggagggagtttggtccagtgtgggcctccaggtaaaggtattttagaggagttgacttctaagctattcagtagggatgacatcctggtgtcttaagagaagatagaacttttcttctgaaaccagctgggggcctaaaattggattaccactagataaaaatgtagggcaaaactatagtttcagaaatcaggtgctttcttagaaattaaacacacaggttgagtggattctgtttatcttgtcagcttatgagagctcaactttagcaagaaggagcatcatgacagggtattcagtacatgtgctcagcatcccaacagtttgatgtctgaaatggaggctgttctcaaaaatgtaaactgtatgatgtaaaacagccttttctatttaggagtttgagatgacttgcaataaaatacaattctaaaaataaatatagggactgggcttcgtggctcacacctgtagacccagcactttgggaggcctaggaggcggggcagattgcttgagctcaggagttcgagaccagcctgggcaatgtggtgaaaccccatctctacaaaaaatacaaaaattagctgggtgtggtggcgtgcacccgtagtttcagctacttgggaggctgaggcaggaaaaatgcttgagcctaggaggttgaggctgcagtgaaccaagatcacgccactgcattccagcctgggtgacagagcgagaccctgtttcaaaaaatatatataaaaataaataaaaataaaagtaggaaaatatgccaagtgtcttctgtattatcagcttttctagacctcaactcccttatgtattgatggaataacactaactgctctactcactctcgtagtcagattatcagaacaaacaggagtaacagatgtgctgtgctgtagacggttaaaagtccaaggcatcatttttaatatcttcttataatgaaatacaaatggatgccagcctggagcagagtatgtattttttaactaatcagttgcctctggcactaatactaaactttgcagctgtggccagaaaagcagggggaaggcagatgtgggggaaaaaaaatcctgtgaaataaatacattttaatgggaaaaatccttaccagcgccctaagaagtagggaagtgggggtggggcaagaataatttttataatcttgatttgtttggagaaagattgatagactgtgccaggtctctttaggatactatgacaaatggaagcataacctgtaagagcatttcacaaccaatgtgctccattcccacagattaactacctgtgtgggttttgatacctactgaaaaaggaccacttctttcatttattcaataaatgtttattgagcatcagctgtgtgccaagcactcttctaggtgctaggattcagcagggaatccctggccttatggaactttgattctagagagggaagaaagacagtgaacaaaatagtgagtacgaaaggtacgtaggatataagatggtgatatgtaagtgctacgtagggaaatcaagctgagaggggagggatgcagctctaagcagggtgatcagaggagggctacttgagaagggcaaatttgaacaaagtctggacaaagacgagagggtgagcaaggatgcagtaggaggagaggtttccaagcagaagaaccagccagtagaaaggcagaccaatgtggtgagatcagggaatgaaagcaagggggtgaggtcagagtggagtgaggatgcatttgggaccttggggatgtaaattacaccggttcttataggctcttataaggacttcagcatttaccctgagtgagatggggcagagaggtaatgccacctagattttaatagatacatcctgaaggttttgttgaaaatagattgtcaggagcaagaattaaagaattaaagcagggagttaaaaagctggatttttccaataaataaaatgagcgtcttctacatgccagccagcattctaggtataagggatataaaagtgaacaaaacagacaaaaatcccttgccctggtggagattacattttagtggaaggggataaacaataattaaaatataagtaaattagcgagttaaggaccagtaagtacaatggagaaaactaaaacaagcagggttgatagggaggggcacttattgcaatcttccaggcaagagttgctaatgacctgcaccaacgtgggagcaataggggtgatgagaagtaagcgggttccaggtatatttgaaaggtagagctggcaagatttgctgacacattagatgtgggttgagaagaattggtgatgatgcctgtgtttatgacctgagcaactaggatagagttgccagcagctgagatgggaagaccacaggaggggcatctctgggtgaggggtggagatcagaagttcggtttgaccaaattatgtttgagatgcctattagacatcttactgctggacttatcataataagctgcctttcacagctctttgcaggtgactgggtttttctgtgtgtatcatctcattaaattgagaagggactcctttttgaacatgtagtacaatgaatgaatagacctaagagtcctgagaacagctctggcatgggacaaagctttcattatgtttgggtctgtttgtgctgtggtaattcaaaatacacaattctttctggtaactgtactttaagttccaatttttatattgtagattggaatcaatatactataaaaatggacttttccagaaaaaaatgaagattggcatcataatctagagatataatagaaagagaaaaaacacttttgaattatgatggaagataaaacatgcatatttttttaattaagtaggaacacaaaaactcaatttaaaaatgcatgaaagacctatcaatatgtttctccatgccttcttcactatgaactttgaattttttcaactagaattctattaaaatagaagcatataataagttacctttattatttatttttatatctttgatgaatcttgtatatattcattatacaaatgaatatgaattcgttagccaagaacctaacaataatctatgactgggatttaaaatttctcgtataataattaacatgtgttcaatgctttttggttaacaaagctctttttacatatgtattatcttatcccatcttctcaacactcctatgaggtcaggatttcataggcaaggaaactgagattggaagatggaggttacattcccaggttagtttggtagggagtcaaatacaggcctttccatgctctttctactacctcatactgtaactgaacaaattacaaacaatgtcactagatttctgattctggggggaaccacagctgtctgctactgtcagaaattaacaacaacaaagtattttgctttttttttttttttttttttttgagatggtgtctcgcttggtcacccaggctggagtgcagtggcattatctcagctcactgcaacctccacctcctgggttcaagcgattctcctgcctcagcctcctgagtagctgggactgcaggcacccaccaccacacctggctaatttttgtattttttagtggagacagggtttcgccatattggccaggctggtctcgaactcctgaccttgtgatccacccgcctcaacctcccaaagtgctgggattacaggcatgagccactgtgcctggcccaagtattttacttttacagatgtgtcaggcacttcacaaattgtttttttgtttttttgtttgtttgtctttctgcaacagagtcttgttctgtcacccaggctggagtgcagtggcgcaatctcagctcactgcaatctccatctttctggttcaagtgattctcatgcctcagcctcctgagtagctgggatgacaggtgcgcaccaccacttccagctaatttttgtatttttagttaagacagggtttcgtcatgttggccaggctagtctcaaactcctggcctcaagcggtccacctgcctcggcctcccaaagtgttgggattataggcattagccactgtgcccagcccacttcacaaaatgtttttatatatgtattatcttacttcatcctcagaataatcctatgaaataaattctcttgttagccagattgagaaagacaaggcatggaaagataaagtaactttctcaaggtcattcagccaggatgctagagtcataatttccatccaattcaccttcaacctagagctcataggcttggctgtagcatgaggatctttgctttagcccaaagcttcttggttttttggttttttgttttgtttttttttttcagtgaaaacccaatgggagaaatacagaggaagatgttagtagttgtttatacttaagtatgaattggtttctgttccagagagtgcatcttattagcaggtaaaggaagagagcagaaagtttgaggggaaatataaggactgtgtttcctctgtcagagaagaagcagtagattttaagaaagaatgaaaaaaaaggagttagtggcttccattcgcggaactgttttttttcattagtgacgcctggactatgttactgttctttttcttaattttaaaattttacattcaataaaattcactctttagtgtacagctctgtgaatgttaataacattcttgtaaccaataccacagacaagatacggaacaatccccaaactctttcattgttctcacctactcttagtttaaagtctgatgtcacttagtgccagggaacttattttactttgctcgatttccatgttgattttaattcctctaccagtgctgctgctatcccattatgtttcaaaaattgagagattatgaaagagacttaaatacgtacagtattttaatctatgataagagtggcattttatattagagaagcaaaaggggttagtgagtaaagtatattgggacagtctggaaaaaataatgtttcttacatcaaaacaaatttcagccggaatcaaaaatataatattaagccataaaatagcacaagaaaatacagggcaaatttttatactattggagtaaagaagggctttctaaataatgccaaaaaaccagcatccatgaaaggaaagtatccaaaatttatgcatggaaaaaacaccatgaacaaagtcaaaacacaaaagatagaaaaaaaattgtaacagacgtgacagggctaaattatctaacatataaattatttttaaaagttagtaagagaaagaccaacaatccaatagaaagacaagaaaaggatataaacagaaaaggaaaacatttgaaagacatctcattcatgtatcatgagagcaatactgattaaaacttgagtgatatttttacctattagattagcaaagatcaaaaggtgtcttaacacaatattggtaagcatgtggaaaacagacattctcttgtgctactaaaggactgtaaattggttcaacctctacagaggacattttagttttttatatatataaaatgtaaatgtgtgtgataaactttataacacaaaaacatgtttacattttgtacctatattagtacatatataaattttacatgtaagctgtgcatacatggctagggcatatgaacaaaaatgtacataaagtattgattgcaacattgattacaataagagactggtaataactgaaatacctaccaactgagtattgtacattaggagctctttaaaaataaaaagataggtctgtctccatgaattcatggactaatccttgagttatattgttacattaattcagcaaaggagagtgctaagaaatatgtatggaatgctgcatgggagaggggatgcatgtacgtatcagactgtatgtggaaggatagaaactaatagtggtttactccagggaaaggggcaaggttgttggcagacaactttttggtgccttatccagtgagaaagatattgctaagttttcagtcctccttttatatcaaatattatgatttctttattcttaaaaatatttgtctagtgatctaataatcttgtttatactaaaatgatgacagtgatcaaaaccacatactcacacatgggggagttcataaaatccttggcaatttttatacatctagcttttagctgtactaacctgaacttttggagtgattccaaaaatgtgtgatttttctagtaaaaaataatactcttttccccctcacagagagcatggggttcagtgtaaggtgagcattttcattcacagtagctattagttggttgcaggttctgccttacgaacccattaaatataaatgtacttgtactatcttgtaacataattggttataaatactttttagagtattttaattttgtgtagtctaatattttggtgtttaaattttttaaatgaaaagaaaaagaattattaaaaatcaagcattttgataggtattttcatatgcattaccttagttgcatttgttattataaatctgcacaattggaattattagccccttttaaagaagatgaaacggagcaaaggttcagatcccagtctgctggactccaaagcccagtgttttctactctaccaggacacatactatgtttagaggtgtaatatcatgcagctttcctttgaaaatcttaaaacaccccattaaaaatcttttacattacgtcaagaataacaccatcctgggtacattgaaatagatgaaaaacatggaaaccaaagcaggaaaaagattaagagataagcattacaaagaaggaataggaaaaagaacagaacattggatgattccattcatttgggtcgtcataacccagtcaactcttgtgttcaccttagttttttattatttcagatgacagatgagtttaagtctttctttataaagataatatatggcattttaggaaatttgcaaaatatagaaaagcataaaaaagaaaattatattctcccattatcaactattaacattttggttttgtttcctcatctttgtgtgtgtgtgtgtgtgtgtgtgtgtatacacatataagatgattgtgaccatactgaatataatatctagtatgccattaattcacattgtatgccttttcgtactcaaaaaaaagttaagaaataggattttaaataatttttacctatattcttactataggacataaacttttcttctaacctatggagtatgctccagcatatccttagacatgtatttttgtccccaactctaataatttttttaggatatgtttctagaattggaattgctaatacaaacagtatgaacattcctcttgatacacattacttcattgctttcagaaaggttgtgccaatttacaccttttcaaattgtgtacgagtatgatcataacattaacccttgagaagtttgggtgttatcttttttaattgttggaaggcaaatgtgttggggatataatgtcccttatcagatattggaatcagtagtccctgatgaaatgattttagtgtttttctttacttgtatcaattatattaaaattggaattttagggatttcccatcctatttgcaaagcctctccatagggatcaccctttggactgttcctgtgaagagagtgacctgttggatatcacagaggggtaaagccttagttaaagggctgggagattggagtaatgtccattatactggactctatatagagaagttcagagaggttaactggcttgccaagatcacatttctaataagagatctaatgaattcaatccaggatttgctggtttttaaaatttattttctatttactatgttgcactgtctccaaaaaaagtattatttgagatttttaggttccatttgtgttttatttaagattaaaaattactggaagttatttaaaaatcatccataatccggctgggtgtcatggcacacacctgtaatcccagcacattgggaggctgagacaggaagatggcttgagcccaggagttcaagaccagcctgggcaacataatgagacagtgtctctacaaaaaataaaaatttccaggcatgtggcacacacctgtggtcccagctactcggtaggctgaggcaggaggatcacttgagcccagcaggtcaaggctgcagtgagccatgttaaagccactgcactctagcctgggcaacagagcaagacccatctcaaaaaagaaaaaaaaaatcatccataatcccagtcttcaaagacaatcactctctgtgcatatttcccagtcattttctgtgcatattttaatcataattgatcatgatatatgtgtgtattatacagttttgtaaatgattcttattttgtcttataagcacattacattattattttaagatattattaatggctgcaaaatattccaatgtatggatgaagcattaacttataagttggttccaatttgttgctcttataagtaatgatgtaatgaacatcttgtagcataaacctttatctgtattattagtatttgtggaggataaattcctgaagtagattccagagttgcactgccttttgagaggctgcagaagtctttcaagagggagcaatccaatatattgatctaagtttctttttttagcaaactccagctgaatccagggtttattccctgtggctatttaatataactttcacctgtccctacccatatacatggttgcttctgatcaataaacattttctgtcaattgagcaacacacagcatacacataaaaataaatgacagtcataaaatttggatcagccatcagaagtaaatttaaatgaactgaaacaaagttgtattcttagcctttaaaaactattatgagaaagaatgttacaggcagttcagacagacagactgtgggccaggtgtagtggtttgcccctgtaatcccagcactttgggaggccatcgcaggaagattgcttgaaaccaggagttccaaaccagcctgagcaacatagtgagacccctacttctacaaaaaataaaagtaaaaaaattagctgggcaccttggcacgtgcttgtagtcctaactaccggaaaagctgaggtgggaagatcacttgctgcaatgagctatgatgacatcactgcactccactccagcctgggtgacagaataagaccctgtctctaaaacaaaagattggctacaggaaacactcactgcactcattgtaaagtgccttcttcttgcacagattttggtaacataaggtcaaagcgtctccagttgaagggttactctggtctcctctctgtgtgcacattataacatgaattctcttgcacctccctttctatactttttaccccaaattctgatatagcttgacctcctactgcccttaggatccttaatacaaacagaaatactaacagagcaaagccatctggccagactatttcttttcatggtttttgtgacttcttggcaccttagacatgccatgcaaatagttagcatacacgttaagcattgctaatatatttaagttagaattcattagcttttcaggaaggaagcttgtgggtatgttgttctgtaattactagcgataaggaggcttttattctgtgccctgagggttgtgagtttttgttgttgctgttggtaacttgtttgtagagacaaaagatttgcagaaataataggacgaggtagctgtacagatgtgatcagaataatagaaattcggcgtagttatcctctagatgctaaacatctggataaaaactacaacatccattccatcatgtgggggtttctaaatctctgaatattggatcatgtgtaagtaaggcctgtagatttttaaaaggctgtttctctagctatctaataatattactaatactaacccaggccctgtaaacttgtcgataccaattgatttctttgaaggagaaacactccaatactttctagcatttcttttgtgaccttgtaagaaatagtgctgttcaaatttttaagtgagttcagttgtaatggtttcatatagaaattagccgatatattttctaacagtttctgcattatttttagaaatgaaagttttctcacagggccttttttttttttaaatagcatgacagtgcagttaaaagattcgggacattatttcaatgaggtatttagccacctccttgtttcagtttgcaactgaatgcttcttaggcacgtttcctttactgccaggagtcactgataaacatttaataaaattgcaatttgaatacccagggttctgtttaagtctatattcctgaacttgttttgattacttttgtctaataactggcaaattttgagcaggtagtagaatcatatagtaagcctattttgaataaaattgaattttcgactagctttagagggagactcccacacatgaatatgtctgagtttctgaaaacgagggaacacatgaaggtgcatcttgatatttgagatgagaagggaaaggtttagagtggaagaatgtctagttgccttaacagtgtttagaattgaaatttggtgtctgtttattttgtaaattatttcctcctcttaaaataaattcaacaggcttcttgcccgtcattttcaaacatttagatccctgatccttaaaatattacctttccttgctgtatggcaaaacgtaatttgcaatttctctatcttctcctttccctccacaattgccagctccgttccctgcctctgttcctccaattgtgctgtgcccttggtggcctcagtccactggaacctgtcaatcaacacatctttcacagcccatcccagaggcccgctccatctcccctgtaaggcttgtcctgttcctcctgccagtgtcacttttctgtcctttacaccctgcagagttttatttatattactttttaggcactcatgtttccatcttctgtacttatctctccccattaggctgtaacatgttggggatagcagcgtgtctcactcgcctttgcatcctccatagtgctcagtacagagcctggcacgtagcaagtgttgaaatatctcttggagagagagaaaaaaaatgaatctattaaaatgtctctatgatgcactgcggaagctagacttggtagatcgagtttaagggaatgaagagggggtgaatgtttgctacttccgtatatttggagtatttgataaaacagaagaccagtttctcttcaaacttcatgtcggtttgtaggccaggctgccagggtttagggtacctcatcgcttcctgcatctggaagtaaattcagaacctcaaagctcaccctgccgtatcttttctgccaaggtgcctcacattttcctcctagctgcggccagaggagctggctgtcactcaagtaggtcagcctcaggtgaaaccagccacttagcctccttctgggcaccctgtgggtatatggaggggtgtttgttcaaagagcagctcccctttcaggtttaccctttacacggaagaaatctggctaaattttctcccttttctgcctttctgtgattacatgtattttagtgattgctaaatttgaactaaaccttgaaactaactgcctgctttcaaaacaaaccaatgtgaactcacattttctagtttgtcagatttggggaattttattaatattatttttatcttaaagaaacatcaactggctgagtgtggtggctcacgcctgtaatcccagcactttgggaggccaaagtgggaggatcacttgagcctaggagtttgagaccagcctgggcaacatagggagacctcatctccacaaataattttaaaaattagaagggcatgatggcacgtgtctgtagtcccagctactcaggaagttgaaatacaagaatcatttgagctcaagaggtcaaggcttcagtaagctgtgttcctgccactgcactccagcctgggcgacagagccagactccatctcaaaaaaataaagaaacctcaactgacgttggcatgaatattttaatatcttaatatcttcttcttcagtcatattttttccaaagacaagctgaaagcatctccactcaaatcagtttgaccacgttttcaacaccatgttcaggtataatggttgagtgaaggctattacaaactcaaaactaattcatctggaaatgccatggttcgtttttgcagatatatcccttataccttcccatttggaaaaagaaaaaaggaaacctaccacaggaacaacaaaaactggaatttgtttggctagcagtcagtaagccacattcatttctgaggacgtagaggccgttcagtcctctcagggacatccgccatgataaacagcagtgcttggtcccagcaccttgggaggccgaggcgagaggattgcctgagcccaagagtttgagaccagcctgagcaacatggcgagacccccgtctctatttaaaaaaaaaaaaaaaaaagagcagtactgatggatgattcccctactaaccctctccaccccactccctcatgtccatgtaccccacagtgcccctagagataattcctagcatcctcagaggccctgtcaaactattgttcataaagagagaactgttcttgagccattccccgactgatcttagggaggcaggactggtattgtctaagtgaaggattatataattagcaatgcctaccataagggggtaacacagaaagaatgcaaattttctggatatgggatcaaattctggtttgggattttgaaacttactgctgtagtgcaggccaaactaagactcttggataatgtgaagaaatacattagagagagagagaaaatatggtcagattagtgcaaatgagatctggccagaagcttcttataggaacattcttcaatgttaggaaaatggttcatagcgctattgctaatataggtaaaatggctgctaaaaaaaaaaaaaagcaaacactttctgtttcagaagcagccaaataatcaatgatttgatttctaatagtcatgtttgccataaggattcttataataagattaggtagccaagttggtttccctgttgactttatcagtaagtcatcaagtacttctgaacctcccctccagaatgcccaaaaatgtcctacaataatctccccagaaaactattttctggattttattatttttcatagttctacctacagctttgattattgctgttgtaaataaggcaagaattgtaattaagaaagatatgaatatgatataatatcatagtatacacagttgtatgtaattaattaccttattgcccctttgcttgattttatattcacattgtaagctcttaactgtgcatgtataattgattcactatggtaaatgtggttgttttaacaaaaagtttcaattaaggttttattcaacagtgtaattcccttatccaattgtttctgtaggaaaatcaaattcaacttatgttatatcatttttgggactatatcctgttataggtaactgccctgctagaataatggaagatgagtcagaatttctttcttccttcctttattttccctgtgtccttttcccagaagctagctttctatggaataaacttgcctgggcaccatttgtcccattctttcacttgagtactcaaagactagtagacttttgtagctgttatatatgaatatatatgaatatatatatatataaatgcaaaccccctagcacctctcttaccattgttctttttcttaaagaactagaatcaaatttctagaagctctggtaggctttgatagcatgaaaggccttctgggatgttctgaaactaagactgcaagttttgtcccatgattgaagaagagaaaatatctgattgttggcctcatagaaattttgtgtagctaaagtatttgcatgctaaatctttcaaatggagaaattgaggttaagcaaaaataggtgatgggatataatataaatacctttccagatttagcaagcttgctatagtgaagctatcttcacaaaaaatgacacccccccctcaacccccagaatggcttctgtgttgggatcagttagcatgcttgttttggatgtccccagtatggtaagaatgtcataggaaatcctgctatgtgtctatgatgagcagcaggcgagtgcacactgttctatcagggccatcaaacatggactcacgtttcagcgtctgtcatcaatcactcatagacttcataccttaatatacccttcattcctttttgttccttctcaacctacctacctattcatgtgtgaaagaacacttttttccctaaccactaacaggttcaacaggttatttcacctcctagcttcctctttatccctcccacatcctctttgtgctctaagagcaggggaacacactatcagataattatagtctctccttttcaatataaaaactttatgttgctgtttctcaaagcatatcaaagtaaagccatggggtgaatggtacacttaatatagattattttactgagcttttaaaaaaattaaattacccccataccagtaagtgagaggtacaggcagaatggctaaaggcagaggtatttctcaaatctgttcaaattagtctggcatagcatgggctagagacaaaatcagtagatttacattgctagacagtatgacatatcatacatttagatcattttaaataaagtcattactgaatagatcctcctaaaacaaatactattaccacaaaaagtttcttatttaagagacatcagggaccctcatgctcagcctctgttcagtgccgttttaacacagccatgtccacatccatgtgaccattgcagatctgtttgggtggcttagctcttaccaaagacaaccaacagggtctgggccagatggtggaaattttatccctagatttgtttaatgagagaaacaagaagtatgagcaattttctgtaaaacagaaagccagagtaagaggagcagatgatgtcaataaggaaaaaaaaaatctggcaggaatttgatatcatgccctcaattatctgtgttttaaaaagttgcatatcctgattgtttcttagatggtgtttgtctagagttagcttaaaaacctagattgtttcttagatgatgtgtgtctggagttagtttaaaaaccttaggcctttttaattattgttaagacatttgaaatttttaagtaacagtctaaagattctagtacagaggaagaatgtgaacaaatccttggaggtgatgataaagaagtgaattgaaggacaccaaaaaacaaaatgtacctttggatttatgagccagtgaaacaacaaagccactgaattttttcccattaaagtagaaagaagctgttaagtacagatacaaaaaccaacaacaaaacttccatgaaccaagaaaggatagtaaactgaagtgtggtacctgaggttccagtgtgatatcttagttgataaagggtcttgatagtttatgcctgaacagaaaggttctaggatgggaagactacaaatgttaatatgaaaagcatattttgtgcatcataaagattctagacactacagggcctctaaagacagcttattctgaatggttttctatctccttcctggagaacccattagttccttctataaagattcctcttcgatctctagctgtagaggcacaggaccatttcatgattttttaagagtgtaacggtgtgaaaagcaagcttgtaaaatgaactgctttcctccccttcctacctaatttctttctccctctgctctaaagaataggatatctctttctgactccagagctcatgtttaactcagaaagtatactttgcaaatgtcctgcatgttctaatttgtatggtagaaggagaaaatagctcgtctgagcattagtttgacatcattttatcccaacagtctttggaagccaatccctcttcccccttttttgactgtctgaaatgcccttgctagccagacccctttgctagctacagtgtttgcacatttccttgttaatcagctgcgtcggctcggagactgtgtgttttggtgttgtttgtgtgtgcaatctcgtgccgcttcctgaacgcatgtgtcccttcccttcacagcctactcgacacccagcacctcccccgcaaaccgattcgtcagtgttggaccacgggatccaagctttgtaaatatccctcaacagacacaggtgggccgctctcatcttttctgtatgtggtgcagcttgtattattcatcaggtgcattttaacttgtcttttggcacaaaaggccacattttccagaccctgtccagtcttccctttcctcctgatcccaccagccacatttccatgtgttctcagaaatcacagaaaattttgcctgcaatttttgcttcttgtattgagtgggtagaagaagaactgttttagctatggcacaaaaaggtttcccagtgttagctagtgtgtgttccctcttataggaattcatggtcctctaaatgcaagcagacagaagcaggcccctacagaacctgaaagtaatatctggttgccagtgacatcagagtgcatgctgggcatggagggaccagccactcctctgtattcattagagggtccccaggcacctggcaagctttctaaaagaaagagggagaaaagggtatatgagccctattaagttgctggtgttggtccagaaataagacgtgtttattagtggttactgctgaccactggggagcaaggtgcggtgggtggcaaggggtgtgtatgagtcatatctgaagcaggtgattgagagaagaggactgctcagacatccagagcttgtctgcccatagacagttgtgttttgtgctagtctaggtcaaggagaagaaatatttttgaaaagttttggaatggctgctgtatattgagaaacagtaaaaggctttttaagttcaaagttagtataggtagaggcatttagaggtttgtgaaatagaattagattcacgttttgaaataaactctctgatttcctaattagaacatggcgatattttatcataattaacataaggaaagtattttctctgtaaggttcttagcgcggtgtttgaaaacattcttggagcaattttgtgcacatgcctgtgtgtggaatctccagatgcctaatttataactatttgcctctgtttgtaaaactatggccaggtgctatatgaatgggatagatttgccttcctgggtccatttgccccctctgtaaagggctttggtttattgctatgtcgacagcacaggttaaactgcattgtatctgaagccttcctcacactgaagcagggtcacagaaagtacagcatcagcagagaaggcagctgggaggacagggggagctaaaaggggagggagaaggttaactcttgaatttcccacctctgctgtttcttcttaaactggcctgcatatggcgtctgatattaaaatctcctattcagtacctctcacaaaattctttcagttatttgcttattctcccataccttcaaatattcaaacacttttctggtgaatttgaagttgcataattacctgtaaagcattaaaacagaagaacataatttaattttgtacatttggcgtaagtgtccaagttcaatgagagggggaaaactggagatggtggctctatattggatgattgcttttcccaaagcacgaatgtcctcaagttgcttcattaagagcctttaaaatgcagctttgaaatgtcctgtttgtattttacatagtattttttatataagctgtgattcacagccctgaaattgtatgctgtgttcttttcaatttatttctttataatcaaaatgtattatatgccactgtggctttccttcacaaatgccttacttaacccagaatctgagttttcataatgctgaccacaaaaattcaattcttaaaaatccagattttccacgcatctggatgaatgatgtcatgtaggcccagtattggcatctggaactgaattttttttttttttttttttggtttctgttaaatatttggcgtcatggggacaacagcttaaatgtttcttaccatagtgacacctgccacatttggcttgaagaaagtcattcccaattgtctaatgagaaactatgttaatggagttgtcatttttcccccaaaaaaagatatcttgaggtaaaaattatgtgttctaaatattttaattttaaggtatatatattaactcttcccttaaatgaggaactattttctgggaccacttaaagtgttagatatacgtagatatagataataaaaataataatataccttaaaaaataagttccctttcaagaggacatcagttcagaagaggaatttttgacaagaatttttaaaaacataattagaacatggtcggcagatttcctaggcaaacttgtgtttttctatattgatacccttgttacaaagcatgacatttatattaattgaattacaggaaaagttatctgggaaaacaaaattttgctttctacctatggagaaataagaattgaagagtcacccaagcagatacttaagctttctaaatgtagaagcagtatcttgtatataaatctataaacagatgcaaaataaaatgggctttctgctcccaaaggccagtatccagtggaaatctcttaaaatgcctgaagcatcatcctgtagaagatggaactgatggggtctctgttttttcaagtgggtagaaattgaaccaatgcagacattataagtaggcagcttcagactatcataagatcttttttaagaaaaagagttatttgattgtatatagcttctactgggcattttctgtgtactaaatccatcaagtatgtgatgcacctaatctttatagtcacctaataggatagagctctactttatagatgtggaagctgagactaaggagattgttgattttcccaaggccatacaatatagtcaggagtggagcaagaatttgcacccagttctgtctgacagcaaggcctgtgctctctaaccactgtattatgttactgccttatgagctggtgagctcttttccctggggatattccaacagcaactgatgctcacttctcagggatactactggtggagtccctgcttttgtccctaagactgcattaaaatataatctttagcgtatacccccaaaaatggaaagcaaagtttcaaagagatatttgttcacttgtggttgtagcagcattctccacaatagccaaaaggtggaagcaacccaagtgtccattgacagatgaattggttaaacaaaatgtggtctatacatagaatggaatattactcagcctttaaaaggaaggaaattctgacatatgccacaacgtggatgaatcttgaagacattctgctcagtgaaataagccagtcacaacaaaataaatactgtatgattctacggatgtgaggtacctagagtagtcaaattcatagaaatgcaaagtagagtagtggctgccaggggttaggggaagggcagaatggtgagttagtgttaaaggggtacagagtttcagctttgcgagatgaaaagagttctggagatggatgttggtgatgtttgcacaacaatgtgaacataccaaatcccactgaactgtacactcaaaaatggttaagatggtaaatgttacattgtgtgtatttcaccacaatttttaaaacgtgatcattaaaaaagttctaaagtccttttcacctcttaggagtaaaaaattctgtaaaacagtcagagcaagtggactgttgatcagagtaattgtgtgctgactgctcagaaaagcactaattatcatgcccagcacatagtgggtactctgcatacattggctgagtctaaatggttcagaaagaactttaaaaatatgactttttcttattatattcataatacatgttaattgtggaaaatacagttgagaaaaataataaaaatcacttgtagtcctactgttaacatttctgtataaatccatccagagtgtttctgtgcatacaaatatattgcaaaaagtgagatcatattatatacgctgtttggtagcctgctgtttcttccccttaacaatatattatggccttctttccatgtaaattggaaaaattgaatattggcttttattgcatctattcatcatctgtaatgattggtggggaaagataacgtggataattgaaagccatttttcctcctctttcccttgtagtctgttttttttctccagagaattcctcccttgactgaagcagaattgccttctctttagccttgccttgagctagttttctttcaaactgccttccaattgcattgtatatctggccctggctttcggctttgttcgaacattcctgccgagttatctgtcccattcttccacctcacttgtctgctacctctgctaccatcatttgcccctcatttttttcctccttctccatattgtaactgatcactgagatgagaggtggccacctccctacagcctttagaacacccatcaatactgagaaactgtggccacttgtcccaccttgaatctcttatttttcaacgttgtcccgtgacagctgatattaacatatagaaaggtctctggggcatacagtatttacttcactttagacactattaacgtgccctgcatgcccaccgaatggtataatgtaatgatagggaacctgccattgtttcaaatagcagaaagccaatggccatttcaattgcatcccataacttaatctgatccctgaaaatgagaaccattaagaggaggcgtttacttaaagaaaaaaaagttaatatttcatcatcaggtagtaaatagaaataccagtttccacacaaggggactgagcaaagaactcattttgatacaggttctagtttaatcaaaaggtttaaataaaatgcttaatctacagaactccaatgaggactaattctttaaaatgaaaaatgggtgcaaacaatattaaaaacaggcatttcctccttaccacccaaatctatcactgttttgcatcaacagaatcatggtacccaaaatgctatttaaaaccaaattaccatttggactattagaagaatcacttggcatggcatgggcctgatttgttgacaaaaaggcacaggtgctataacctttgcttaataaatcatttagctgcctgacttgcaagcagtgtgattgcctttgcctcatgaaatttacaaatgtatgcacaagccacacacttcactgtgctggaagctggctgatctggagaggtccctgcatagccaaattatgggcatgacacccgttgtctgcctctggtgggggtgcacccagaatgggagaggtggagatcatggagagcattttgagctgttgccattccgtgtgtcatattcctgaagctctacctgagaaaccaaagcttagaccatctgtggaactcttcataagttcctttcttcagtcatttagtgtttacttaattgcttaatagagcctcaacacctacaaagtacagggaataaaaactctcctcgagttgttcaaagtctagcagaggaaacaaatgtgaagaaataatggtaatgacaacaccaacatcaaaacagtgtaatcgcagtactataaagatttgtctaagaggctttaagacaacagagttgggtataggaactttccaaagagtggaagcagcagaagaggctggatagtttttctgtccttgtccttgtctagcttgggcctaatgatatggttcttgtacacttttccctattttttttttttttttgccaatcagatggtagatcgtgttctaacccatcccaataagagacatgttcagttctatcttccctggaccagataaaattagactcctttactgctgcacaaggctcagccagaaaccccttcacccctcatttccaagaaacacctcctcctggtggtacatcctcacttgcccacccaagctcacttgagattgcatttcagttagctgacgccattcccgggctcctgcccaccctgacaggagctgcctgagtgtagaaggttagttaccacacagaagttcaaggagcagctggagagttacaaagacaagaaactcagatttccttagagggaaaaatatatatgtgtgtatatatatatatatacacacacacacacgtacacacatatatatacacacatatatatacacatatatatacatatatatacagagatatatatacacatgtatatatcccaccctgcaaccctacctcatcttctaattagaagtggatttgagcatttcagtttcaagccctcacagctgcaaactcccaagattagagaggaatggcagataaaattccactttctcctgactttgagccaagttaaaagtcttattggccaaatgaatattctacagcacccgtgcatgctaggttctgtgcctacactcgctgcagtactcgagagccctctaaggtgctacatctccattttacagatgaggaaaccgaagtttcagaagagtacatttgtcccatggtaattgaagtagctgagatttgaaccagtctccagaacttctgtttttcacaaatacttatctgcatccccagttgtttgtagtgataggttactgaccattttctctttaaaagagtctaagattgactcacactcttatatcaaggaatcagaagccttgaagttagtcccagtgctccctggctccagtgggactgtgctgaacttcgttcttctgaagatctgccccggtctcctgttagttcatgtctctgtaaaaccaagactgaattcattctctcatcctgcctgggaagaagacctttactaatgatattagtctgcatctgtgggaacagctagcctttgtccagagaccagatagcagagcagctaagataactcctttattttcagattttagttgaagctttattccatcacttagaagcattctgtgtgttttatttttgttgttgttggtttcttttttttttcacagtaattcaatttatctagcctagttttttaactgtaaaatagtgaaaatagtgagaaataaatatgtgtgtgtatatatactcacacacacacacacacccttatggttttgggtcttaaattctgttagtgtaaaaaaagtgtttaacacctaatgaatacctaacaaatgatagctttcattgtttggttaataactaaactcttattttctggattacaaagtattttctcatttgattataagagttacactttgaagtaggcagagctattgttattattgttatccccactgtataggttaaaaaaaactgaggtttaaagaggggaagtgactttcccagaaccacatatccagaggtcagtagagtcagggcacaaacccacttctgattccacgtgtcctatgaaggaaggacttgtgtataagccattcagcacctgctgctctatggtcagaacctacttaccaaaagcaaccgtctagcaaattaggaagcctcctactacccactgcaaaatcctaaccctgtaggttgttccactgagcatcaaccttacaggtgcccaaaagcctgtttaaattgggcacagctattcttcccttgtacaggcagcagtctaagtgtaccattgcttctcttacgctaaattgtgcctgagaagggccttcccaaggggagacaatgtctctgagagtggtaaggactggcaggaagtgaatgcacccctcagaatctaaagggaaaggaggtacctaaatcgaggtggtgcctggtcattttttctcgtatgttctcagctccagtagcaggtgttgaatagtaagcaacacctcgcagagatgagttactcatgcaatctgcttcccctccctccatactactgtgggcaggagtgaatcgtcccagcttccccagctcccacaccaacctgtaagttcttgacacattctcttcacatacacttggcggctgactcactgacaggctatgagacactcttaaaataaatttttcaataaacagagtctttgtctttcaagttttaatttggcagcatgtcgtagacatccttggccacaaacttcacttctggacaaagttcgagccattaattctagatactggtcaccttttctctcagttcctgttcttcctgtcacctttgctccacaaagatttgggggatcttcttagttgaaacaaattgatgattattgtaataattaaggtctctgccatagtatctggcacacaataggtgctcagtaaatattgcttctcttcttgcttccttttttttaatattaaagtgagaacagtggcaatagagaaggggaaggtaaaaaagagatttcacaggaaattttacattgtatgggagaggaagggaatagaccaaaaatctgctatccattaaattagcacttggaactgtgggaaaagggggacagaaaatgatgtcaggaaaagggttggaaaaaggagttgtgagttggtggacagaactgacaggaactagatcaaaagttgatgatagccatgcatggaacttagaaaaccatagtgccaagtgcagaaatgccatcaacatttctagcttttaggtgggtctccataacaatgcttctgatcagtgacattccagggtactaagggaaatgtactgggtactcaccaggtttctctgggggaacaggaggaaaagtcatgattcaaggagtaggacagacctgttctgacatcctggctgtgccatttatctcagtgatcttgtgtatcttaccctttaaaattcagcttcctcatctgtgaaatgaaggcaataatagtatctacctcatagaagaaaccccaattaagtgtggtttaagccagtcaggattattttcctcccgtaacaagaaatctgtgagtgagtggttgttggcattgtttcagcgctgcacgaggccaacaggaacccatgccgttcctaacattctgctctgtcttcctcagtatgctgcctcttcagcctcatgcttagagcctctgacggcaagatggctgctgcagctccaaatagcatagtcatatcataccttatttttcctctaatatcagggaaaaggccctgctattcctcctgtgcaccctgctagcaaatttctttgtaggtctcattggctaaatctgggtcacattttaatctctagctgcaaaggatgctgagaaaaccagcagaagattatcttgattggctcaaatcatgaccgtcacctaggaccagtcacatttgcctctctaagcaaaattgtcccaaggaagaaggcgcaataggtagtggatagactgttaataggatctgccatattcttttttcctattccctgataggtttcatgcacttttcaactccagtagttgcacttgaccctcttgtctctgaatgcttggcttattattctgcctttcctccacacactccctatgtgtttaggagatgtagatgctatgtgcgtgactgtgcagaggtcatttcttttcagcctctgtttgaggtccaggatttgggcagaagtcctggcgttttgtgcagacctgctcccatggggctgggtcaccgtgtgctggttaaacatggactctgaaaaggctgagttggaggatatgtgcctttgtggttgcaggggagctctgtgaaacagtgccccctgggtgccctccagagtgcttaccaaacaggcagcaataggttctgggtttctcttttatgacttggaaccagatgcttcctttgcaaaggaaaagagcctggttttgcagagcttgagtcaacacaagttcagagaacaggaaaatgagttgactggccctgctgcatgaactttgaggagagaactcaatacaggtggtgttctcgctgtccacaaagtccttgcttgtgaaaatcctatgcccaagaaattggccttaccgaatatttctacactctaaataatgactgttcacatgaggaaaggattcagcattaggaatccttttggacctaggctttcccagggcttctaatgagtctaaggccttgaaagttccactgacacacacagtttcaagcccagagcttgctgtctaatgtgagatccatcgaagatctcacgtgaggtctcagtgattcttcctgccacttttctcacacccacctgcttaccttcctgtttgtttattgaggacttaggcacattctttgatctgtgccctgtctttttgggatatagcctttctattgagtctgttcattgagttacattccacagcacacacctcccccaaaatatttgcatgagaatttttcttaaggtctcacattgcttcctttacagcagagatgaaataacttagcacttctaattggcttttcactttccaaacgctttacacatttaactaatgagtcacatgagcttgtgataagccggatcccttgtcttggagcagggacactgggttaggacaggctgttctggccctgtgtttctcaccctcaacaccctccttcctcagagtctgaatgtgttgagataatggggatgccaccaggcacagttgttctcagcacagggcaacctcggaccctcacagtgctgccttaataatgtgggaagcaccctttgctgccctccagggctggactatgctgcatatctcctgttgccttgactagtgaagggaagcataaggccagccctcatgacatacagcttctgcccctctcaagcgcagtcttccttccattggtccctggcagtgtgtctgtgcatatatggggaaggagtggtactagggggatagaagaataacatagtaggtctaataagggaactgaccataggagggacctatggtcttggtacacagagaaaccctggactaggagtttttctacatcttggtacacagagaaaccctggactaggagtcaaaatacctggattcctagctcatctctcccacccgccagctgcatgattgatcttagagaggagaaagaagccagaatttattgagcacctactatgttcctggcaccatactaagctggaagggaggctaaagatgtacattattcaatccctgccgtacatagctcacagaaagaaaagtaaataaactaagatgtgatcgatgaagtaattgaaataggtataatccatacagaagagtcagtaactaactctggggagaagcatggagctcatggaagatatgccagaggagaagacacatgagtggttttgaaggagacagatatacttggtggggagaacattccagaccaggcaggaggaacagtgcatgcaaaggaacagcagtgtgtgtctgaagaaccctattctgtcagtttacagtagacggcagaaacattagatcagagtctagtcgtgaataaatacatacctttttccaagggtagtaaagcacttggactttattctgtgggagatgggaagcaggtgatgggcacagtgggatctctatatgtgaagaaacctctgccttgcttggttcaatcctcctgagatacaggattttataggcaatagtagcattgagacctgtggtcatgaggtaccttcctcttctgggcagcataatgtagtggaaaaaatagaagctttggagggagacagacctgagtttgatctcagtatgtgaccttggaataatttttagcctttctgaccctcagatgtcacatctataaaattataaatgaatgcctgcattccacttagagttatgtaaagactcagtctagttaggatgaaaagccctcagcaccctgcccagccagtgtgtggtgctgccttttcagccctcaggagggaacctctgtgagcactggaggcagggtgctgctcatttatctttaggacaaggggcctgtgaccacaaagaagaaacagaaatggtaatatgatgagcaccccggaggtaatctggtaatgttctccctgagctaaatctcttctcaccgcatcctcccgtgtccattttccttaagttgtgccattaattctctcattacccagtggaatgatatttatgtattaagatcatacttagcatactcccaaggagcaagttaaagttcaactaacgtcgccagtttctcgttgtaaggataaatacactgaggaatccatacggagagcttctgtgtgtcttataatttcatattaaaaaaagattaaattttatactggataagagagggaaggaaaaaaaaatcccagtgcaaaaacaagttgtgaacctaggagcacagtttctgaatgtttattttgtcagatacacagctgacatgattagttctaatggggtggtgatcctcattgaattgcagattggtatgagtgactgaaataccgcagggacttaaataagtggtgcatatggtattacttaggctgcatcctttagccaaggtgaaggcttcgttttctgtccattcctaacatgcatgcagacacacacacacacacacacacacacacacacacacacacctgctacatatgcgtccatctagtccagaagctccacactgaacatcaattacctatctagagtaaggctggctggcctttacttccttccctttgccctgtgttacctgagtgcacccccaagcccccacactctccagtgtagataatggtgtatcagattagtctgccttgctgctgcatcaagacccagatcaatttattgactctgccagagtggctggtacagtaattgttacaagagaagaatagaaagtgagaacgtgtacacatgaaaaataaaaatgacgttttgttctctcctgccccctcccccgccttttttttcctcatagatctttatgtgtttacacagcagagagcactttacttaagttaatcagctccttctacattattaattgtgacagggtgccacatgacaggacgagtattatgggaaacattgatctcactccgatggtgtggacctgagcaggtttggtattcctctccctatctcgctgctttggggtcccatcaaatcacatttccctgattgacaacacggaatgcctcccatcaatacgattgattttgtgaaaaggacaaggaacatttttcaactggagagagatgaattgtggttatgggaaagagagcatctcagaaatctttcaggttagaagcctaaattgggaactaaggtattcttgtcatcccaaacacaagcataatttgtaccccctgaaaaatggtattaggagaaacttattacaagtgaaaaatagacttagtggaggccagcaatgaacctgaggacataatggctgtttttaaaaggccacctgctaatttttttgtgaggaatttttggttaagtgcacatctttgaaagacatttcattaaagttcagctttcatggcttatacctgtagaccctaacataaatcctgtgtgaacggacaaaactgagtgggtgtcatttgtgacctggaaataaaaggtcaaccattgaatttatagcttttttagtgaaaagaacataaagattcctgccaactggagtcaatccatattttaatgtttcctagttaagattataaaatcaagggattaggatcgtgctgctcaatgaaggtcaaaaattaaatgtgatgggctaagtgtcattcccatggggcagaagttaatatttcaaaaaccatttctaccactggcagtcaagaaatgaattgtccatgatcattaaccaagttaaggggaatcccactatcattactaaatttaatgatgattattatactaatcaactatattattaaattactctgctgttctgtaatgtccccaaacagtaatagtgaattgattgctaccaagtaattctcatatacagttgagaacaagttgagatgcaggatcatggatgaaggcctccttttgaagaaagaagttgtggctattttatggataacagtgataacgtagaacgttcttttaagatgaagagtgagtggcactacagacctgttattaactataattcattagtacatgttttttaagtacaaaaaaagaacacgtatttctctttattgtgtttttttttctctttcagatttttgtatcctcctcccgatgcttttttttttcttttcttttctttgggaaaaagaacatctattttgccagattcctttttccacaaatttttagagctctggatactgtctactttggatttttatgaagagggaagaaaggatatttaaatgtctttatatgatgactcagacacatgtgccctgtaccattttcaaatccattttaagatgccagtatttttcaaaagttttagaaatttccttaaagctggtaatttccttaaagattatctactccagactcccatcatttttcagatacaactttaagaatattttggaataaagttcatatcattttaataaagtagcacctccaaataagaggggccaaagcctggggaactgaaacaacttgcaaggccccaaagctaatcagagacagagcaggactgaaatgcagggacctgttatgagtgaaggaagggactaatggtttaatatgtggcttagaaaatgggtgcatggtttccattttacaaaggtgttttataaaagcccaatatcattagactgactcaaacgcattgcaattccaaggaacaaatgcatgtaattcagaagttcactttgcaggatttactttcatagactgccgtgcaggggtgtgtgtgtgtgtgtgtgtgtgtgtgtgtgtgtgtgtgtgtctgtctgtctgtctgtctgtgtaacctgtgcttccgtctatgctcctggacagcttttttttgcatattttcctatcttctgatcttcacagtgcagacaaaggtcaaaattcccatctaccttcacaggcaaacactttaaagtgcttctacatgaggcaggttgtagggaggacctttgatttaaagttcagcatttacatttgtaattttgactaatttctgtgctagcattaattaaattgaaattatttaattagaataaaactgaaattgatcattaggattaatttaacctgatagactttgtgtgcctttctagacaaatattatgaaatatagtgataatgaagtagtgagaggtataatttcacatcttataatgattttagtatccagttgttctctctgatatctagatagtgctgaatattgctctttgttacatcattaccatttagctagggccatgctgtatctcttatttggcctcttcccaaacatttttttcctgtcttgaagtctgaagatgtaccaaactcccttcacaccacccccctgttaacgtcattgttccctttcccccacccccaccgtcttccaggaaggcggtttgcttggctcatcccttgggtcttgcattgcagtgacctttgtaagccaagaactgccggatgaaactcattatggaattcgctaatgctcctcagccctggggtcaatactgtcaaatctggactatcccctcgcaccccttcctggctgcttgctttgagtcagaagcaggcacggaatgaagccctgacgagggatgccaggcactgagtaggtaactccaagggagtacaggagagaagcgttactcctcccggtgccagattcgcttccaggaaatagtttcccctcttcatcccacaccttccacatagtttgatcaagcaaacacgcttccaaagttggtgccctctgtttcttaaagaaaattataggtgaatgaaactactattttaccagaagaatcagtataaatgaaatgagattagatctgaatctacctacccacacatgaacaagtataaaacactttgaactatcaactattaaatcaactatcaaattattttgtcttcaaaaccattaggatccacatgaataaattaaatcctcaggaaaatgtgcaaaccattttaagtttcaaatttctcccattcaccattttgtcagagttgcttaaaaaaaaaaaaaagtaacattagcagttatgtttaataggcttcctgtagcagcccttattggcaggggtccaaaggacagtggaaaatgaaccaaagtttgatagatatttatgaaaaagaaagaagaaaaaatacacaaaagaaagaacacatgattttcagtcatttggaattgactgaccaatgagaaattatctcttatgcaaattatcttctttctggaaatcaaccaatcagtcctggctaaaggctgagaaacttaagattgtaagcccaaattccacccaatcactgtaactaaactgctgctcccaaagaaaccagttttatcatccatttctgcagaacgtcatctaaatggattccgctttcattcatgtccttatccagtaagaggaagcttctgatttttccagcagagggttttatttagaagcatattcacatttaatttggttttagaaaacccttaatgttttttaatattgagctaggttgagttcaggggattgagaaaaaagactaaaagctttgcatatagctagcatgctcgtgctattattgaacatgcaagaaaagtgacggctcaatattgcactaggttaagaaaaggccatgatctagcacatgaagatgaggtttctgtcttccgccagacagagaggaatccccttcccccaccccaacaactccaaagataaaaaagcatcagttacagtcctgttaggagacaaaacacaaatattagttcatttcatcctcacaagcaccatgctagctagcaaggtggtcttcatcctttcttagcagaggtgcaaactgagatccagattcaccacacactcctagtccatccacccccagccatgcaattgcttctctgaaccccaccacccccacagcagtgcttactcttgaactatttatctgacgcatcacatgtcactctgcagggatgcagctgctgaatctgggtactgggaatgccacaacctgcagttttgccaggtatgctcacctatcaggaaaggactgctccagtatgaaaagatgctataaagtaactcttgagcattgccctgaggttacagttactattagtatcattgatttattactgctgtacccacttgcttgctgttatagataaactccaattcagagagaagttgagaaggagagtccttggtgctctttctcctgtgccctttccatttctgcccatgaagatgatggctgctttctctgaactccttgacccttgcttagcaacaagattgagtcttaatttcaataagccaggaaatcagctctctccagattggttccctgtgggcatctgagaaccccttcaactcttcctgcttctaaatgaaaaatagccatttcttcctctctgatgcacctttattggctggaaaatccctgagatctttttgacctcaaaaacctcttaggtttaggatctcttttgggctgggtacatttctcttcataacttaatcttcaaggcagaaaaaccatttaagcaaacccttgttttaatatttgaagagaatcaacgtgcattgaccatttccacagaaagctgaaactcattgcacagaaattttaagtcatggccatgagattctagaatctacatctagaagccattttcaactataatgttaactagaatgccttttagggaaaattaagaagcaaagttctcctggcccctgccctgcctttctctctgtccttctttgcctctggagtagacctgaggaaatttttaatactaacgagaacttggtgctgcgtagcctctgagtctgaaatgcctgagaaagcagtccagattccaactgtaaaacattccttcaccaagccttggaaactaacatacagaggccggcagagttcagagggagcacatgtaaatgaggctccgttataaactcctgaggagtgttttatttagtttaaacctgaacttgaacttgtaaacggtgttccttgagaacaatacagaaaggttgatgcagtagaacaggaagtcacattttagctcagacattttactcctttaaaagaaggaaactatcttaaagtatttcttaattgaactgtcttctagaatagcacaaattggcatgtctgcaagatttttgggattgcagaatcagaatggaagtgtatatgtatatatatcatttgaacttaccaccattcttgcaaaataaacaatagaatttcctatccatatggcgatttaacaagaggatatttaaagagcctgtccacatataacagtcatgccatctgtaattgattttattaattgataataaagtgacagtagaggtgtgggaccgtttcaaactagcactgtgtgtgtgtattgagagtttgttcccaaatctcagttgctggtagagcactaccaagtggaatttatccgaaaacaaagtgagaatgattttgtacgcatgctcaattttataaaacacattcttgaatcagtcttcaataatctttgcttgcgagatctccatctcagaagtcactactaaaaaggtaaaaaataaattaaattgtctgtgttagaatgatattacctctctccaagaagcatagatccctgacagggaagccaagcagctctgccaatcacgtatgctatgtacatgtccaggttgttggtaaggcccttcacggagactgtcaatgctataggatcttcaccttgcacaaatcccaaccgcagccccatcaagaagcctccccctcatatcccctggaaatatttgggaggaatctaattgtttgtagcaacgaatattgcttagttgtaaatttaatctacaaatttagaaggaaataaatctgaacataaaaagcatttgctgtttcagcattaaaaaaaaaatgctatcatttgaaactgcaaactctcccatgtgggtttgttttgcaagtcacgtcttaacaaagacaagttttgttgccataaaaccctaaatcctaccacatcctcagaaggaggagaaaagtattgttcactggttccgggtttgggctttcaggataacacagagctatgaccgcgcacagggaaattgtttggtatttatccagagttgttggttcaggtgaaaccctgacacacacatacctcccatctagattatatcagtgcctcatgtaattatgctccttacattttaggcctgtgtctgaaagtcgttttgtatttttaactttattttttccctcaaatgatgtgataactagtatcctgaggcctgttttgcagaaaagttaaagttggacccctgactccctacaaactaggatttagatctctgactccatgatctgactttttccatagccaagctcattctgacctcaatgaaagataggaacagttttacctctcccaatatcccatctaccctgtgaacgattagaaaaaaaaaatgattcctggcaccagtgatatctaaaagcaggtgttcctagaaggtaaagaaaggcatagcaacaggatcttgtagtatccttagagagatctggtgaagttcaggcccctcagcaagccagtgactgaactgggacttgaaccaggccaccagacccgcagtccagtgcttaactatcttttctcatgaatctgaaaacgcagatgccacagtttcctttgcattctctccaaatgctgcctgtatgtcttgtttctttggctcacaacagaagccttccaggggttgtggtttgcagctcaaggccttcttcacttcatcttaatccttagggactgttggtctgcatggcctgggagagagtaggggtctgtcatgattcctgcacagggattaaacacaggtggagagggagggagacactaacttgaggggtgggaggagatagagaatggaactagaaagaccaggaacagtggacaggggagaattaaagaggtaacgagcagacctgtgccagggcttgagcgtggaagtgcctgctggggtggagaagtccaaaggtggcagatgctatccagtgtctgaagggcttcttggctggaaaggttggtttgggaattcatttctggcaaaaggccagatcttctggcatactgttgcaggatgtatctgggagaatttttgaaataactggactttttacttcaatgttattttctctcttactggactttatcttcctgcacaatccacactaaggtctccttgattgattggctctcaacctgagtcatgtttgggaagagcaagagcgaggaggcacggagtagaatgattattacaatgtggccacgctctgctgagctccggcctccactcccacgcctctctttttaaacaagaaaggttacctccctgggccaccattgggccaaccccaagtgtttctgtctgcacttgttagacaacaggcatttaattaaaattggaatccgatgtgtagaaaacatacattttttcatttcatagctccccaggaagtcatattcccttccttccccactctcctcaactctccccctgccaaaaaaatttaaaaaaaaattgtgaaggaaaagattattttaatgtgaaaatcaaaaattacaaagggctaggctgcttcttcattttttgcctttgggggagacattagccaatcataaagcctgtattgtgtcttcagaccaggagccagcttttttatggctaacttcccatatggaaaagggtttgtcccatttcagggcattaaaatacagcctttaatgaatttgtaacttaaatcttttatcttgctcttatgcgatagaaagtgtggcctgtcttctgatatttgttggactttgtggaatcaacaaatacaaagaaacagataataaacatgaggcccaagttgaaaaataaagccgcgaaaccccgtcgccactgcattttccgcagcagagccatccactgcactgtctgggctccacccagaaaatccggcagtgccatcatgaccaaatagataggaactctggacaatttcatcgggtcattgtccccttaatctccacgctgcacctcagatctcaagcagcttccgtggcgcaggctcaatttaatggatagaatctatttttcatgaaaaagcaggaaataagctgtctctttcataaaaagatttacaaaatgtaatcattgttgaaatattccctttgaactgccgtgtccacgggggtctccggctcccagagtcgtgcttcattagaaccccgtcataagcggctccagaagggcaggtacgctggtggtgcccggctttgatgtcttgaatgaatgaaagaaaagcacaataaaaaagagctgttgatcaagcataaaatactctttaagctgacagaatagcagcgttaacacaccctaagctgcttttagtttttcccttttttcctcacattttcctgtgctttgtgtacagtgggggtttgtattttataagaagtctctgatctatgtagtatgccattcgctaacaaaaaccaaaataggattgtttctgtcccacttggttgcctgactaccccctcccttcctccccttttctcctcacccccaacctccaaggcgtgcagtttagccttgcaaggcaagggcccaaatgcctttcataaacttgagccaattccttttgtgttgtgggtttcaccgctctgattttaatatcgcaattaaagacagatttttattttctcaagaactttctcttgcaactggggaaatggaattgacgcagctgctacttttaactaagaaattatatcattaaataagagaaagccgccttgtagagtgatttgctttcctggggacgttgggtctcacgtggaccctaaggccccagaaaccgttcacagtgagagaacccagctacccctggctttctggctttctgtagtagcccctagccaggcatttaatccccacaaaaactgatacagttgttacctccatttcatggagtctaaaactgagacctagtgatgctaacttgcctaagattatctaactagttcataatggtgccaggatttttgtcattcggaccccagagtcctggctcttacggctatgcacacagctctctagtaggatcttggagcaaatgcggtgggccggagtgcagtttttaatccagcagtctttgatttcatgaggtaaaaggttacgtgatgaaaaatggaaaggaagggagaccaaaagaaaaatgtacttggtggtaagagagacactagggcaagctggaatctcgtgaaagattcagactttggatgaacagtcagaataattggattgtgtatgcactctcaaggtttggaggtactggatggcttattgggtaaaaagattagtgttttcccgtcttgaggtctgaaccaaacggaggtcttggctgggagcagcacagtcattctccagggattggtggtttggacaacttctctgagcttgtagtaagtaggcagcagtccatgttacaaaactattgcacatgctactgacgcagttggccgcaactggccccgctgcaacaactctcccgtcggaactgcctggagtggcttgtggagacttgtgtccctcgagggagagtgtctgtcatttggggagacatggtcatgtggcacgagcatgctagaagtcatccatccagatgccttgctttgccctcattggggtgactgacaccaggctttggtaacctcggatacagcttgttcttccttccctcctttatttatttaacagtatttattacatgcccaccctggcatcccttagatagccagcttgcctgggatgaaaacaggtaattaaagtttagcaactgtgacagaggagaatcctgagggtaaaggccccaagaaagacccctctgaagaagggacatctaatcttagaacccaaggactagtaagcattagcaaagccaaggagtgggacagcctgtgcccaggcctggcagggagaaagcatttggctttgggggatccggaagaagtttaaggcaacaaaagtgttgaggacaagtggtgaaaagataaggccacaaaggtgcccggggccaatcccggcccattacggttttaatagttttctgtacaataaacaagtcttggttcggagttactgaaaacagactttctttaattaagaaaataaaatcaggcaagaaaaatgattacagagatcaaagcccaaggctggcagtaccagtaactaacacctgtgtacagcatgacacccttttcagaagaaaccagtgtaaatcactgctgcctctcatgaatacagactggtcctcacaagactctgagggtcccaggacagggactggcttgcttgaagtcacactgctggtcagtggaaaaagtgacaccaatcctgagtcctttggacactggatactgggcatcgttcattgccagaagtttataaaatcctattgggagaaaagcaggctatctggtatcatgaagggtctagaatctagccactgcttcctgatagacaagaaagtcctacagggcagggactatattttactcattatatccccagagccagcatacatagcacctagcacatagaaggcccttagtgcttgttggatgagtgaataaatgctcccaaatggtttatgcgaatgtgagaaactcagagtccactgagagacctcatccatttctatcatattgagatgggcagaagagactactgggcttttggctgatttgccaaggacaactcatttgggctaaacagtaggctttagtccatccacagaagtgcgggaagccaaaaatgacccactggagtagtgtgaagtagtagtgcaaagctaacacctccccaagagagaatgcacaacagcgacagcagctcctggagtcttggcttattggttggctgagtcctctttgggggctgatgaggagctgggcctgcagggtgcggggaggccagcctgtgtttgcacatttccgttttatgtgtgtgaatgtcctcaaataacccaccttgcctgcagaagaaagccaagtgtcacacccagttctggattccacattaacaacctccttccgcagtgttaaactttgcccttgttgaggccttttgtttaagtttttaatctgaaaaacagattctgctgcatcacagtccactctgccctctgcccctgccaccccagcactctctgctccttttaggggttaaagtaaaatacaaaatacaaaaaatgtttctcagacatttttctttttcctctagaatgtgcatcctgccctcttagtaaaaagaggatgtaaaaagccttttaaaaagttgttgcacacattagagcatttgttgctaacgcaggggttgaggccatggcccgcatcagctgtgtcttcagcagccccatgaccacattttggaagacggcccctgtgttctgattgctctctgtgaggcgtacgaaatggaagagattggcaccgtcagaggtaccttctgccatttcaggcttcctgtttaggatgcagtcggatagatattgtttatggttcataaaacctgactactgtgagtattccagaatcccagcggaatgggattcgaactttcatggagctgtaaattaacgggcggcaagtgtgataaaactccttagagaactgtgaggggaaaaagtcgtgctgcaatggttaaatgaaattttataagcacattcagtgtggagctgttttgcattacatgagttgaataccttagagacgccacatctgcaggcactttattaaatccttagtcagcacttttccaacctgatgagattacttcttcatttgactggagaaaaggaaagctgagctcttgtcctggactgcagatttcttttgatgtttcaccttgaacattgaaagaggacagtcaccccacttccctccccactcccgctcagcacatcccaaactctagacattgtgaatgttaccgactaattttacgtaactggagccttggtgggagtgtggatttgtggacctccacaacaactatagctgaaagtttctgaggaaaaaatagatcaaagctctgtgtttacttaatgtaaatgtatcaagataacatcatcctatattgcattgtaataatgccactcactgcacatagggagggagattcctttgtagtccatttggatacagtagggtagattaaggggctataaagtacgaaggcagaaagcatatgaaacctaagcttatgtcactaaatgtctgaggatagtttttgtttaatgtgttaccattttcccagtgatttgctgctcaaccccaacgatcgaataagctcagatttcttttatgtttttcctatatgacccaagaagaaaatatgcagaatcattcttcaattaatgttctaaaacttgtactgcttgcataatagaaattataagaaaatatcacaagagaaaagtaggcttttacaaacattatattgtccatctggtgttactagcagctcatggaagtttctaggaattgactggcttacacatgtgtgactgtcacactcatcccaatgggattatgagtgtctttacaaactgattaggagaaaattcagggagatgtatgaattattattattattattattattattattagaactatctgccatctctgcaaataaatgatttaatcagagacttcaaaaaagaaaaattccctgtgtggttcccctaaccaacttcctattctggaaaaccttggtcaagtagctgggttaattgtcatgaagattagtgtgatgttgaaataagtactaatggtcaaattataggagtgaacaagtttaagaataggttttggtttgggcctgaaagggttaattaaggttttttcacgggttattaaagacccccaacctctgccttcaggagtcatattgacaccccaccacagggcagctcagcccctctgttgacatgttgctggtcagagcacaatagccttctgtgtctgcaaatcattgctaaaatcatctcaaggaaaaaaaagtttgaaagctttaacgttagacaaaagcccaagagttgcagcgtgcagcccaaaaacctggagtcagcaacttctattgattaaaaactaacctttaaagtaactctgagagtgtgtggttagcatttaaatttaaacatgtcatgagttgatttgtgttactgaataccaactcagaaggagtaacattcacatcgcattttttttttctaattcccttaagcagctaaagtatttcatgaaatgtcaatagggcaaaaagaaaaagaggaggggggctgatgctgggccttgtagttttctttcccatgcaaatatccaccccccaaaagaaaagtgtgcagagtgaaacacaataattagtcctttgtctaactttcccaagtgccagagaaagacagattaattaaatatacaacaatgttggtttttggagtgggggtcttgcttgctgtgtaggtcataaattaggcagaataaatacttcaatgtgtttgcagtgggcctgctacgtcagaaccactggaaggttggtgggaggagagcagagggtttcttgctaatgatagtcacgtctgggtctgtctggttgctcttagcaaccagacatgatgtaacaccaggatgaacttgaacttgggggacttgaaaagagaacaatagaccagagcaatcaataaagcctatttcagtgaaggattacagagctgctctggggtaaccttgtcggcaaggcacatactgaatagtaagatgtgtgaagaaactttttttttttttttttttttttgctttgctttttaagagaagtgcagaggcactgcagatttttgtagtgccctgaggtctcgtccagaaactgtggtgtggagaactgctccccctgctgactcactgggtgccaggcctttgcttcaagaactaccttagtgtcagattgaagaagtctggaatttcacaaccgacttagaaagtgtgaaaacagaaatagtaagcattattccccgcacccaaagtttgaacctgttttgtagaagggaggaagcggctctaacgtggatgagagtcagctgttaggtagaggcctactagaaacacagtttggggtttgctttctctctcctttctctccccctcttctttcttttgtccagctagatttaggccatgtgtatttgccaggctgatttcctttcaggacacaagaggctttattgtgttcctcaaagcatgtggtcaaagaataacatctgaaagtctacaggatgcgtagtttttcggtctgggcttaagttttttaaactcctctggaaatcaaaggtggcttgtgtgactaggaaatcttataccaaactccatgtagctatcacttagccattcatccctggggaccaaatgagtccttacattacctaatggaatctcttccacagggatgatccttcacctgcctgaagcaacccaattagaaccctttctgataccgtcaacttaaagaattcagaagcattggtttttgttaggccttggtaatttttctgtaaataatgataaatgtagtgaatttgtcaaggtatctctagagaaaagtcggcaaaagccacatacttttttatttcactggagaaactaactctgatgttagtccataattgctcattctgtctagctaacagaaaaagaaatgccagcagataaagtgatatatgaccagacaattgctcaaagctaaccacctaaggatttacgaaaggaaaaggtaaccagtaactgggcctggcaggcacacagaaggctctaaataaatgctgcatggacgcaagcatgaatgaagggtacgcagtggcctcatttttcctttggacaatgtggtacttaatagagtaaaatcttgatcctacttagttattatgtttcatgtttgaaaataccattttagatatattgggctgaaaggagcatcttccctcataaaatcctacatatgtaaggaaggaaaaatactgtgacttgctcaaaatcacccaggaagactgggtccagcactttttccaccttacctccacttattcttgtgtcgctattgaccatctgggcctgttaggagagtgtcacaatcatggcttcagtgcctgcacctcatttgaaaggagatgttgaaaatcatcagagtagccattcattgccacatgaaacccctccctttacccattctccattcattcaactcttcttcattaagaacgttctgtattccaggcactgggctaggcactgaggattgaatgataaacaagatggtcaagtttcctgccctcctataactgcccccatcagttaacaaaacccttatttgtatttcaagtgaacagaaatacctcattctgtaagatatactcagaatgttggaaaaccccaacgaagacaatgaattataatttcagaagaataagatcagtttcagtgtcacaggattttttattgtctgtcgtgcctttacttttcccagcgaatccctcccgcatccctaacgtagatcctgatttcgtggttgaaaaggcaacttctaaaacacacgtttttacaaattgtgattttaattgtatttttccttttgtcttccagtcctggtacctgggataaaagttgcagcgtcccaccatccaccagacagaccacctgaccccttctcaactctgtaacatggacgcaacctcaacccagcgcagttacaacttcactatcagcggaaggggagaaaaaccgattcaaatcaacttgtacatggaaacagcaagcattatggtcaaacagcaaaggccataaccttttgggattttttttttttttaaaatactttagggactgttgtaatttctcatatggtgctggaaatggttgggctttgtaacatttgaagtgtttccatggtagcgtgagcattaggtgacgtggctagcggaggactacccttgctcactgacttcctgttgtaacacactttccttacggagcctggctgtttcacagtatttcatgaatttacccacacaggtgtgatcctccttgagcattgaggaggcacatggagaactaaatcttttgtagtagctgagatctgcaatatataacgggacagtcaaagggcaatgtttttctgtaacatattggaaaaagaaaatgcagttatattccttttttatttgttcctttagtttgttttggttcagcagtcagcagttaagtatataacatggcccgcaaggacaatgaatccactcacattgcagaacaattccgaaaatggcaaactactactactactgttcagttttttaaaagttttgaaatgctgcacttacatttaaaaaaacaacaacaacattttttcaacaatttcaacaatgacacaaaaattcacatggaaatggggaagatggtctgttttgacagaaactgacaggaatcaatcaaaacaatcgaattttgaattgagtaaagtgcaatttcattggatagctaaatatctttgtaagatagagattgttgaaaattctatttttgtttttctagtcctttcaccccaggactctaaattattggggtaaaaaacagccttgcaagaaaaaggggagctatttttgctttttatgttttttattgttaaacttgtatccctttaaaaactgaaggaaattaaaaaaaaaaaaacaaaaaaacaaatctaatggtgcttttaccacaatatgttaactacattaaatgctaattaattattttctgttatcaaagcacatgactaaaatgaaatcatggtatctgttaattttataagctagaagtcactataatggattacgccaattctaaaaaattttacacctatctggcatcataggatttatcagttatcagacacctcattgtaccagagattgtccagaagttttaaagacctttgcatccctgaactgggctatgggaaataataatagtaataataataataataataatgatgaaaccaatactgacacaaatgctggtgcccattcagatcaagggtacttgttagggaaaaaaaaaaaagtttgcacccccaaacgtcctgtatcttatgaaaaaaaaaacaaaaaacaaaaacaaaaaaaaaacacaaaaaaccacagaaacaaaaacaaaaaaaagtgcaagtgatttttctaccagacagcgaagcacccctttgcttcccatgcgacttcaagaaggtttcctatactatacatatatatacgttctggttggcaagccctgctgatcagagaaagtctctgcatgttctagtgttagtaactaatttttatatagttaatgtaggataaagtagagtgcattaagacacaatattgtaatccctactctaggcacttgcctttaaactatgtttttcagcccttcagaagggttctactactgtcctatacaatcaagtaactgaaattcttgggaagacactttgctcctcatctttctccccgaaacaatgttgttttgttttgttttttttccttaatttgcacgaaaacaaaaattccatatcaatgtgccttgccctggatagcgattatttgtggaattgttgcacatgctcctctattgaaaggggtttttccctagtcaagcatttggagacactttttgtaaatgtgacttttatgtcagccatcgtcagtttcaacatctagaactaaatagaaagctagttgttccgcagataggagtagtctttattgtcctgtacggtcggtggcagtgctattctgagatctgtagatgcttagaatatcagtattttggatgttgctgcattttacaatttatttggagtcttcctttattttcccccagatatatgaaaatatgcaatacctgcttatatcatgtagaaaagcttagcaattattaatttttcttttatttttttttatttgaccaaagtcggtgctgcacttgacgcagtgtgttttaggtgtttgtctttgtacttttttgtgatttttgaatgcacgtgcgcaggaagggctcctcttagagaagcagtcaaactgtgaagcactaagctgaccctgcttcaagcaattttgtttttacaactgttcctttcacaagcaagccttaaaaaaaaaaaagacaacttcctttttcttcagctcccacaccccatttttcttagcagactgcagtcaatccacattcaataaaaagtatataatgcccatttttatatgcacgtttttaaacttccaagttctgaaaattgtttactggttatctctatttaaggaaaaaaaaataaaataaaacattttggattttcatatgtgtctgataagtggttgaatagtcgtttggcgctgttgtatggtgtgattgtcagtgtatggtgtcacttcctatagccagccagcatactttgccttcccctatagcacttagctgggcattactttattatgacatatgtgcactaaaaaatgaaaaaaaggaaaaaaagaaaaaaaaaaagaaaaaatagcagctttcagtgcttcacagtgaagggaaaaaagcctagacaaacattttgtcagaaccttgcaataagccaaggtattaccagtaaattggttgtatatacaataaaattgcacccttttttaaacaaaacaaactaagcaatagtttgggcagttttagttgtttttagtgagcatgttgtagtcatgactgcaaagagagagaataaactgcccgctcagaagatatgtaatttgtattgttgtatagttttattgattacactgatttattctaccctattttataatgcaggacttttgtaatgttgtttaaatgaggaaaaatttctgtcaaattagcctagtaaaatttctgatcgttcattataaaggcagcgttcatagaattgcttttctttctttttaccccccctttgggaactggatttaagtttaaaactttcctgtttcctttttttttttttttttgtaagtatttaaatacaattatttttttctctcaatggtatagcatattcctatgcttgagaagtataggtctactgaaaaaccattgtaaatggacgttacaggtatgctgtatttttgaaggtattttgttgtattaagtttgatgaagctaaaattagggaactctgaacagatttgcaggaaaaaatgttttaaaggctttaaaacattagggaggcagtctagggtgataacgaacaggggttaagtattaaatacacgaagttacatttttgttcatgtttcattgtccagaaagcagcaggaaactattcagttgtgatcaagcaggaaaaaagaaacaccaacagttgccagtgtttttgctttttagcttaaaagcatagtgaagatgcttgaggaagactttgctacctggggtgtgtagacagacagactgagagctatcagcatttgaaggcccagcccttgactctgagacacatttgaattttttctttcccatcaaatggcattaacaagattgggcaaagatgagtccctcaaatttctgtgttttttgtttgtttgtttgtttgttttttctttgggaactgaagtcagaggcacgaacactaactcttagcatttttctgtagactttttcttctggcccttgtccctgccagcaaaacgccccttttctgatcattcgtgcgcagagggcctcccagtaatgccacgctctccatgctagagagccttctctttcctctgaggtttgaactgatgttctgtgtcttcacaccctggcatgacagttacgtgtggtcagcccgctccccaggcccgtccctgccgccgccaggtgtgggctctaggcaggccgacaaggttacacctcccagagcttgtgatcttcattttctgacagtcaaagtgtgaaggaacccagacttccccgagccacggtgttcagtcagcccacaggaatatgcaagacccatctccaaaagtttgtctttgattttttccaagcccttagccccataagctttgaatcctgtagttacagtggcataaaggactgacaaaacctggataaggaaaaaccttttttttctatgaattttttttgttttttaggggaaagggattctaagaatgtcatttaatgtactttgcatcatgtctctagaaatatctttgtccatagtggtggtggagtctctctctctctctctctttttgtttgcttctgttttctttcttgtcttcattctttcttttcttttttatttctggtagcaggcctccatagaacaaatctaaaacacaaccaccatagtaatgtaaggagagcttcagtggcacctcaaaacccacccttcgagatctgtccaaagacagtctcagaaagctgcactgcccaccggctcagctttcattcaaaaaggcttccaaggccaattctgtcttgaagtcaatgcatgtatttactgtttgacagtaaacccgctctgccttctccacgtccaaggctgtgcattcgtctaattagcgtcgtgtatgttttccttttattttttccaataaaaaagcagtgggatgaaaattgctttgatatatagcaggtaacattgaagctattccatagcacttaactgtagtgaatactgtgtcaccaattttgaaatcaatttaatgtttaatgcaaatccattacatggtgctattataggctgacaaaatgatttacacaaatgtgacaacttgggctcaattcactctgctttccaacagtgtaaatgcatagcagtgtttatctgcatgagaactatgcactaatctatctgaagaaaaaaactatatcaactttggtatctactttccgtttacttcaatccttgcctttttggtcattgttataatgccagctttaggacagaaagaattataagaaaaccagcataatacctgatatattaaaatgtagtgcctgtgaaatctgtattatattgctcttctgaagtaagatttttctacaccggtagccttcgctgtctgtcagtcaggaccttctggtataggtgatgtaaaataaccgtacaatattaatgcatgcgattccataatgcttagtgaactgtatgaatattactcaaagttatgttagtctttttttccgacttggttcttgtcagctaggtttaaaggtatttcactgagaacgcaaattctgtcttttcttgatttcggctgttttcagtattttggaggtatacatttacttaaattcagtattactcgtgttttgtttttgtttttgttttttgttttctttttcctaggggacaagcatgggtgtttgatttcagaaatcagtacctggcgagatttttgtctcaaaacgactatttgaatttcaagaactgtgctgcgaagacactctgagaacatttgcaagtcaggggcattttccttgacccttgactgatgctatgcggagactgatacattttcttaatggacaatgttcaagccaggtacccatgcttgatctgtcttcacaccagacctcctcatattaaaaggaaaaataagaaaaaaaatgtaagaaatcacatggctatttagtttcatgcacagttgcaatattttcttcaaaaataaaactctgtacaaactttgggcccgattcataagaaaaagaagtttgctattaacacgggatttttttaatatactttttttggtctaaatttgaaattacttgcttcccaaattaaataaatttcatctcatttttttccctaaaccagcacccatctgccttttattccccaaagagttacctttcccagattagggggatggtatgtggggagcagatagcggaaatgcttagaaagataagggggaccacccacagctggtcgtgagaacagggagacagtgtgtgggggtgggacctcatctgtgtgcctggtatcctgagttttacatgtagatgcattcgcctatttgattcagaaaaataaactttcccaaaatgtgtctgaaccacaagagcatacagtggaagtgctacctctaatctaaccagagcaccttcatggtggaagacacccaccaggtcatacaatgtgaacttttgtatctctgcagtggtttcaaggacaaatagtgtccaatgtattgggccatttttcctgctgtttttatactcaacttctcaaaatgaaaaaagcttttatttttcctttgacttatttgtgttgttcttattttttaaatttttattttttgataatagtctgtaagttagcctttttgggttttttttttttttttttggcttttttttttgtttgtttttttttcttttgacattgcaaccgaaggtcataaggccgctagctccgctgggacagaggcttgagagaactaacggctcggtgccttctccctggtctcagaccatcgtctctgcactgcgaaggcatttggtagcctcaccactgagatactaactagacctagactaggagctttatcaggttctaggaggtcctttaggaagactctcaaaggcaaatccctgatcccccgccccacccttagccctgccctctcaccagagcaaaattcactggggacttttcccaccacacatggaaatctgtccactcggaatacctctgttttccatttcaaattgtagggggaggggatggaacacttccagtgatggtaagagatctgttatgaaacgaaacaccccccgtgttaataacttggtctgaaatctgtttttatgagccgggccccctgtgcctctagtatacttgtattgactctcatagttacccttttagttttactgtgttctgtgaaaatttgtaattggttgagaatcactgtgggcgtccattcttattcaactaaatctccacaggttttttgagctggtgtggattagtttaactcttgtattcaaccattagtgctaccaccttctcacattacaatacaattactggaagcaagtactgcatttcctatgcaacaaaaaaggaaaaataaaaaattgctaatgctatggaagctgtgtcatcatttgctttacagcatgcctgggtgattgagtgacagtcacgggtgtggactggaggctcccacagaagatggtctttatgcaccatggggtttgtcaggcacatagcatccttggctgtgttctgatgggcagtgttacttttttcacctacttggacaaatacaggatttgacactcacatagtgtttactgtgtgcctgatattgttctgagtgctgtatagattgtatcagttggggcccaatcgggaatcaggaataagattcaatgggttttccaacaggggctgtaaagttgcctaggtattagtaactgcaggatacagccactacccctggagctggggaaaccgaagggaaaggtgggcttaccagaacctaggcactcaaggagggacaccacacagctgatatttgggtcttttctgagggaggtggtcaccacaaaggtggggacagcacatggccagtggccagacctctgagaagacatggggtgctggtgctagaatcactgcagagaatgaaggggagattagtactttctgaggaggtgaggtgtggctggtgccagagtgcccaaaggagctggaggctgcaggtgcagctgttctctgctgcggtggcattgtggacagaaactgaaaccagaaagaaatcccttcgccctcttcctcctcctcctcctaggctcctgcctgtgtctcccctgggctggacctaatggtagccgtcaggcaagggagtctggaaaaggtaatgagaaaaatatcagccccaaccccacgaagcagaatatagatgagacagcttggagacaagacgatacataaataacagcagacatatctcagtccattcaaacctcacagccaccctgggagagaggtactgcttttatccttttatagatgaggaaaccaaggcagagggagattaaataatttacccaaggccatatggtgtgtaattgacaaagggggatttgaatccaagaaatccggccccaacctccatcctataatcactgcaatatattgactctattaattatttattcaataaatacttattgagtgcctactatgtaccagagaccatgccaggggctagaaatagtaaagattgggcatctatgctgatagagtatgcattctagtggacaaacgaaacattcaaataatgtttgaacagcagcagaggtaagcatgtggttgtgacatgtgccataaatgttatacattgttgcaggaggatgccatgagctcaagagttcgagaccagcctgggtaacacagggagacccccatctctaccaaaaatttaaaaatttaaaaattggctgagcatggtggtgtgcatctgtggtcccagctacttgggaggctgaggtgggaggatggcttgaacctgggagatcgaggctgcagtgagccacgatcgtgccactgcactccagcctgagtgacagagcgagaccctgtctcaaaataaatttgtttaaaaaaggatatacattgccatgaaagcctaatgagactagtatgataggtagaaattaaccaggcaaaagagggaagaaaacattctgcgcagaaaaaccagcatgtacaaagaacctgagtcaaatggagctcggcacctgtgaggggatagaagaaggcttgtttggatgaagagagaaacggagaagaaatgcagtacgaaatgaagcttgatatttaggtgaagacattgtgggaccttgcaggcaggtttgtcctaccttctaagagctttataaaacatgtatcaatcagattagactaggtctgtgctgtcatacaaacaagtccaaaatctcagtggctcgcaacaataaaggtttaccaccgattttacatgtctatcaaaggttgcctgaggcctcttcacaggatctcattccgggacccagggtgaaaagtagctaccatctggaccactgctggatgtgtcagcaaggcacatagctggcttttaatattccaactggaattgacacacgccactccgctcacatttcactggccagaacaagtcaccaggccatgcctgggtttgacaggacctagaaggataatccttccccgcggaaggcttagagaacattactgcagcctagttaagagaggagagagaagtaggacctgagtggagagggctgccaaagaaagctactgcagcaatggaagagatgacagactcccaggctgtggtgcccatgatagaatgtaagagaagtggatagatgcgagagattaatacgggtattaatagccactgcatattgagctctttcatgtgccaagtgctataggtgatttatcccattaaattgaatatgttctctcttattgtagctctcagaaaggtatagtcagtcctcaaaacacattgctgactcaagtgaatagagcaatttcacatgtacatgccttagagtttaagttagaccaaatcagtcactaccttatttcagtcttgagtatttgggattaagaaattggaatgaaagtcagccgacaccacccctttattgacatactctatgacaagtggtgtgtaatactgggctcaaagggaaggtaatgcagtgatcaaaacgatggactcagacccagtcagcctgggttgaatcctggctctgcattttattagctctgtggtgttggcaagtgcctcagtttccccattggtaagatgggaataattataacagcaccgaactacttcatagggctgatgtagatttttgatgagttaaattttgtaaagtggttaacagtggcttggcatattgtaaatgctatgtgaatgctgtaactaactcaacaaatgattccaaaatgtaggcataaggcattctttcagtgcaccattggcataaaccttcttcctcttcctgatcattttcaggcctctatttgggggaattctgaaacctttcatctaacacctgcctcaactaagtaggaggaagtagcatacaaaattagtccaggaataaagaaaatgtggtatatatccacaatggaatattattcagccataaaagaatgaaattctgccatttgcagcaacatggatgagcccaggggacattatcgttaagtgaaataagccaggcgcaaaaaggcaaatactgcatgttctcactcatgtgaaagcaaaagttgatcttgtagagagtagaacagtggtgaccagaggcaggaaaagcggtgtgtgcaggataacaagttggctaatgggtacaaaattacacttaggataaataagttatagtgttcttatagcgtagtaggatatatgtagctaacaataatatattgtacatatcaaaatagctagaagagagggttttgaatgttcccaacacaaagaaatgatcaacattggaggtgatcgatatttcaattagcctgattttatcattacacattgtatacattcattgaaagaacacatgtaccccataaatatatatgattattatgtatcaatttaaaacttaaaagaattttttgagatggaatcttactctgttgcccaggctgaagtacagtggcacagtcttggctcattgcagcctccacctcctggtttcaagcaattcttgatccttgtgcatcagcctcctgagtagctgagattacaggtgtgcgccaccatgcccagctattttttatatttttagtagagttggggttttgccatgttgcccaggctggtcttgaacttctggccccaagtgatctgcccacttcagcctcccaaagtgcccgccaggattataggcgtgaaccactgcacccagccaaaacttaaaaatgtatgtgtgtatatatatatacatatatatatacatatatatacatatatatatatatacacacacacacacacacacacatatatatatatatatatctcgcaccattgcactccagcctgggcgacagagcgacactccgtctcaaaaaaaaaaaaaaaaaaaaagagtggatttccctggcagtcagaataccgttaaggaaaatacaaaccagagccaggtgaggccatctctctgggttccatccaatctagtctggtgcccgatgcttggaattgtgcttcccagcacattctcatccatgttcattgagccattcggacttctctcttgagggaggcagagattgctgcgttcattttaccggtgaagaaactgagactccgaggtgcagtaacttgcttagtgttatgtggccagtaagtggtggaagtgggactcaaaatccagtcctctagtttcaagccaggctcctttccactatacaatactgccctccagggtgccagggttcttctccttggagaggcaccagagtaatagttgttatgtggttgatactgcgctgggtgttttacatgcattaatttcatttaacccttttaatgaccttataaggtagttactatccttattcccattttacatatagggaaattgaggccctatatgtaactaataaaatgacaaaccaagatatgtatagatagatgatagatagatagatagatagacagatgatagatgatagatatagatatagatatatctaaatatatatatatatttagatggagtttcactcttgttgcccaggctggagtgcaatggcgccaatggcgcaatctcggctcactgcaaactctgcctcccaggttcaagccattctccagcctcagcctccctagtagctgggattgcaggtgcccaccaccacacccaactaattttttgtatttttagtggagacagggtttcactatgttgtccagactggtctggaacacctgacctcgggcaatccacccacctcagctgggattacaggcgtgagccaccatactggctaactcaaaatatttttaagagttaatagaaatatgaaaggaaaaaaaatgaatccaggatctgagaccagacacactgggcttaagtcttggtttgtcattttattagttctgcaatattaagggcctcaatttccctatatgtaaaatgggaataaggatagtaactaccttataaggtcattaaaagggttaaatgaaattaatgcatgtaaaacacccagcgcagtatcaaccacataacaactattagtctggtgcctctccaaggagaagaaccctggcaccctggagggcagtattgtatagtggaaaggagcctggcttgaaactagaggactggattttgagtcccacttccaccacttactggccacataacactaagcaagttactgcacctcggagtctcagtttcttcaccggtaaaatgaacgcagcaatctctgcctccctcaagagagaagtccgaatggctcaatgaacatggatgagaatgtgctgggaagcacaattccaagcatcgggcaccagactagattggatggaacccagagagatggcctcacctggctctggtttgtattttccttaacggtattctgactgccagggaaatccactctttttttttttttttttttttttttgttttttttttgagacggagtgtcgctctgtcgcccaggctggagtgcaatggtgcgatctcggctcactgcaagctccgcctcctgggtgcacgcccttctcctgcctcagcctcccaagtagctgggattacaggcgcccgccaccacgcccagctatttttttgtatttttagtagagacagggtttcaccgtgttagccaggatggtctcgatctcctgacctcgtgatctacttgcctcggcctcccaaagtgctgggattacaggcgtgagccaccgcgcccggccgggaaatccactcttaacaggcaaggaaaggaggccaagagactggcaccagtcatcattttaaccatccacgttctgcctctttggtaaaagaacatggctaaatagtaaagatcccactggcggagaagcagggcttcccttgacttatgaggaatgaaataccttctggttcatctctgaaacacattaggccattgtaaatttgctttccatctggcacactcagtatggattttaagtctttttataggaaacctggtaaaacaaataaaaagcacatttatctctactatcacattaaattttttattatggaacaatatcatgcatgtacaaattaaagagattgatgaacaaattaatatgtacctatcgtccatcacttgtaatcaatggctcccccgtttacaccccagccacttcctgactgaccacccccaggttattttaaaacaaatatcaggtatccataaatttcatttcgtccccaaatttttagactatatctctaaaagacaagaattcttttataagacgtactcaaaataccattttatacctcaaaatagtaacaataatttcttaatatcactgaataaccagtctgttcaaaaactcctatcttataattttttaaaaatagtttgtccaaataagaaacattcactaaatggtttgtatatgccttaagtctttataactgtagggtctccttccctctctggtattttccttgtaacaatttgcttgagaaactgggtcatttgtcctgaagagtttttcacaggatttggtggattatatcaatgtggcatacacagttcagcatgttctaccataaaattggaagcatattcctgaccttggaagttgaccctatgggatgaaatcccaagactgtttcacagataaatcatgggaaggactaagggacttgcccttgggtttgtgtcctgactttctggaaactgtgggcaaataactggcccaaagggcaagctgcttcaggacagttctatgctgctgatttttgttttgttttgtattgtttcatctaacagggaaagcgaaggctaagggagggcctactgaatgacaaaggaccctgtcctttgtcagcttctactgatattaaaaacaaaaacaaacaaacaaaaaaacagacaaaaaaactatttccaccttaacagggaagatgaataattctggttgaaaactcaagattaaagtctgtctggactgggcacagtggctcacgcctgtaatcccagcactttgggaggccaagtcaggcagatgacctgaggtgacggagttgaagaccagcctgtccaacatggtgaaactccgtatctactaaaaaaaaaaaaaaaaaaaaaaaattagccaggtgtggtggtgggcgcctgtaatcccagctaattgggaggctgaggctggagaatcgcttgaacccaggaggtggaggttgcagtgagtggagatcatgccattgcactctagcctgggcaacaagagggaaactccgtctcaaaaaataaaaataggccaggcacggtggctcacgtctgtagtcccagcactttgggaggccgaggcaggcagatcacctgaggtcgggagttctagaccagtctaaccaacatggagaaacccctttctctactaaaaatacaaaattagctgggcatggtggtgcatgcctataatcccagctactcaggaggctgaggcaggagaatcgcttgaacctgggaggcagaggttagagtgagccaagatcacgccattgcactccagcctgagcaacaagagagtaactccatctcaaaaaaataaataaataaaataaaaataaaaataaagtgtttctgttcatgcctccttgttcaataggcttctttcctttgagaatatgtgctcttggggaccagaagtcagttgctagccagggaagaaagaattccctggtcaggctgtgtggaagcagtggggctagattcttgaaggctctaagatcacttcatctctagctcacttgctgcttccacttccaccaccatggctctgaaccctgacatgggccaactcttttctatgaaactacaaaagctcattctgtaaagtcattcaaaacaaacacaacaaacatcattgagtagctcccatgtgccagaacttggggttagcgaaggagatgaatttgagatcatcccagaagaatggagtctagtagaggaagcagacatgcaaaccgaataatcacgccacagccttgcaaaaaccacgaagacatcatgggccaggtaatctgggaaccaatcatgcccaaggaagagagaagagggaggagcaggggctctacagggagcccctggaggctacagggaggagatacacagtctaggagttcaaggacgaggaagagttcaagagattggctggaagatactaatgacactaatagtaacaacagccacatgcactgagtgaacccttcacttcacaccgtgtgttattctaagtgcttcccacacacttgcacatataatccaacccagtggcagagacaccattgttatccctattttacagatgaggatactgaggcacagtttcagtagtgtttcttcccttcttaatagctacctgtgtatgaccttaaaatgcaaacactcagaggcttaaggggtgtagtgcctgacatgtgtaaatcacaatttgttccaaaatgaagtctggttgaccgccctcttcccaatgcccagaacagtgcttggcatataaaatacactctatactgtgaggggatgagcatcctattatcctgtgtgcccctccagatgcactctccaatcttctccaaaatcctctctgctcggaagactgacctgtgtggaccacatcagtgggcttctctgacctagagctttcaattgagatcagcagattggaagcgctgacagaatggtggattggaggagagtgatgtcagggtatttatgcagggactacagaaagttcctggagaaatggagttaaaagataaaaataatgctttcctgggggtcatgttaaaaagataaaataatttttggctgggtgcggtggctcatgcctgtaatctcagcactttgggaggccgaggcgggcagatcacttgaggtcacgagttcgagaccagcctgaccaacatggtgaaaccctgtctctactaaaaatacaaaaattagccaggcgttgtggcgggcacctataatcccaactactcgggaggctgaggcagaagaatcacttgaacccaggaggcggaggctgcaaaaaaagataaaataattgttttaaaatacaaactttgtttctcaacgtgagcttcataaatttcaagacatctttgtgagggatgatcgcagtcatttagtccatcccttgagaactgagggtcccaggaatttaaccatgtcagtgcagtctttcttacattattaacaggacaaaaatgggtgccctttaaatatttttttaagattaggaaacaaaaggaagtcagaaagagtcaaagcaggaccgtgatgtggatgcccaatgatatcccactgaaactctcacaaagtttgcccctgtttgaggagaggaatgagcaggagcactgttgtgctggaaaaggcctctctggtgaagctttcctgagcatttttctgtgaacactttggttaactttctccactctcatagtaagtagatgttattgttctttgtctctccagaaagtcaataagcaaaatgccttgagcatccccaaaaaaccattgccatgacctttgctcttgactagaacagttttgctttgactagaccacttctacttctttacttttttttttttttttttttttgagagacaaggtctcattctgttccccaggccagagtacagtggcatgatcacaggtgactgaagcttctgctccctgggcttaagcaatcctcctacctcagcctcctgaatacctgggactacaagagcataccaccacacctggctaattttttctattttctgtagagatggagtcttgctatgtcgcctaggctggtctcaaacttctggacc

SEQ ID NO: 207 - DNA, 8376 bp, Homo sapiens
tttttggctgtatttttatgtttttcagattcaagtcaatctgaaagtcccagccagccaagtgacgctgacattaaggaccagccagaaaatggacatttgggcttccaggacagttttgtcacatcaggtgtttttagtgtcactgagctagtaagagtgtcacagacaccaatagctgcaggaactggcccaaatttttctctctcagatttggaaagttcttcatactacagcatgagtccaggagcaatgaggaggtctttacccagcacatcctctacgagctccacaaagcgcctcaagtctgtggaggatgaaatggacagtcctggtgaggagccattttatacaggccaagggcgctccccaggaagtggcagtcagtcaagtggatggcatgaagtggagccaggaatgccatctccaaccacactgaagaagtcggagaagtctggtttcagcagcccctccccttcacagacctcctccctgggaacggcgttcacacagcatcaccgacctgtcattacaggacccagagcaagtccgcatgcaacaccatcgactcttcatttcccgacatcacccattatccagcagcctgggccttacttctcacacccagccatccgctatcaccctcaggagacgctgaaagaatttgtccaacttgtctgccctgatgctggtcagcaggctggacaggtggggttcctcaatcccaatgggagcagccaaggcaaggtgcacaacccattccttcccaccccaatgttgccaccgccaccgccaccaccgatggccaggcctgtgcctctgccggtgccagacacaaagcctccaaccacgtcaacagaaggaggtgcagcctcccccacgtcaccaatcctggtacctgggataaaagttgcagcgtcccaccatccaccagacagaccacctgaccccttctcaactctgtaacatggacgcaacctcaacccagcgcagttacaacttcactatcagcggaaggggagaaaaaccgattcaaatcaacttgtacatggaaacagcaagcattatggtcaaacagcaaaggccataaccttttgggattttttttttttttaaaatactttagggactgttgtaatttctcatatggtgctggaaatggttgggctttgtaacatttgaagtgtttccatggtagcgtgagcattaggtgacgtggctagcggaggactacccttgctcactgacttcctgttgtaacacactttccttacggagcctggctgtttcacagtatttcatgaatttacccacacaggtgtgatcctccttgagcattgaggaggcacatggagaactaaatcttttgtagtagctgagatctgcaatatataacgggacagtcaaagggcaatgtttttctgtaacatattggaaaaagaaaatgcagttatattccttttttatttgttcctttagtttgttttggttcagcagtcagcagttaagtatataacatggcccgcaaggacaatgaatccactcacattgcagaacaattccgaaaatggcaaactactactactactgttcagttttttaaaagttttgaaatgctgcacttacatttaaaaaaacaacaacaacattttttcaacaatttcaacaatgacacaaaaattcacatggaaatggggaagatggtctgttttgacagaaactgacaggaatcaatcaaaacaatcgaattttgaattgagtaaagtgcaatttcattggatagctaaatatctttgtaagatagagattgttgaaaattctatttttgtttttctagtcctttcaccccaggactctaaattattggggtaaaaaacagccttgcaagaaaaaggggagctatttttgctttttatgttttttattgttaaacttgtatccctttaaaaactgaaggaaattaaaaaaaaaaaaacaaaaaaacaaatctaatggtgcttttaccacaatatgttaactacattaaatgctaattaattattttctgttatcaaagcacatgactaaaatgaaatcatggtatctgttaattttataagctagaagtcactataatggattacgccaattctaaaaaattttacacctatctggcatcataggatttatcagttatcagacacctcattgtaccagagattgtccagaagttttaaagacctttgcatccctgaactgggctatgggaaataataatagtaataataataataataataatgatgaaaccaatactgacacaaatgctggtgcccattcagatcaagggtacttgttagggaaaaaaaaaaaagtttgcacccccaaacgtcctgtatcttatgaaaaaaaaaacaaaaaacaaaaacaaaaaaaaaacacaaaaaaccacagaaacaaaaacaaaaaaaagtgcaagtgatttttctaccagacagcgaagcacccctttgcttcccatgcgacttcaagaaggtttcctatactatacatatatatacgttctggttggcaagccctgctgatcagagaaagtctctgcatgttctagtgttagtaactaatttttatatagttaatgtaggataaagtagagtgcattaagacacaatattgtaatccctactctaggcacttgcctttaaactatgtttttcagcccttcagaagggttctactactgtcctatacaatcaagtaactgaaattcttgggaagacactttgctcctcatctttctccccgaaacaatgttgttttgttttgttttttttccttaatttgcacgaaaacaaaaattccatatcaatgtgccttgccctggatagcgattatttgtggaattgttgcacatgctcctctattgaaaggggtttttccctagtcaagcatttggagacactttttgtaaatgtgacttttatgtcagccatcgtcagtttcaacatctagaactaaatagaaagctagttgttccgcagataggagtagtctttattgtcctgtacggtcggtggcagtgctattctgagatctgtagatgcttagaatatcagtattttggatgttgctgcattttacaatttatttggagtcttcctttattttcccccagatatatgaaaatatgcaatacctgcttatatcatgtagaaaagcttagcaattattaatttttcttttatttttttttatttgaccaaagtcggtgctgcacttgacgcagtgtgttttaggtgtttgtctttgtacttttttgtgatttttgaatgcacgtgcgcaggaagggctcctcttagagaagcagtcaaactgtgaagcactaagctgaccctgcttcaagcaattttgtttttacaactgttcctttcacaagcaagccttaaaaaaaaaaaagacaacttcctttttcttcagctcccacaccccatttttcttagcagactgcagtcaatccacattcaataaaaagtatataatgcccatttttatatgcacgtttttaaacttccaagttctgaaaattgtttactggttatctctatttaaggaaaaaaaaataaaataaaacattttggattttcatatgtgtctgataagtggttgaatagtcgtttggcgctgttgtatggtgtgattgtcagtgtatggtgtcacttcctatagccagccagcatactttgccttcccctatagcacttagctgggcattactttattatgacatatgtgcactaaaaaatgaaaaaaaggaaaaaaagaaaaaaaaaaagaaaaaatagcagctttcagtgcttcacagtgaagggaaaaaagcctagacaaacattttgtcagaaccttgcaataagccaaggtattaccagtaaattggttgtatatacaataaaattgcacccttttttaaacaaaacaaactaagcaatagtttgggcagttttagttgtttttagtgagcatgttgtagtcatgactgcaaagagagagaataaactgcccgctcagaagatatgtaatttgtattgttgtatagttttattgattacactgatttattctaccctattttataatgcaggacttttgtaatgttgtttaaatgaggaaaaatttctgtcaaattagcctagtaaaatttctgatcgttcattataaaggcagcgttcatagaattgcttttctttctttttaccccccctttgggaactggatttaagtttaaaactttcctgtttcctttttttttttttttttgtaagtatttaaatacaattatttttttctctcaatggtatagcatattcctatgcttgagaagtataggtctactgaaaaaccattgtaaatggacgttacaggtatgctgtatttttgaaggtattttgttgtattaagtttgatgaagctaaaattagggaactctgaacagatttgcaggaaaaaatgttttaaaggctttaaaacattagggaggcagtctagggtgataacgaacaggggttaagtattaaatacacgaagttacatttttgttcatgtttcattgtccagaaagcagcaggaaactattcagttgtgatcaagcaggaaaaaagaaacaccaacagttgccagtgtttttgctttttagcttaaaagcatagtgaagatgcttgaggaagactttgctacctggggtgtgtagacagacagactgagagctatcagcatttgaaggcccagcccttgactctgagacacatttgaattttttctttcccatcaaatggcattaacaagattgggcaaagatgagtccctcaaatttctgtgttttttgtttgtttgtttgtttgttttttctttgggaactgaagtcagaggcacgaacactaactcttagcatttttctgtagactttttcttctggcccttgtccctgccagcaaaacgccccttttctgatcattcgtgcgcagagggcctcccagtaatgccacgctctccatgctagagagccttctctttcctctgaggtttgaactgatgttctgtgtcttcacaccctggcatgacagttacgtgtggtcagcccgctccccaggcccgtccctgccgccgccaggtgtgggctctaggcaggccgacaaggttacacctcccagagcttgtgatcttcattttctgacagtcaaagtgtgaaggaacccagacttccccgagccacggtgttcagtcagcccacaggaatatgcaagacccatctccaaaagtttgtctttgattttttccaagcccttagccccataagctttgaatcctgtagttacagtggcataaaggactgacaaaacctggataaggaaaaaccttttttttctatgaattttttttgttttttaggggaaagggattctaagaatgtcatttaatgtactttgcatcatgtctctagaaatatctttgtccatagtggtggtggagtctctctctctctctctctttttgtttgcttctgttttctttcttgtcttcattctttcttttcttttttatttctggtagcaggcctccatagaacaaatctaaaacacaaccaccatagtaatgtaaggagagcttcagtggcacctcaaaacccacccttcgagatctgtccaaagacagtctcagaaagctgcactgcccaccggctcagctttcattcaaaaaggcttccaaggccaattctgtcttgaagtcaatgcatgtatttactgtttgacagtaaacccgctctgccttctccacgtccaaggctgtgcattcgtctaattagcgtcgtgtatgttttccttttattttttccaataaaaaagcagtgggatgaaaattgctttgatatatagcaggtaacattgaagctattccatagcacttaactgtagtgaatactgtgtcaccaattttgaaatcaatttaatgtttaatgcaaatccattacatggtgctattataggctgacaaaatgatttacacaaatgtgacaacttgggctcaattcactctgctttccaacagtgtaaatgcatagcagtgtttatctgcatgagaactatgcactaatctatctgaagaaaaaaactatatcaactttggtatctactttccgtttacttcaatccttgcctttttggtcattgttataatgccagctttaggacagaaagaattataagaaaaccagcataatacctgatatattaaaatgtagtgcctgtgaaatctgtattatattgctcttctgaagtaagatttttctacaccggtagccttcgctgtctgtcagtcaggaccttctggtataggtgatgtaaaataaccgtacaatattaatgcatgcgattccataatgcttagtgaactgtatgaatattactcaaagttatgttagtctttttttccgacttggttcttgtcagctaggtttaaaggtatttcactgagaacgcaaattctgtcttttcttgatttcggctgttttcagtattttggaggtatacatttacttaaattcagtattactcgtgttttgtttttgtttttgttttttgttttctttttcctaggggacaagcatgggtgtttgatttcagaaatcagtacctggcgagatttttgtctcaaaacgactatttgaatttcaagaactgtgctgcgaagacactctgagaacatttgcaagtcaggggcattttccttgacccttgactgatgctatgcggagactgatacattttcttaatggacaatgttcaagccaggtacccatgcttgatctgtcttcacaccagacctcctcatattaaaaggaaaaataagaaaaaaaatgtaagaaatcacatggctatttagtttcatgcacagttgcaatattttcttcaaaaataaaactctgtacaaactttgggcccgattcataagaaaaagaagtttgctattaacacgggatttttttaatatactttttttggtctaaatttgaaattacttgcttcccaaattaaataaatttcatctcatttttttccctaaaccagcacccatctgccttttattccccaaagagttacctttcccagattagggggatggtatgtggggagcagatagcggaaatgcttagaaagataagggggaccacccacagctggtcgtgagaacagggagacagtgtgtgggggtgggacctcatctgtgtgcctggtatcctgagttttacatgtagatgcattcgcctatttgattcagaaaaataaactttcccaaaatgtgtctgaaccacaagagcatacagtggaagtgctacctctaatctaaccagagcaccttcatggtggaagacacccaccaggtcatacaatgtgaacttttgtatctctgcagtggtttcaaggacaaatagtgtccaatgtattgggccatttttcctgctgtttttatactcaacttctcaaaatgaaaaaagcttttatttttcctttgacttatttgtgttgttcttattttttaaatttttattttttgataatagtctgtaagttagcctttttgggttttttttttttttttttggcttttttttttgtttgtttttttttcttttgacattgcaaccgaaggtcataaggccgctagctccgctgggacagaggcttgagagaactaacggctcggtgccttctccctggtctcagaccatcgtctctgcactgcgaaggcatttggtagcctcaccactgagatactaactagacctagactaggagctttatcaggttctaggaggtcctttaggaagactctcaaaggcaaatccctgatcccccgccccacccttagccctgccctctcaccagagcaaaattcactggggacttttcccaccacacatggaaatctgtccactcggaatacctctgttttccatttcaaattgtagggggaggggatggaacacttccagtgatggtaagagatctgttatgaaacgaaacaccccccgtgttaataacttggtctgaaatctgtttttatgagccgggccccctgtgcctctagtatacttgtattgactctcatagttacccttttagttttactgtgttctgtgaaaatttgtaattggttgagaatcactgtgggcgtccattcttattcaactaaatctccacaggttttttgagctggtgtggattagtttaactcttgtattcaaccattagtgctaccaccttctcacattacaatacaattactggaagcaagtactgcatttcctatgcaacaaaaaaggaaaaataaaaaattgctaatgct

SEQ ID NO: 208 - protein, 238 aa, Homo sapiens
MSPGAMRRSLPSTSSTSSTKRLKSVEDEMDSPGEEPFYTGQGRSPGSGSQSSGWHEVEPGMPSPTTLKKSEKSGFSSPSPSQTSSLGTAFTQHHRPVITGPRDHATPSTLHFPTSPIIQQPGPYFSHPAIRYHPQETLKEFVQLVCPDAGQQAGQVGFLNPNGSSQGKVHNPFLPTPMLPPPPPPPMARPVPLPVPDTKPPTTSTEGGADTSPILVPGIKVAASHHPPDRPPDPFSTL

SEQ ID NO: 209 - DNA, 9415 bp, Homo sapiens
ccccccgcggcggcggcgcgagcgggcggcggctgtgcggtgcggtgcagagcggaggcggaggcgggcgcgcgggcagctcgcgggcacccggccgggccggcgcgggagcgggaaaggtgcgctatgcctttaacacccgcgtacagtaggcatgtatagtggagtgtagggaaactctaggcggggttaaagttcagctcatggagcggcaatagcgctggctggctggctgcagttgagccgacttggaaatgtgaacgcaagaagcaggcttgatttttttttctccccccttctctctctctctctctctctctcttcctctctccctctttctcctctctcacccacactcacgcacacctccaaaccgcacacccagacgcacacgcataccccagcgcccggcagttatgtattctccgctctgtctcacccaggatgaatttcatcctttcatcgaagcacttctgccccacgtccgagcctttgcctacacatggttcaacctgcaggcccgaaaacgaaaatacttcaaaaaacatgaaaagcgtatgtcaaaagaagaagagagagccgtgaaggatgaattgctaagtgaaaaaccagaggtcaagcagaagtgggcatctcgacttctggcaaagttgcggaaagatatccgacccgaatatcgagaggattttgttcttacagttacagggaaaaaacctccatgttgtgttctttccaacccagaccagaaaggcaagatgcgaagaattgactgcctccgccaggcagataaagtctggaggttggaccttgttatggtgattttgtttaaaggtattccgctggaaagtactgatggcgagcgccttgtaaagtccccacaatgctctaatccagggctctgtgtccaaccccatcacataggggtttctgttaaggaactcgatttatatttggcatactttgtgcatgcagcagattcaagtcaatctgaaagtcccagccagccaagtgacgctgacattaaggaccagccagaaaatggacatttgggcttccaggacagttttgtcacatcaggtgtttttagtgtcactgagctagtaagagtgtcacagacaccaatagctgcaggaactggcccaaatttttctctctcagatttggaaagttcttcatactacagcatgagtccaggagcaatgaggaggtctttacccagcacatcctctacgagctccacaaagcgcctcaagtctgtggaggatgaaatggacagtcctggtgaggagccattttatacaggccaagggcgctccccaggaagtggcagtcagtcaagtggatggcatgaagtggagccaggaatgccatctccaaccacactgaagaagtcggagaagtctggtttcagcagcccctccccttcacagacctcctccctgggaacggcgttcacacagcatcaccgacctgtcattacaggacccagagcaagtccgcatgcaacaccatcgactcttcatttcccgacatcacccattatccagcagcctgggccttacttctcacacccagccatccgctatcaccctcaggagacgctgaaagaatttgtccaacttgtctgccctgatgctggtcagcaggctggacaggtggggttcctcaatcccaatgggagcagccaaggcaaggtgcacaacccattccttcccaccccaatgttgccaccgccaccgccaccaccgatggccaggcctgtgcctctgccggtgccagacacaaagcctccaaccacgtcaacagaaggaggtgcagcctcccccacgtcaccaacctactcgacacccagcacctcccccgcaaaccgattcgtcagtgttggaccacgggatccaagctttgtaaatatccctcaacagacacagtcctggtacctgggataaaagttgcagcgtcccaccatccaccagacagaccacctgaccccttctcaactctgtaacatggacgcaacctcaacccagcgcagttacaacttcactatcagcggaaggggagaaaaaccgattcaaatcaacttgtacatggaaacagcaagcattatggtcaaacagcaaaggccataaccttttgggattttttttttttttaaaatactttagggactgttgtaatttctcatatggtgctggaaatggttgggctttgtaacatttgaagtgtttccatggtagcgtgagcattaggtgacgtggctagcggaggactacccttgctcactgacttcctgttgtaacacactttccttacggagcctggctgtttcacagtatttcatgaatttacccacacaggtgtgatcctccttgagcattgaggaggcacatggagaactaaatcttttgtagtagctgagatctgcaatatataacgggacagtcaaagggcaatgtttttctgtaacatattggaaaaagaaaatgcagttatattccttttttatttgttcctttagtttgttttggttcagcagtcagcagttaagtatataacatggcccgcaaggacaatgaatccactcacattgcagaacaattccgaaaatggcaaactactactactactgttcagttttttaaaagttttgaaatgctgcacttacatttaaaaaaacaacaacaacattttttcaacaatttcaacaatgacacaaaaattcacatggaaatggggaagatggtctgttttgacagaaactgacaggaatcaatcaaaacaatcgaattttgaattgagtaaagtgcaatttcattggatagctaaatatctttgtaagatagagattgttgaaaattctatttttgtttttctagtcctttcaccccaggactctaaattattggggtaaaaaacagccttgcaagaaaaaggggagctatttttgctttttatgttttttattgttaaacttgtatccctttaaaaactgaaggaaattaaaaaaaaaaaaacaaaaaaacaaatctaatggtgcttttaccacaatatgttaactacattaaatgctaattaattattttctgttatcaaagcacatgactaaaatgaaatcatggtatctgttaattttataagctagaagtcactataatggattacgccaattctaaaaaattttacacctatctggcatcataggatttatcagttatcagacacctcattgtaccagagattgtccagaagttttaaagacctttgcatccctgaactgggctatgggaaataataatagtaataataataataataataatgatgaaaccaatactgacacaaatgctggtgcccattcagatcaagggtacttgttagggaaaaaaaaaaaagtttgcacccccaaacgtcctgtatcttatgaaaaaaaaaacaaaaaacaaaaacaaaaaaaaaacacaaaaaaccacagaaacaaaaacaaaaaaaagtgcaagtgatttttctaccagacagcgaagcacccctttgcttcccatgcgacttcaagaaggtttcctatactatacatatatatacgttctggttggcaagccctgctgatcagagaaagtctctgcatgttctagtgttagtaactaatttttatatagttaatgtaggataaagtagagtgcattaagacacaatattgtaatccctactctaggcacttgcctttaaactatgtttttcagcccttcagaagggttctactactgtcctatacaatcaagtaactgaaattcttgggaagacactttgctcctcatctttctccccgaaacaatgttgttttgttttgttttttttccttaatttgcacgaaaacaaaaattccatatcaatgtgccttgccctggatagcgattatttgtggaattgttgcacatgctcctctattgaaaggggtttttccctagtcaagcatttggagacactttttgtaaatgtgacttttatgtcagccatcgtcagtttcaacatctagaactaaatagaaagctagttgttccgcagataggagtagtctttattgtcctgtacggtcggtggcagtgctattctgagatctgtagatgcttagaatatcagtattttggatgttgctgcattttacaatttatttggagtcttcctttattttcccccagatatatgaaaatatgcaatacctgcttatatcatgtagaaaagcttagcaattattaatttttcttttatttttttttatttgaccaaagtcggtgctgcacttgacgcagtgtgttttaggtgtttgtctttgtacttttttgtgatttttgaatgcacgtgcgcaggaagggctcctcttagagaagcagtcaaactgtgaagcactaagctgaccctgcttcaagcaattttgtttttacaactgttcctttcacaagcaagccttaaaaaaaaaaaagacaacttcctttttcttcagctcccacaccccatttttcttagcagactgcagtcaatccacattcaataaaaagtatataatgcccatttttatatgcacgtttttaaacttccaagttctgaaaattgtttactggttatctctatttaaggaaaaaaaaataaaataaaacattttggattttcatatgtgtctgataagtggttgaatagtcgtttggcgctgttgtatggtgtgattgtcagtgtatggtgtcacttcctatagccagccagcatactttgccttcccctatagcacttagctgggcattactttattatgacatatgtgcactaaaaaatgaaaaaaaggaaaaaaagaaaaaaaaaaagaaaaaatagcagctttcagtgcttcacagtgaagggaaaaaagcctagacaaacattttgtcagaaccttgcaataagccaaggtattaccagtaaattggttgtatatacaataaaattgcacccttttttaaacaaaacaaactaagcaatagtttgggcagttttagttgtttttagtgagcatgttgtagtcatgactgcaaagagagagaataaactgcccgctcagaagatatgtaatttgtattgttgtatagttttattgattacactgatttattctaccctattttataatgcaggacttttgtaatgttgtttaaatgaggaaaaatttctgtcaaattagcctagtaaaatttctgatcgttcattataaaggcagcgttcatagaattgcttttctttctttttaccccccctttgggaactggatttaagtttaaaactttcctgtttcctttttttttttttttttgtaagtatttaaatacaattatttttttctctcaatggtatagcatattcctatgcttgagaagtataggtctactgaaaaaccattgtaaatggacgttacaggtatgctgtatttttgaaggtattttgttgtattaagtttgatgaagctaaaattagggaactctgaacagatttgcaggaaaaaatgttttaaaggctttaaaacattagggaggcagtctagggtgataacgaacaggggttaagtattaaatacacgaagttacatttttgttcatgtttcattgtccagaaagcagcaggaaactattcagttgtgatcaagcaggaaaaaagaaacaccaacagttgccagtgtttttgctttttagcttaaaagcatagtgaagatgcttgaggaagactttgctacctggggtgtgtagacagacagactgagagctatcagcatttgaaggcccagcccttgactctgagacacatttgaattttttctttcccatcaaatggcattaacaagattgggcaaagatgagtccctcaaatttctgtgttttttgtttgtttgtttgtttgttttttctttgggaactgaagtcagaggcacgaacactaactcttagcatttttctgtagactttttcttctggcccttgtccctgccagcaaaacgccccttttctgatcattcgtgcgcagagggcctcccagtaatgccacgctctccatgctagagagccttctctttcctctgaggtttgaactgatgttctgtgtcttcacaccctggcatgacagttacgtgtggtcagcccgctccccaggcccgtccctgccgccgccaggtgtgggctctaggcaggccgacaaggttacacctcccagagcttgtgatcttcattttctgacagtcaaagtgtgaaggaacccagacttccccgagccacggtgttcagtcagcccacaggaatatgcaagacccatctccaaaagtttgtctttgattttttccaagcccttagccccataagctttgaatcctgtagttacagtggcataaaggactgacaaaacctggataaggaaaaaccttttttttctatgaattttttttgttttttaggggaaagggattctaagaatgtcatttaatgtactttgcatcatgtctctagaaatatctttgtccatagtggtggtggagtctctctctctctctctctttttgtttgcttctgttttctttcttgtcttcattctttcttttcttttttatttctggtagcaggcctccatagaacaaatctaaaacacaaccaccatagtaatgtaaggagagcttcagtggcacctcaaaacccacccttcgagatctgtccaaagacagtctcagaaagctgcactgcccaccggctcagctttcattcaaaaaggcttccaaggccaattctgtcttgaagtcaatgcatgtatttactgtttgacagtaaacccgctctgccttctccacgtccaaggctgtgcattcgtctaattagcgtcgtgtatgttttccttttattttttccaataaaaaagcagtgggatgaaaattgctttgatatatagcaggtaacattgaagctattccatagcacttaactgtagtgaatactgtgtcaccaattttgaaatcaatttaatgtttaatgcaaatccattacatggtgctattataggctgacaaaatgatttacacaaatgtgacaacttgggctcaattcactctgctttccaacagtgtaaatgcatagcagtgtttatctgcatgagaactatgcactaatctatctgaagaaaaaaactatatcaactttggtatctactttccgtttacttcaatccttgcctttttggtcattgttataatgccagctttaggacagaaagaattataagaaaaccagcataatacctgatatattaaaatgtagtgcctgtgaaatctgtattatattgctcttctgaagtaagatttttctacaccggtagccttcgctgtctgtcagtcaggaccttctggtataggtgatgtaaaataaccgtacaatattaatgcatgcgattccataatgcttagtgaactgtatgaatattactcaaagttatgttagtctttttttccgacttggttcttgtcagctaggtttaaaggtatttcactgagaacgcaaattctgtcttttcttgatttcggctgttttcagtattttggaggtatacatttacttaaattcagtattactcgtgttttgtttttgtttttgttttttgttttctttttcctaggggacaagcatgggtgtttgatttcagaaatcagtacctggcgagatttttgtctcaaaacgactatttgaatttcaagaactgtgctgcgaagacactctgagaacatttgcaagtcaggggcattttccttgacccttgactgatgctatgcggagactgatacattttcttaatggacaatgttcaagccaggtacccatgcttgatctgtcttcacaccagacctcctcatattaaaaggaaaaataagaaaaaaaatgtaagaaatcacatggctatttagtttcatgcacagttgcaatattttcttcaaaaataaaactctgtacaaactttgggcccgattcataagaaaaagaagtttgctattaacacgggatttttttaatatactttttttggtctaaatttgaaattacttgcttcccaaattaaataaatttcatctcatttttttccctaaaccagcacccatctgccttttattccccaaagagttacctttcccagattagggggatggtatgtggggagcagatagcggaaatgcttagaaagataagggggaccacccacagctggtcgtgagaacagggagacagtgtgtgggggtgggacctcatctgtgtgcctggtatcctgagttttacatgtagatgcattcgcctatttgattcagaaaaataaactttcccaaaatgtgtctgaaccacaagagcatacagtggaagtgctacctctaatctaaccagagcaccttcatggtggaagacacccaccaggtcatacaatgtgaacttttgtatctctgcagtggtttcaaggacaaatagtgtccaatgtattgggccatttttcctgctgtttttatactcaacttctcaaaatgaaaaaagcttttatttttcctttgacttatttgtgttgttcttattttttaaatttttattttttgataatagtctgtaagttagcctttttgggttttttttttttttttttggcttttttttttgtttgtttttttttcttttgacattgcaaccgaaggtcataaggccgctagctccgctgggacagaggcttgagagaactaacggctcggtgccttctccctggtctcagaccatcgtctctgcactgcgaaggcatttggtagcctcaccactgagatactaactagacctagactaggagctttatcaggttctaggaggtcctttaggaagactctcaaaggcaaatccctgatcccccgccccacccttagccctgccctctcaccagagcaaaattcactggggacttttcccaccacacatggaaatctgtccactcggaatacctctgttttccatttcaaattgtagggggaggggatggaacacttccagtgatggtaagagatctgttatgaaacgaaacaccccccgtgttaataacttggtctgaaatctgtttttatgagccgggccccctgtgcctctagtatacttgtattgactctcatagttacccttttagttttactgtgttctgtgaaaatttgtaattggttgagaatcactgtgggcgtccattcttattcaactaaatctccacaggttttttgagctggtgtggattagtttaactcttgtattcaaccattagtgctaccaccttctcacattacaatacaattactggaagcaagtactgcatttcctatgcaacaaaaaaggaaaaataaaaaattgctaatgct

SEQ ID NO: 210 - protein, 505 aa, Homo sapiens
MYSPLCLTQDEFHPFIEALLPHVRAFAYTWFNLQARKRKYFKKHEKRMSKEEERAVKDELLSEKPEVKQKWASRLLAKLRKDIRPEYREDFVLTVTGKKPPCCVLSNPDQKGKMRRIDCLRQADKVWRLDLVMVILFKGIPLESTDGERLVKSPQCSNPGLCVQPHHIGVSVKELDLYLAYFVHAADSSQSESPSQPSDADIKDQPENGHLGFQDSFVTSGVFSVTELVRVSQTPIAAGTGPNFSLSDLESSSYYSMSPGAMRRSLPSTSSTSSTKRLKSVEDEMDSPGEEPFYTGQGRSPGSGSQSSGWHEVEPGMPSPTTLKKSEKSGFSSPSPSQTSSLGTAFTQHHRPVITGPRDHATPSTLHFPTSPIIQQPGPYFSHPAIRYHPQETLKEFVQLVCPDAGQQAGQVGFLNPNGSSQGKVHNPFLPTPMLPPPPPPPMARPVPLPVPDTKPPTTSTEGGADTSPTYSTPSTSPANRFVSVGPRDPSFVNIPQQTQSWYLG

SEQ ID NO: 211 - DNA, 8468 bp, Homo sapiens
tttttggctgtatttttatgtttttcagattcaagtcaatctgaaagtcccagccagccaagtgacgctgacattaaggaccagccagaaaatggacatttgggcttccaggacagttttgtcacatcaggtgtttttagtgtcactgagctagtaagagtgtcacagacaccaatagctgcaggaactggcccaaatttttctctctcagatttggaaagttcttcatactacagcatgagtccaggagcaatgaggaggtctttacccagcacatcctctacgagctccacaaagcgcctcaagtctgtggaggatgaaatggacagtcctggtgaggagccattttatacaggccaagggcgctccccaggaagtggcagtcagtcaagtggatggcatgaagtggagccaggaatgccatctccaaccacactgaagaagtcggagaagtctggtttcagcagcccctccccttcacagacctcctccctgggaacggcgttcacacagcatcaccgacctgtcattacaggacccagagcaagtccgcatgcaacaccatcgactcttcatttcccgacatcacccattatccagcagcctgggccttacttctcacacccagccatccgctatcaccctcaggagacgctgaaagaatttgtccaacttgtctgccctgatgctggtcagcaggctggacaggtggggttcctcaatcccaatgggagcagccaaggcaaggtgcacaacccattccttcccaccccaatgttgccaccgccaccgccaccaccgatggccaggcctgtgcctctgccggtgccagacacaaagcctccaaccacgtcaacagaaggaggtgcagcctcccccacgtcaccaacctactcgacacccagcacctcccccgcaaaccgattcgtcagtgttggaccacgggatccaagctttgtaaatatccctcaacagacacagtcctggtacctgggataaaagttgcagcgtcccaccatccaccagacagaccacctgaccccttctcaactctgtaacatggacgcaacctcaacccagcgcagttacaacttcactatcagcggaaggggagaaaaaccgattcaaatcaacttgtacatggaaacagcaagcattatggtcaaacagcaaaggccataaccttttgggattttttttttttttaaaatactttagggactgttgtaatttctcatatggtgctggaaatggttgggctttgtaacatttgaagtgtttccatggtagcgtgagcattaggtgacgtggctagcggaggactacccttgctcactgacttcctgttgtaacacactttccttacggagcctggctgtttcacagtatttcatgaatttacccacacaggtgtgatcctccttgagcattgaggaggcacatggagaactaaatcttttgtagtagctgagatctgcaatatataacgggacagtcaaagggcaatgtttttctgtaacatattggaaaaagaaaatgcagttatattccttttttatttgttcctttagtttgttttggttcagcagtcagcagttaagtatataacatggcccgcaaggacaatgaatccactcacattgcagaacaattccgaaaatggcaaactactactactactgttcagttttttaaaagttttgaaatgctgcacttacatttaaaaaaacaacaacaacattttttcaacaatttcaacaatgacacaaaaattcacatggaaatggggaagatggtctgttttgacagaaactgacaggaatcaatcaaaacaatcgaattttgaattgagtaaagtgcaatttcattggatagctaaatatctttgtaagatagagattgttgaaaattctatttttgtttttctagtcctttcaccccaggactctaaattattggggtaaaaaacagccttgcaagaaaaaggggagctatttttgctttttatgttttttattgttaaacttgtatccctttaaaaactgaaggaaattaaaaaaaaaaaaacaaaaaaacaaatctaatggtgcttttaccacaatatgttaactacattaaatgctaattaattattttctgttatcaaagcacatgactaaaatgaaatcatggtatctgttaattttataagctagaagtcactataatggattacgccaattctaaaaaattttacacctatctggcatcataggatttatcagttatcagacacctcattgtaccagagattgtccagaagttttaaagacctttgcatccctgaactgggctatgggaaataataatagtaataataataataataataatgatgaaaccaatactgacacaaatgctggtgcccattcagatcaagggtacttgttagggaaaaaaaaaaaagtttgcacccccaaacgtcctgtatcttatgaaaaaaaaaacaaaaaacaaaaacaaaaaaaaaacacaaaaaaccacagaaacaaaaacaaaaaaaagtgcaagtgatttttctaccagacagcgaagcacccctttgcttcccatgcgacttcaagaaggtttcctatactatacatatatatacgttctggttggcaagccctgctgatcagagaaagtctctgcatgttctagtgttagtaactaatttttatatagttaatgtaggataaagtagagtgcattaagacacaatattgtaatccctactctaggcacttgcctttaaactatgtttttcagcccttcagaagggttctactactgtcctatacaatcaagtaactgaaattcttgggaagacactttgctcctcatctttctccccgaaacaatgttgttttgttttgttttttttccttaatttgcacgaaaacaaaaattccatatcaatgtgccttgccctggatagcgattatttgtggaattgttgcacatgctcctctattgaaaggggtttttccctagtcaagcatttggagacactttttgtaaatgtgacttttatgtcagccatcgtcagtttcaacatctagaactaaatagaaagctagttgttccgcagataggagtagtctttattgtcctgtacggtcggtggcagtgctattctgagatctgtagatgcttagaatatcagtattttggatgttgctgcattttacaatttatttggagtcttcctttattttcccccagatatatgaaaatatgcaatacctgcttatatcatgtagaaaagcttagcaattattaatttttcttttatttttttttatttgaccaaagtcggtgctgcacttgacgcagtgtgttttaggtgtttgtctttgtacttttttgtgatttttgaatgcacgtgcgcaggaagggctcctcttagagaagcagtcaaactgtgaagcactaagctgaccctgcttcaagcaattttgtttttacaactgttcctttcacaagcaagccttaaaaaaaaaaaagacaacttcctttttcttcagctcccacaccccatttttcttagcagactgcagtcaatccacattcaataaaaagtatataatgcccatttttatatgcacgtttttaaacttccaagttctgaaaattgtttactggttatctctatttaaggaaaaaaaaataaaataaaacattttggattttcatatgtgtctgataagtggttgaatagtcgtttggcgctgttgtatggtgtgattgtcagtgtatggtgtcacttcctatagccagccagcatactttgccttcccctatagcacttagctgggcattactttattatgacatatgtgcactaaaaaatgaaaaaaaggaaaaaaagaaaaaaaaaaagaaaaaatagcagctttcagtgcttcacagtgaagggaaaaaagcctagacaaacattttgtcagaaccttgcaataagccaaggtattaccagtaaattggttgtatatacaataaaattgcacccttttttaaacaaaacaaactaagcaatagtttgggcagttttagttgtttttagtgagcatgttgtagtcatgactgcaaagagagagaataaactgcccgctcagaagatatgtaatttgtattgttgtatagttttattgattacactgatttattctaccctattttataatgcaggacttttgtaatgttgtttaaatgaggaaaaatttctgtcaaattagcctagtaaaatttctgatcgttcattataaaggcagcgttcatagaattgcttttctttctttttaccccccctttgggaactggatttaagtttaaaactttcctgtttcctttttttttttttttttgtaagtatttaaatacaattatttttttctctcaatggtatagcatattcctatgcttgagaagtataggtctactgaaaaaccattgtaaatggacgttacaggtatgctgtatttttgaaggtattttgttgtattaagtttgatgaagctaaaattagggaactctgaacagatttgcaggaaaaaatgttttaaaggctttaaaacattagggaggcagtctagggtgataacgaacaggggttaagtattaaatacacgaagttacatttttgttcatgtttcattgtccagaaagcagcaggaaactattcagttgtgatcaagcaggaaaaaagaaacaccaacagttgccagtgtttttgctttttagcttaaaagcatagtgaagatgcttgaggaagactttgctacctggggtgtgtagacagacagactgagagctatcagcatttgaaggcccagcccttgactctgagacacatttgaattttttctttcccatcaaatggcattaacaagattgggcaaagatgagtccctcaaatttctgtgttttttgtttgtttgtttgtttgttttttctttgggaactgaagtcagaggcacgaacactaactcttagcatttttctgtagactttttcttctggcccttgtccctgccagcaaaacgccccttttctgatcattcgtgcgcagagggcctcccagtaatgccacgctctccatgctagagagccttctctttcctctgaggtttgaactgatgttctgtgtcttcacaccctggcatgacagttacgtgtggtcagcccgctccccaggcccgtccctgccgccgccaggtgtgggctctaggcaggccgacaaggttacacctcccagagcttgtgatcttcattttctgacagtcaaagtgtgaaggaacccagacttccccgagccacggtgttcagtcagcccacaggaatatgcaagacccatctccaaaagtttgtctttgattttttccaagcccttagccccataagctttgaatcctgtagttacagtggcataaaggactgacaaaacctggataaggaaaaaccttttttttctatgaattttttttgttttttaggggaaagggattctaagaatgtcatttaatgtactttgcatcatgtctctagaaatatctttgtccatagtggtggtggagtctctctctctctctctctttttgtttgcttctgttttctttcttgtcttcattctttcttttcttttttatttctggtagcaggcctccatagaacaaatctaaaacacaaccaccatagtaatgtaaggagagcttcagtggcacctcaaaacccacccttcgagatctgtccaaagacagtctcagaaagctgcactgcccaccggctcagctttcattcaaaaaggcttccaaggccaattctgtcttgaagtcaatgcatgtatttactgtttgacagtaaacccgctctgccttctccacgtccaaggctgtgcattcgtctaattagcgtcgtgtatgttttccttttattttttccaataaaaaagcagtgggatgaaaattgctttgatatatagcaggtaacattgaagctattccatagcacttaactgtagtgaatactgtgtcaccaattttgaaatcaatttaatgtttaatgcaaatccattacatggtgctattataggctgacaaaatgatttacacaaatgtgacaacttgggctcaattcactctgctttccaacagtgtaaatgcatagcagtgtttatctgcatgagaactatgcactaatctatctgaagaaaaaaactatatcaactttggtatctactttccgtttacttcaatccttgcctttttggtcattgttataatgccagctttaggacagaaagaattataagaaaaccagcataatacctgatatattaaaatgtagtgcctgtgaaatctgtattatattgctcttctgaagtaagatttttctacaccggtagccttcgctgtctgtcagtcaggaccttctggtataggtgatgtaaaataaccgtacaatattaatgcatgcgattccataatgcttagtgaactgtatgaatattactcaaagttatgttagtctttttttccgacttggttcttgtcagctaggtttaaaggtatttcactgagaacgcaaattctgtcttttcttgatttcggctgttttcagtattttggaggtatacatttacttaaattcagtattactcgtgttttgtttttgtttttgttttttgttttctttttcctaggggacaagcatgggtgtttgatttcagaaatcagtacctggcgagatttttgtctcaaaacgactatttgaatttcaagaactgtgctgcgaagacactctgagaacatttgcaagtcaggggcattttccttgacccttgactgatgctatgcggagactgatacattttcttaatggacaatgttcaagccaggtacccatgcttgatctgtcttcacaccagacctcctcatattaaaaggaaaaataagaaaaaaaatgtaagaaatcacatggctatttagtttcatgcacagttgcaatattttcttcaaaaataaaactctgtacaaactttgggcccgattcataagaaaaagaagtttgctattaacacgggatttttttaatatactttttttggtctaaatttgaaattacttgcttcccaaattaaataaatttcatctcatttttttccctaaaccagcacccatctgccttttattccccaaagagttacctttcccagattagggggatggtatgtggggagcagatagcggaaatgcttagaaagataagggggaccacccacagctggtcgtgagaacagggagacagtgtgtgggggtgggacctcatctgtgtgcctggtatcctgagttttacatgtagatgcattcgcctatttgattcagaaaaataaactttcccaaaatgtgtctgaaccacaagagcatacagtggaagtgctacctctaatctaaccagagcaccttcatggtggaagacacccaccaggtcatacaatgtgaacttttgtatctctgcagtggtttcaaggacaaatagtgtccaatgtattgggccatttttcctgctgtttttatactcaacttctcaaaatgaaaaaagcttttatttttcctttgacttatttgtgttgttcttattttttaaatttttattttttgataatagtctgtaagttagcctttttgggttttttttttttttttttggcttttttttttgtttgtttttttttcttttgacattgcaaccgaaggtcataaggccgctagctccgctgggacagaggcttgagagaactaacggctcggtgccttctccctggtctcagaccatcgtctctgcactgcgaaggcatttggtagcctcaccactgagatactaactagacctagactaggagctttatcaggttctaggaggtcctttaggaagactctcaaaggcaaatccctgatcccccgccccacccttagccctgccctctcaccagagcaaaattcactggggacttttcccaccacacatggaaatctgtccactcggaatacctctgttttccatttcaaattgtagggggaggggatggaacacttccagtgatggtaagagatctgttatgaaacgaaacaccccccgtgttaataacttggtctgaaatctgtttttatgagccgggccccctgtgcctctagtatacttgtattgactctcatagttacccttttagttttactgtgttctgtgaaaatttgtaattggttgagaatcactgtgggcgtccattcttattcaactaaatctccacaggttttttgagctggtgtggattagtttaactcttgtattcaaccattagtgctaccaccttctcacattacaatacaattactggaagcaagtactgcatttcctatgcaacaaaaaaggaaaaataaaaaattgctaatgct

SEQ ID NO: 212 - protein, 249 aa, Homo sapiens
MSPGAMRRSLPSTSSTSSTKRLKSVEDEMDSPGEEPFYTGQGRSPGSGSQSSGWHEVEPGMPSPTTLKKSEKSGFSSPSPSQTSSLGTAFTQHHRPVITGPRDHATPSTLHFPTSPIIQQPGPYFSHPAIRYHPQETLKEFVQLVCPDAGQQAGQVGFLNPNGSSQGKVHNPFLPTPMLPPPPPPPMARPVPLPVPDTKPPTTSTEGGADTSPTYSTPSTSPANRFVSVGPRDPSFVNIPQQTQSWYLG

SEQ ID NO: 213 - DNA, 19299 bp, Mus musculus
ccgggcggcgctgacagctccaagccgaggatcctgcttatggggctccggcgcagcggcaaatcctccatccagaaggtgagcgccccgcagccgccgcctgcccttggttttgcccggcccacggcgctcaggtggcgggtgcccaggaggcctgagagggtggaggcctggcgctgcgtccccgggcactgtccacacctgcgagcgcagagcctgggcgcggttcgcccagggtccccgacctgggcctccgagggtcgaggggggccaggaggcgacgctggctggagggaggaggcaggtgccggtcaccgccctagaactcctcccttctggtcgctgcccttgtggcgttgacgaaaccgacccgtcgtccccggttctcacgcggagaacttggtgagcgtgctgtcccgccgcatctcacttaggtgacaggagttttcagggatctcctcccagcctctggaccgtagcggcgcctgaaagtgttgtggcgaagacactgggcatctcagtgtttgttgtcagtctgttggagacttctgtaaaaacattttttggggggggggcgggggggggactctatcgctacacctactttatttagaacttgtagccctgtggttgcagttacaggtgacagtccccagtagctggtcacagcgatctttggagacggttttgcaggcggacagacatcagtgcatttgttttcacttgggtccgtcgtgaacgaatagaatgaatgcctaaggctttgtatttttagggaaatagaggcagggttgatttctttcaatcagccattcccattacaaacagagcgaacttctggtaaaactacggtcacagacaaccatgctttccccatttccactctgacacaaaggtctgtccaaacagaaatctctggtattttgtaggggtggtgtttttaaaaagcaacatcgctgcctacccccacatcttccgcccctgcacttgctggacaactgttttattttctcacgtctgtgtcaaagttagacctttggggggagtgcttatgctaagtaactaccacttgaaacctatgagaactttttctctcttccaagttaacactgagagacaaatttgctgtatgttagggttgtatcaggcaagccttaaagctacatctccagccctgctgtggtttttttgttttcttcctgtatagcaggctggccaagaactgactatgtagccaagggtgactttaagctcatcctgagctttcaggtacgagctatcaggttggcttggcttggtgcaggtgctggaagccagggtattatgcatgataggcaggctctgggaccacactgagctacacctttggctccctgctgtgatgattggcagcttattgtttttaccatttcctgccttatggagctgcctcttccctcctcccccaggtctccctacttctcactctggacagttttacctactcaggatcccctccattgtctttattgttcctaagagcctgaggtaggcgtgtgtgttatttttgaatgaacacaaagtctcaaacattacctagaatagttcatgatcttaaagcgggtcttgacaagtttaaatctctgatcacagttgtaatattggtaccacaggatttctatgtaactttggcagttaaatagtcacaacgttgtctctgtttctcttaataaaacccaataggacctggcaaggtggtactgtaatttcagtactggaggaggcagaggcaagagaattggattttgaggttaatctgggctatatagctgaggctctttctcaaaacagccctcctctgctcccctccaaaaagttacaaaccctgagaatagaaaaagcaaatacacggaaaccgtatgggtcagagatggtggcacgagaacacagttaaagtagtaagagaaaaactcatcttcaaagtggactgagtggaaattaacttggtgccttttgtcagaaatagaagaataaatagcaccagtgattgactgtcctattattaccttatttatttattttgcatcaaggtcacagttgtaaggttggtgccatgggatttctaatatgacttgtatagttaaatagttacaaagttgtctctgtttctcctcacaggtggtgtttcataagatgtcacccaatgagactctctttttggaaagtaccaacaagatttataaagatgacatttccaacagctcctttgtgaacttccagatttgggattttcctgggcagatggacttctttgatccaacctttgactacgaaatgatcttcaggggcacaggagcattgatatatgtcattgatgcacaggtagttaggcatgatggtgtgtgcacctctctggtggcaaaaaggcagagaaaaggaggaaagctgtttgtctcctttgtcatgtgcttgaagctactctctttccagtagatccccttatactgcctgcacctgactccagactctcaggtgtttaggagctgccatttacataatgaaccgttaccattggctttctacttttattggttaatagtagatactgctgtacttcattaactattacagtggtcacctcacccactgaagtatccatcgatggccacaccgtcagggagaacatgagaaatgagtccattataatggactttcctgacctgttaaagtggaatttcttctgggaagatacactgaggtccctctgtgtggtaggtagttagctggatgggctctgtccctaccctttagctacctttgtaagctgaagcacaaggaaagcttctgaatggtggcagcttggtagtgtgtgctttcttttacacgatttgatttactctctctccagagtattgtgtgggtagttattgccatttacagatatttgactcaagattaggctttaagcaacttgcttagagccattcacctgataaatggcagagctgggattactttgacagttctattaggaaggaatgtgcattttgtctttcttttcttaagagtaacatttaaaattcaggcattggtatttgattttctatgttaagaaactggagagctatttactagttatatgtcagtatatctgaatatttatgagtaattaaaataactattttctctggttggggaaagagatgatttgaggctttcttgacttgttacttgtgttttataagacttcttgttaaaaacatcttgttctgacttccaggacgactacatggaggctttaacccgacttcacatcactgtttctaaggcctacaaagttaacccagacatgaattttgaggtttttattcacaaagttgatggactgtctgatgatcacaaaatagaaacacagagggacattcatcaaagggccaatgatgaccttgcagatgctgggctagaaaagctccatcttaggtaacagtatgagtgtttgatatgagagccctaaatgtattgcatctgtcctcacacccagatccctggtgcgtccccggttctctaatagcttggagctcttctctgttgccttctaggctgttttgtaagcctggtgctactgagaagttgcttttcccctttctccttttcctgatggttggagtcatgtgaagtgtttccattggcgttcttgcacactcctctcaagggactgtttcctcatggcatgagtctgctttcggacttctcctctctgggtttcttcactttttaattcccattggctttgtgtaagaaatctgccttttttttttttttttttttttttttgtgaaagttgagtttgggtcttaaaagtgtatactttcaagtctggactaactctaatctatcttaacttttaaaagcagtttatacttcttagaaactctgaagttagcatatttgctttctgcatttacatagtattgctgttgagtttgaaggactgctggtttacagttaaatattaacttaccttaaagaacacatactaatttggattcatagttacgtattttgtgtatttgtattctaaaagtgtatgaggaatgttattgtatatcttgtgataataggaagaaatgaatataagtactaagaggatgtcacttgatcataaaaacagctcaaaggggaagcagagaagagacgtgcatgtaatttccttgcttttggtctgtttcaaaaacttccttctatacttaagtcagttgtcctgtccctaaggtttcctgggccatacactgtaaaatctttcaggtaatttttagaaaatattgtatgggaaatttcattgaccctcttggattaaatttttaaaacacgaaaaattcatgtttttaaaaaaattgaggaagttgagtctttgtaagagttgtacatggtgttgtactttaataatcctagcactcagaaggcagagtcaggaggatagttagaaatttgaagtcagctaaccaaggctacttagtaagatcctgtcttgaataacaaaagtaaataaatgtttataagagaaagaaaaagtaccatcccgtaaaatccctcaatcttaagaatctgttcttttttattttgctgcaatttttaaacatgcttccttgtgctagggaggaatcattatgattttctatattccctgtttgttgagcacttcaggacatttcatggttttcctgtaacagaaaggccccaaactaagcctgttaccctcagtagagttttactatgtgcactggggattgaacccaggaccttttatattctctgcaagcattctgcccttgcgctacgcccagcacatcccaaacctctctttagtaccagcatgatggggtgcagtttgcttttgcacttctaggagctcagcttaggaagatgctctgtgccttgggggttctgtctgtccccacccaactccagtcctgaggaccctaaccttgctgaagtttttgcctagaggaaacactgaaatgtccctcccttgctggtgtcaggaacctgacaccctcacctctggagcagagctcctccgtgattaggttcttaactcacttccttggagttttctttaaatcacctgtaaagtataaacaagcttctcatttctgataatttgtacataaagtatatcatggatacagctaaatgatgaaacaaagtcctcaatgcaaaaagcaggtagaattgtccacagtacttaaggggcccttctctaaaatttgtgtttggttaactctgcatttgatttcactgtaatccatttaggtcttcatcctcaggctgattgcctaattctaagcacctgcatagtcatttactcagaggaggtcaggtgtttaggtgttgtggctgtgactatatttttcactcagtaaactctgatgaacacagttgagggcagtgggcttgcagctgtgagggagctgacaaagctgctttcctcctggggcttacgattgagaaggacacagctcataagaaatgcttggtggattttaagtccttaccaaatgctgtgaagaacaaaatggcaaaagggtagcaagtaaatgtatactgcttacataagctggtcaggaaagaacagggtctcacgatatagccctggagctctgctctgtagaccaggctggcctcaaactcacagaattcacctgcctcttcccaggtgccggaattacatgtttacaccactgtggctggcaggaaaggactttttgaggtgacattttagtagaaatgtgaataatatttaataaatagcacgttactctgctgagtgtggtgacaaaatcctgtaatcgtagcttccctcagggaagtggaaacttggggattaggaattcagggtcattctccactacatagtgagtttgaggccaggctgggctccataccattaaaacaaaacaaaaaccccacaaatgaccatgtctctactttgaattttgatcttggcttttttccctcagttttgtgggcttgggaagtaagctttaaagggtagtttgcttatgttaccctttgcatttctctcttgaagagcattcctgggcgctgcctcagttaccctctgtgtaatacagcaaacgcacacccggactgggaaatggttttccagtcagaaatgatgtagggagtggacagggtacatttgaatgttaagaaccttgagatgtaagagatgatgacagtagttactggacttttacgaataaccatcctgtgttgtatttttcagcttttatttgactagcatctatgaccattcaatatttgaagccttcagtaaggtggtacagaaactcattccacaactgcccactttggaaaacctattaaatatctttatatcagtaagtaaattatttactttgatttaatttccaattctgctgttgttaaatgtgtttgtatttaattctccaaaaaagaagacttgaactaaagatcagtgattcaacatgaaagataaatagcatagagtatagcttgagtggttatattctgattgtgcgtgtatgtgtgtgttaggtaaagtttcccatacttccttaattaaagcatcttcatgaaggttggatggaagtactgcttagcatatgaaaggccttaggaacagtttttagcacaatacacacaagtaaataataatcttgctgggttttgtggagcacacatttaagcccatcacttaagaagaagaggcagaagaatcgtgagttttacagcatcctcctcctaagactacctagtaagaccccatctaaagtctcccaaccaagcagtttttatttggggggtctaattgcatgcttaaacatgatatgaagagttgggggttcagttcagtggtagaagaattattgaaccctacattcagtatcccagaaccataaaaaattaaaaacaaaccatgagaaaattacttttaaaattaagattgttttttagtaatttaaggtctttgaaaagttgtaaattgtgattcttaaaagaaacacttacccaattttgtttttcccaagaattcaggtattgaaaaagcttttctctttgatgttgtcagcaaaatctacattgcaacagacagctcccctgtggatatgcagtcttatgaactttgctgtgacatgattgatgttgtaattgatgtgtcttgtatatatgggtaagtgcttacacatttctgcaagattccaggcaggtggaaaacttacctaattcttacctctggcttatactgaatgaaataaggaacttttcttagttttgaaattacatttatgtacttgctgtgtatatgagtacagtgtgtgggtgtgcgtgccatgtcacctgtgtggtcagaggacagcttttgggagtcaattctttcactgtgtgggtctgggccattactcaggtcaggcttggtgttaagtgcccttacctactgagccatgttactagcctgaagtgggactgtttagagcatgtgtgtcaccttagaacgaggtctctgagctggaccttcagacaggatagcagagaacacttggaaagtctctctttttgtacttgagtttgtattatcttctgtctcatgggatttggcaaggttcaaacaacctaactctattaatttgtttaaaattgatctggggaccaggtgtggaggcaaagacagatagatttctgagtttgaggccagcctagtctacatagttccaggctatccaggctacaaaatgagaccatgtctcaaaccgtctccaaaatggtctgaacagccaggtgaggttgctcatctatagaatttcagcacatagtaagagggtcagaagtcgtgccctgtctaaccaaacaacaataagtaaaacactaaaaatgtccgagtaaatgctactgcctaaaactcaggtttcatggaatgagggaatttcttggggtggaggtgggggttattatgtagccttggccggctctctatgaagaccaggctggccttgactaatagagctcctcctacctccgccttctgagtgctgggactaaaggtgtgggccccatacctggtagaaagaggggttcttgttgttgttgttgttgttgctttttcaaaaaaaaattgtagtgacttatttttattttatgttctttggtattttctctgcatgaatgtctgtgtgagggcgttataacccttgaccaggcaagtatgagctgccatgtgggtcctaggaatcgaacccaccttctctgtgctcttaaccattgagccatctcatcagtccgaacgagggattcttaatcagtgtatttaaaaaataaacaatcagtatttttaattgggatatgaaggataatcctagcctttgggagatagaagtagtcagagttccaggacagtcaggtttacatcataaatgagaccctgtctcaaacaatcagaattttagttattagaaagattacaggacatcttagtgaggctgcagtggtccacactactctctgagctttgccgtgctgctcaaggacaacaagaagatgccagaaagtcggctaaaaaagtcagacccaataaatacatctggtggcaaggccaaaaagaagtggtccaaaggcaaagtttgggacaagctgaacaatctcatcctgtttgacaaagctacatatgacaagctctgtaaggaagtttccaactacaagcttattactctagccgtggtctctgcgagactgaagattcgaggttcttgcccatggcagccctttgagagctccttagtaaaagactgttcaagctggtttcaaagcacagagccactcacaccagaaacacaaagggtggagatgcccagctgctggtgaagatgtgtgaacaggttcaatcagctgtgcatttgggcaaataaaactttattgaattaaaaaaataaaagattacacataaaatatttgacgaatacatctgagtttccgcaataagtctctcaaatatagatttactacatgaacattccttaaactatgtagaaatttataaaataccaaaacccaaaagattttgtagcctagaccagaggaagaatgaaaacattctagcaaatagcctcttgcctagccctcagccttccgtgtgtcaagaccagaatacccagggtgctgttagcctgtattctttctaatgcacctccccttctctgtctgtctgtctgtctgtgtgcctgctttgtcagtgccctccttctgctccctgtgagtagagtaccttaccttgtcttgtctgtttctgtttactctcgctgattacccgctgtcctttgttgtactaccttctgtaaggaaaataagatggcctgttgttcctcaggaaacgtttgtattttctattcttaaaagttgaccagtagaacacattcttttaaaaaaaggaaaagctaatcaaaagtttttaagctagtttcacatttttaaacgcttattttgtctatcccccatggtgctcatgtgaagatcagacagtgttcaggagtatgttctcgccttctgccttgttgagacagtctcacttgtttcttgtgttctctggactccaggctcactggcccagttatgctgagcccctttagggcgtgttgcttcctgcttttgcttggatgtattttgactaaaactcagataaacatacttgctttggaagtttttttcagttttttggttttttttttgtttttgagagaggttttcaagtagcacaggctagcctcaaagttgatatatgtagtagaggataaccttgaatttctgatcctcctaagcactaggattactggtatctgttaccacagtggttttatatggtcctggggatggaagccagctacatccccaattcagcaccttaaaatcttgcatagagagttttgacccaaaacaaaacaaaaaacctaagtctactttttaaagtcattagtatattttctttctttattaaccattaaatctgtcttattgccatgcatgaatagctaactagatgtctcttgttctttctgtcccttgcagtcttgcatttgctaaaagcaagtgtttacatagccgtgtccccaaccaagaatgtgctttaacattttttaaattgaaaatatgtgtgtgtgtgtgtgtgtgtgtgtgtgtgtgtgtgtgtgtgcgcgcgcacgcgtgcgtgcaggggctgtgcataccatggtatacatacggaggccaaagcacaagttcttttcacttcttgctttcacttttatgcaggttctggggattgaactcaggtcatcaagcttgcatgatgtaatgttctcatgttagtgtatgacttgagatcctgtagctcaacactagaaactgcagctgtttacagctgctggctgtgggtccagccatagaggttcatgttgctgtgttgcttgtcagctggtgccttctctcacttcctgtgtggtacagaataggatctccttgacctctggctatcagctgacagacagcacagagcacttgcatttcctcttcttccatcaggaggaagctgctttctttatactcttaaagcacatggttcactcttcccaactgctgtgatattggaaactgcttggaactgaattaaaaccctaagtttgagtccatatcttgccaggtatccttttactttttataacctggagtcttaggactttaacgttggtgtaattctcttatttgtatttagattactctgttctgctcccttgccttcactcttaactcccaaagttaagtgcttaaacaggttaatagtaacgattctgggttgttgtgggatcaaattaatatatgaaaaggtaacctgtaaaatttagagcaatttaaacaataatctgtctgtcatgaaaataatgcaggaggtagtaaagacaggacaggaggaaacattgtttcccaccagatacctgttgtagcctttccttttcagtatggttgcctttactttttaaacagtttttttgaaatacttttttctctatctatgaaaggccaggctgtccattctcatccctcaaactcttgagtgcctgtgtctttcaccctcatttgaaaggcagatacttcttgaagatttattttgtgtattatgagtatgtgtctgtgtctgcatgagtttttatgttcgttgtggtatgtaagccctcggaggccagagagcatagcagattgctgaaactggggttacagggctctgagctgccttgatgtgtgtgtgtgctgggaaccaagcgtgagtcctctagaggagcagtaagtgcttgttagccagtgggccatcttctcagcccccgaacacctctactaaagaggcagttttggcaactcttaatgcctagcaggtgcaggcatatacatgctatggtaccacatgcggaagttagagaacagcttattaggagtcatttctgtttccacttgtggatcaatcaaactctagttgttagacttggcagcaaactccttgaccttgtcatcactcaaactctttaaaaagttgttgatttttaacataattcctccctctctctggctggggttgatctttgatagacttatgtattttcttgattccatttctttgtttgtttgtttaatttgtaaggaaacaacaaaaggtgtctgagaaaatgcgtaattggtttggcatgtagaatataccctgtagtagctggctgaggctgtggcaggtcctcgggggtcatgtacctggagggaagtggggagagtaggccctcagagcacagtctgggcaggtgagtggcctggccagcagggcattcattgcagtgtcagtggttcagagctacagttagagactgttagctatgtctctaagtggtggatttcagtagtgatgagagacatgcagtgccttgctgttaacaaaagctcctagattgtgttctttgtgactcttaccctaaatgatgactgtcccaatatatttcaggcagtactattccctctcaaaagaggtttggggaccagggtggaaagatttgctcctgtacaaaatgcctatttgggaaacttgtaataaatggtgctttcttttaaaatagattaaaggaagatggaagtggaagtgcttatgacaaagaatcgatggccattatcaagctgaataatacaactgtcctttatttaaaggaagtcactaaatttttggcactggtttgcattcttagggaagagagctttgaacgaaaaggtaatgaagtgggtttttttttgtttgttttttgttttttttaaagctgcttgtatttataattaattgtttcgattttattcctcttttgtgtgtgcatgcgttcaggtatgtatgcacatgtgcgactgagtctatgtctatgtaccacatgaatgcagtgccagtggaggccagcagaaggcactgggtctcctggaactggagttacagggcattgtgagtcatcattaaaaagaaaaaaaaaataaaaaagctaggcagtggtggctcgtgcttttaattccagcaggtaggaggcagaggcaggtggatctctaagttcaaggccagcctggttgtagagaacagccagggctacaaagagaaatgctgattggaaaacaaaaacaacaaaaaaggacttatttattttatatgtatgtacgtgagtgtatttacaccacatgggtgcaggagcctgagatggtcagaagaagagggtgttggatccctggaacacgagaactacaggtgctcgtgagctacccaccactgggtgctgggaaccaaacctgggtcttctgcaagaagagcaaacacccttaattgttgaaccgtttctctagccttcaaagagatagttttctctctctctccctctttctctctctcctcctcctccccctcctcctccttctcccccccctctctaatttttattattttatgtgtatgagtttgtttgcttgcatgtatgtccgtgtactatttatatgtaggtcccatagagaccagaagaaggtgtgagatgccctggatctggagttgtagactgttgtgagccaccatgtgtgggctaggaatcaaatcatggtcttctggaagagaagccagagctcttagccaccgagccatctctctagcctaaagagctgttcttttgttgttgtggtggcttaggttattgagacagggtctctattatgtagctctggctgttctggtacttgttatatagatcagaccagccttgaactcacagagacccatctgcctctttaatggtggggttaaggctgtggatcaccacacctagctaaatgctcttacgttacattttttttgttatgattttgcagattcttgaaaactctactaatggctatcttagaagtgaacgtaaatacatctgtgcctcctgtctttgtaaattagacattttattgtttgtttgtgttttgggtttttttgttttttttttttgtttgtttgttttatttttggaagcagggtttctctgtatagcccttgttgtcctggaactcactctgtagaccaagctggtctcgaactcagaaatccgcctgcctctgcctcccgagtgctgggattaaaggcatgcgccaccacgcccggctttttatctttccttttaatctcatactttaattcactttttttttaatcctacccctcttcctccatatacttttgttggctcttctttcatagagtttgttttctatttgaaccagtctgcagctctctctctccttgggcgtgtccagtggtctttagttttctggagcccgtgactgtcagtcctaccttgatcacagctttcttctttgggtcaccttgaatatttttctgtctcctatctccttctggctagttttctttttccgaatcccatgttctttagagtcaaaactttctgcttgcttcttgcttgtagtgtcagctcccccagttcatggcttggaaggttctcttctgctgtgggttccgggaattgacctgaggttgttcggcttacatggcaagtgcttttgctcattaagctggctctctctagtccttgttcatggcttgggttaatcagtttgtgactgaaagtttacacctacaactctttttagagctcatgttctagtaccatatttggagctcttagtgagacatcctcatttcagtatttgctggtgttctggccattgtgggcaagtattaccccaccccccagctaagtaaaaatcttttccactcagactcttgcctaccctgcttctgttacaagttatgctgtttttttcatgtttaaaccttgatgtcttatggtaattgattttttttaaagatatctttgtgtattggttcatagatgggatttcattttctccccttttcattcttctgtgttgctcacattgaatttttatcaactcttattatttgctccctgaaactattccttgtggctcctttccatttctgcctttaatgactcccctaagtccatattcctgcagacctgcagtactacaatagcctgcagcagaatactaggactgatgcatagatctctactgtgtgccatgctttggcatacacagcagtcaacaagaggccctgtctcaaggtagcagttgaggcaggagagaacacacactccaagctgtccttggtcacacagatgatgtggtgagtatatacctgcactcagcgagcacattcacatactcacgtgcacacagactaaaaaaatcccatttttctgcctgcgcttcaaaagaattacttcacttacacataatttctcatacaaaacaaaatatgtatatttatttttgaccttaagaaccagtgtggagtctggagaggtagatcagtggttaagatcacttcctgttcttcctgaggactgtggcagtcatgtggggtggctcacaaccccctgtaactttagctccagcatctgataccccctgtcctctataggcactacactcaggtgtacaaacccacatacacaagtgcatgcagttaacaaaagagctggtatgacatacaactgcagacttgtgtgcagttccagggcaggatcctggaagcaggagccaatgcagaggccatagagaggtgctgtttacatgcttgtcctccatggcttgttcacctgctttctcttggtttacatcccttttttggttttgtgtattttattttttcctgtgcattttatttttacccttttgcttcatacctacccataaataacgttgtacaaatgatactgaattgaagttagtttttgtgacatgtgtttttcttcttgttcagggttatttttgagatttttcccactgctgtgtatgggttatatattgaactttgtttttgttgctggacattcagatatttttaaaggtataattttgtgacaaatacccatgaataagctgtgtataaaggctcatatctttagtgtcagtacttgaaaggcagaggcagggttgttgtacgtacatttgaggccatctagatgttttagtgtctctgttactgtgaccaaacaccattgatcatgagcaactttgggaggaaatagtttcagcttacagtgccagttatagcccatcactgagggacataaggagagggactcaaacagggcaggatcctggaagcaggagccaatgcagaggccatagagaggtgctgtttacatgcttgtcctccatggcttgttcacctgctttcttacaccacctacttgctcagggttggcaccacccacagaggctgggccctccctatatcaatcatcaatgaagaaaactctatacatgtgcctactggccaatcctatggtggcattttcttgattccttctttctagataacctactttgtgtcaggttgacatgaaactagccagcacactaggactgtaaagcaagatgccatttcaaaacaagacaaaatgggctggagctgtgggtccattattggactgcctgtgtagcatgcaggaggctctgggttcacagtccccagcatcatgtaaactgggtatggtggtgcacacctataaccccagcacttgggaggtggaggcaggatcaggagtttaaggtcatccttgactacctaatgagtttgagaccagcctgggatgcaggagagactgcctcaaaaataaacaaacaacagtaacgtcagcaattcccaaatcaaagccattgcctgtaaatgtctcctctgtctctagggtgagtatgtgagaatgggatgtacatgcattaacacaggactcttccaggtggctctacagacttcacctcatagcactgtgagagtgttctcatcatgtctccttgagaatgcttgatactgttggactctcatattctcagtctgttgctgtgtaatggtatctcatttttacatatttaattgctaattaggacagatatttttatagcagagcacttattcattgacttcaggtttctttggtaacttgtttttgtttttataatttcagtacatttactttgtgtgtatgtgtgcacatgtacaaagtgcaaggatttattgaagtctagccggtgtacctaaagttcagcctcatctatgaagtttccattgccagctttgccctgcctacatttagctctcccttctgtggacttctttcgcatttgtacttagttggcaggttattttgatttgttgtgttttggctttctgccccagctagcatatgcttgaaaatgtggacctgatgctgctgcttttgacacattgtatccgtgctcatgctgttaataagtgttcaatgacttatctagtctgctgtaagttactgaaaggtcacatgatgattaggtaggccatacagtgcttttggtgtttgatgtggacgagtgcaggtggggtggtcttgctttgccagtgggtatatatataggtgacggctcttctgatggaagagcttactatccagtttggggcatttcaaattaagccaagtgcctgtatctggcccaggggaggctaggaaatggaatttttttccattttttattaggtatttagctcatttacatttccaatgctatccaggaagtcccccgtacccacccacccccactcccctacccacccactccccctttttggccctggcgttcccctgtactggggcatataaagtttgcaagtccaatgggcctctctttgcagtgatggcctactaggccatcttttgatacatatgcagctagagacaaggaaatggaatttttaaagctcagtctcagttgcttgttcagaattggggttccacatataaaggtgaagggggaaaatggcaacccactctttctgtcataagagaaacctttgatcacccaaagtctcaagtggatgttcagtccctaaaacagatagagagtaactctcctctctcaaagttgggtggaggatgctggagccctgctgagcttatataccaatgctgcctgcctgcttcctgcatacttcattagctgctctacagggccattggtggaaagaatgctaccctgacttgaggatttaacacattcatcttcccacttgatttgttagattaccagttctcactgttcacgtctgtcctagaggtaacagtgttagctgctggattcttggctttacagtgattgattgcagtgtgaagagtttcggagagaggggagcttcacagttggcatttaaatagacaggctctttctctctcttgtagggttgatagactacaacttccactgtttccgaaaagctatccatgaggtgtttgaggtgggtgtgacttctcacagaagctgcagtcatcagaccagtgctccaagtctgaaagccttggcacataacggcacgcctcggaatgccatctagtctgagtctcagcagcggaggctcagtgctggcttagtcctccctccagggtcagatgccatgcactgcaggacatgagcgctgctgcctatggagtctggagacgatgacgacggtggagtttctctgctgacgagagcccctcagccggctgtgtgcaactgaagctactctctaagtacatcgcaaaagaattgcagagacctcagaactcagtgtgtcttttcttctctcttgagccctactttaaatagctgggatattttggacctggagatgataaccagttagccatctttaccagtgaatgttgctgtcagtcccagcctaaaacagtaggaaactgagttttatatgcttccctaggccttcacttgagtagtgtcgaaagacttgctttgcttacgttctaacactgcctttcagagttcagatctcactgtacctctaagaccttggaagtgcattaccttgctgattcagaagaccaagcgaaggatgtttctgaagagaagaggaagtttttgtgcggcatcggggagagccaggctcagcaagggcagcatcagatctctggatgtgttggaaaaactttgaaacagaagtgattttccacagctgtggttcaggtagcagagggccgtgctctcctcgcctgatcatgaccatgcacaatgcaacaaagggaatttaagacagaaagacttccccacagtccccccagtgaagggacaaactcattatgtcactgaagtacttagctcacttttctttaatctcgatgccatggcttttattctatgctatgtaggctctttacgaattgtttttgaccacagatgaccctaagggctcctgcgaaccgtcctctggggattggcggaagcatgcggtggtgcagctgcagcgtgtgcaacttcacacactctgcggtcggttgtctgacaccaagtgtcagctgtgctactttgctttgcctgagatatgaattcataattgttccctgttgttcatggctgatacccttcccactgatttaggctttcacattttctttactacacatgcccagtagtcacattccaaagccactgggccccttgagtgcgtcagtgcagctggtgagtgaaatgtactcaggtctgtaacctagcagtgagacttggagcacttcctgcagatgactgactgttgcgaatttacatggaccacggtgatatccaaaggaaaaatgcttttatatttatagattatttcattgaactatatgtaaaatgggtatcaataaatgtatttactcc

SEQ ID NO: 214 - DNA, 2675 bp, Mus musculus
ccgggcggcgctgacagctccaagccgaggatcctgcttatggggctccggcgcagcggcaaatcctccatccagaaggtggtgtttcataagatgtcacccaatgagactctctttttggaaagtaccaacaagatttataaagatgacatttccaacagctcctttgtgaacttccagatttgggattttcctgggcagatggacttctttgatccaacctttgactacgaaatgatcttcaggggcacaggagcattgatatatgtcattgatgcacaggacgactacatggaggctttaacccgacttcacatcactgtttctaaggcctacaaagttaacccagacatgaattttgaggtttttattcacaaagttgatggactgtctgatgatcacaaaatagaaacacagagggacattcatcaaagggccaatgatgaccttgcagatgctgggctagaaaagctccatcttagcttttatttgactagcatctatgaccattcaatatttgaagccttcagtaaggtggtacagaaactcattccacaactgcccactttggaaaacctattaaatatctttatatcaaattcaggtattgaaaaagcttttctctttgatgttgtcagcaaaatctacattgcaacagacagctcccctgtggatatgcagtcttatgaactttgctgtgacatgattgatgttgtaattgatgtgtcttgtatatatggattaaaggaagatggaagtggaagtgcttatgacaaagaatcgatggccattatcaagctgaataatacaactgtcctttatttaaaggaagtcactaaatttttggcactggtttgcattcttagggaagagagctttgaacgaaaaggtaatgaactctctcaaagttgggtggaggatgctggagccctgctgagcttatataccaatgctgcctgcctgcttcctgcatacttcattagctgctctacagggccattggtggaaagaatgctaccctgacttgaggatttaacacattcatcttcccacttgatttgttagattaccagttctcactgttcacgtctgtcctagaggtaacagtgttagctgctggattcttggctttacagtgattgattgcagtgtgaagagtttcggagagaggggagcttcacagttggcatttaaatagacaggctctttctctctcttgtagggttgatagactacaacttccactgtttccgaaaagctatccatgaggtgtttgaggtgggtgtgacttctcacagaagctgcagtcatcagaccagtgctccaagtctgaaagccttggcacataacggcacgcctcggaatgccatctagtctgagtctcagcagcggaggctcagtgctggcttagtcctccctccagggtcagatgccatgcactgcaggacatgagcgctgctgcctatggagtctggagacgatgacgacggtggagtttctctgctgacgagagcccctcagccggctgtgtgcaactgaagctactctctaagtacatcgcaaaagaattgcagagacctcagaactcagtgtgtcttttcttctctcttgagccctactttaaatagctgggatattttggacctggagatgataaccagttagccatctttaccagtgaatgttgctgtcagtcccagcctaaaacagtaggaaactgagttttatatgcttccctaggccttcacttgagtagtgtcgaaagacttgctttgcttacgttctaacactgcctttcagagttcagatctcactgtacctctaagaccttggaagtgcattaccttgctgattcagaagaccaagcgaaggatgtttctgaagagaagaggaagtttttgtgcggcatcggggagagccaggctcagcaagggcagcatcagatctctggatgtgttggaaaaactttgaaacagaagtgattttccacagctgtggttcaggtagcagagggccgtgctctcctcgcctgatcatgaccatgcacaatgcaacaaagggaatttaagacagaaagacttccccacagtccccccagtgaagggacaaactcattatgtcactgaagtacttagctcacttttctttaatctcgatgccatggcttttattctatgctatgtaggctctttacgaattgtttttgaccacagatgaccctaagggctcctgcgaaccgtcctctggggattggcggaagcatgcggtggtgcagctgcagcgtgtgcaacttcacacactctgcggtcggttgtctgacaccaagtgtcagctgtgctactttgctttgcctgagatatgaattcataattgttccctgttgttcatggctgatacccttcccactgatttaggctttcacattttctttactacacatgcccagtagtcacattccaaagccactgggccccttgagtgcgtcagtgcagctggtgagtgaaatgtactcaggtctgtaacctagcagtgagacttggagcacttcctgcagatgactgactgttgcgaatttacatggaccacggtgatatccaaaggaaaaatgcttttatatttatagattatttcattgaactatatgtaaaatgggtatcaataaatgtatttactcc

SEQ ID NO: 215 - protein, 327 aa, Mus musculus
MGLRRSGKSSIQKVVFHKMSPNETLFLESTNKIYKDDISNSSFVNFQIWDFPGQMDFFDPTFDYEMIFRGTGALIYVIDAQDDYMEALTRLHITVSKAYKVNPDMNFEVFIHKVDGLSDDHKIETQRDIHQRANDDLADAGLEKLHLSFYLTSIYDHSIFEAFSKVVQKLIPQLPTLENLLNIFISNSGIEKAFLFDVVSKIYIATDSSPVDMQSYELCCDMIDVVIDVSCIYGLKEDGSGSAYDKESMAIIKLNNTTVLYLKEVTKFLALVCILREESFERKGNELSQSWVEDAGALLSLYTNAACLLPAYFISCSTGPLVERMLP

SEQ ID NO: 216 - DNA, 41631 bp, Homo sapiens
atcctcctgtcttggcctctcaaagtgctggaatttcaggaatgagccactttggcctaaatttttacagcttatttccaagatgatttgaaatagtttataacattaaaacactatgaaaggatggctaaagatgataaatcatttggaagctgaagcattttagctattttgagcgctatatcaacctctaaaaatcctggctgcgaaggcaaaaaggggagcatgattgggtatagagttcttgtctgattacaaggaagtgcatttcatctatagaacagcacaggaaactttgtatttacagtatcttctgcaactatcaacctttcaagtaccagtgacaaatgagaagctgaaagaaatggggtgggggaataagaggaggagagagtagagtattaatattcatgtcttataaaatgaggatttggccaggtgtggtggctcacacctgtaatcccagaactttgggaggctgaggtgggtggatcacctgaggctgggagttcgagactagcctgaccaacacagagaaaccccgtctctactaaaaatacaaaattagccgggcatggtggcacatgcctgttatcccagctactagagaggctgaggcaggagaatcgcttgaacctgggaggcgggggttgtggtgagccaagattatgccattgcactccagcctgggcaacaagagcaaaactctatctcaaaaaaaaaaacaaaaaaaaaaaaccaaatgaatttctcaaaaaatagtgattttttcatactgtatattattttggtaagttattaaaactctaaaagaacaaaagggaagtatgtaagttggtttacaacaggacttaacttggggtctagatatctatcactgtttttttgtttgtttgttttgtttttttgtttttgagacagagtcttgctccatcgcccaggctggagtgcagtggcacgatctcggctcactgcaagctccgcctcctgggttgacgccattctcctgcctcagcctcctgagtagctgggactacagccgcccgccaccacgcctggctcattttttgtattttttagtagagacggggtttcactgtgttagccaggatggtcttgatctcctgacttcgtgatctgcccgccttggcctcccaaagtgctgggattacaggtgtgagccactgcgcccagccacattttttttgtgtgtgtttactttttttgcttttattagatttttcaaagggttccatgcacaaaaaggccaaccactgatttagagttttttatctaagtagtaaattctaggaggaatttgttccatagatgaagagcaaggcagtgctcatatgagtgattagatatgaaaccactcaagtatatcttattttaatgttgatttgagcatgttgactactggtaaagtttttggttggtggttatttagcaaaacaaacttaatttttaagaccatttttgaattcagagcttcttccggtaattaccatagtcctgttgattctttcctaaattctcgaatttctttcttctcactgttctctcactcccatcactctactgcaggttgctgtctttttaaactggattaccacatcagccttttaactgttcttcctgtctttatccttgtcccactccagctggtccacatagcagttaagagtggatcctgtcactcccttcctttaaactgtttaattatgtgccaaccaaatttgcatgactctccctaatctggccatgaccacctttccagcttcctttcctgccaaattacatctccagccatacttgaattttcagttcctcaatacattgttttcttgctcctgggccttcccattttatctgaaacactcaacccctaggtatcaggtctttgccttcctttaggaagccttccctgatgtcctaggtttgcttaggtgttcttccagtgtgctactgcaacccattatccagtattcctgcttgataccctctgtctagttccttgcatatcttttatgcttgactgtaaatttgttgagaacagggaccttgtctgtcttgttcagcattgtatagtctttgcaatgtgctcagcgtatagttggcacctaatatttactgggtaatggaacataatttcagccattcaaatttaatacgtcaattgttgctttttctgctttttgatttgcagtgttggtagccttatatgaagaaccagagaaacctaacagtgctttggagtatcctttcaagtcagaaaaaggctttattttgaaactcttatttttttagatagataataacctttaaaatacttctgaatattgagaaagttacttttttttttttttttttgagacggagtcttgtactgtcacctggtggggaatgcagtggcgcaatcttggcttactgcaacctccgcctcctggcttcaagcgattctcctgcctcacgtctcccaagtagctgggattacaggtgcccaccatcacacccagctaattttttttatttttagtagagacggggtttcactatgttcatcacgttggtctcaaactcctgacctcgtgatgtgcccacctcagcctcccaaagtgctgggattacaggcgtgagcaaccgcacctggccaagaaagttagtttcacttgagtttttggatggtgatctctgggtagatattggtggtaaagtgggtgactctggtcagggatattgatactactctgtgctatttcattagtttcattcatgtctaagaagtaagttcttaacattgataatagttttttaaagcatcacttaggagctgctactccagaaaatccagaaatagagctgcttcgcctagaactggccgaaatgaaagagaagtatgaagctattgtagaagaaaataaaaaactgaaagcaaaggtaaatttttaaaaagaattcatattcaaataattttacctgtaataattgtatgatgaaaacctcactgaaatggacaggaggggagggaggtgggtgaatatcaatttgaattaattacaatgtaaggccaaagttatgccctgtcaagaaaaccacaagacgggcctggcacggtggcttacgcctgtaatcccagcactttgggaggccgaggtgggtagatcacgaggtcaagagttcgagaccagcctggtcaacatggtgaaaccctgtctctactaagaatacaaaaattagccgggcatggtggcatgtgcccataatcccagctactcgggaggctgaggcaggagaatcgcttgaacccggcagatggaagttccagtgagccaagatcgtgccactgtgctccagcctgggtgacagaacaagacttcatctaggggggttaaaaaaaaaaaaagaaaaccgcaagacatactggaaataggacaagcaaagaagcaaagtgtggtcaagaagaggttctggctgggtgcggtggctcacgcctataatcccagcactttgggaggctgaggtgggcagatcacctgcggtcaggtgttccagatcagcctggccagcatggagaaaccccgtctctactgaaaatacaaaattagccaggcttggtggtgcatgcctgtaatctcagctacttgggaggctgaggcaggagaattgcttgaacccgggaggtggaagttgcagtgagccgagactgtgccactgcactccagcctgggcaacaagaatgaaactctgtctcaaaaaaaaaaaaaaaaaaaaaaaaaaaagaggttcttaggaacctgtattactaaaaggatgagaatattggttaatgttctttataagtaaatggtcagttctgaggttcttaagcagttgattttaagtaggccaatatggggcgactgctttgtaaatggcacttcttagaatttgtatggttcatagtttgcaaggccatatgtagcggccctctgtaaatttgttaggacttaattttatctagtgctaaagttttttctttctttttttgagacaggttctctgttacccaggcttgtgtgcagtggtgcagtcatgtctcactgcagccttgacttcccaggctcaagtaatccccccacctctgcctcctgagtagctgggactgcaggcatttgccaccatgctcggctaatttttaaactttttgtagaaatggggtcccattatgttgccctggctggtctcaaactcatgactcaaacgttcctcctggcctggcctcccgaagtgttgggattataggcatgagccacctcacccagccagttttttcttttttcaaagtcctgtgagaattttcatgaacttcaaattagtcaactcttaagtctttcaggtcttaccacattcttaatcacataatgtattttacattactctaagtatttctcataatatattttatcttctcaacaactttgtgagataagtgaaacaagtacacaagccactttataggtgaggaaacgaaagcacagtgaagtctaataagcttctcaactccaacaggtagttggcagaaccctaatgttagcctagtgttcttgcaaggaaccacacttagcataaaagaaaatgcagttattttaaattatccaagattccacaatgtgtagtgctagttaactctttggaaccttttaactcaaagacattagtagttgtttattggctggttaagttaagacatgtcacttaactctttatctacttttcagtgggtattttcagtaaacttttgctggagaggaagaaagttccttataagcaaatgaatctttgggaagatatagtttattgcatatcaagtatttgaacagtgcagtcatgaactggaatgaaattttagtttcaaagcaattttaaaggtttatatgaaaagggctttcattagatttgattgtattaaatcttaaatcactgaatgatttaaaatggatagttatagaaactgatattaatacaatttactgacagtaactaagttgaatataacagttaccttgttttactattttttactcaatttagaataaaattcacctaaattcctctgtctttgccccatagcttgctcagtatgaaccacctcaggaggagaagcgtgctgaataggattcttctcagtttgaaagacaatgaaaaatggttttgtatgacttgaatagtttgtatagtatataatcttttctgaacagatgctatagaactcttttaatatgtttaattcacctatcacactctgttaaaaacacatagaatcatcaataaaaactcaatataactttctttgggtcttaaagcaggagaatccaaagtaaatcctgaacaaaacctaaacacagccatctaactcattaccttaaaagacattctgtttattagtctgattaggaatgatggcactggttgtattttagccaagacagtttagcatggagctattccttggtgcagttcaggatatgaacacaggtacagtcattctttgaaggtgacactgttctgtatattccctataggcagctggagagatctgtgtgacacaagatgcttttgtacgggttcccatgaatcttctgctcttgtttgtgtgacatggaacaaataacttctttgccaccactttgccttagataactgtgtgtgtgtgtgccagtttgaactctgacaccacattttccttctatgcaatcatgcctgtctgataatcttgcattgctttcctctgagctttagtgggtcctagttgcacactggcctttctgtgctgtttttcaatttgcctaataatagcagttaccctgattgtaatttatgtaactttaaacaggatcacactgtaccccctgcctgccttatttgcttactgagcacaggacagaggcaatatacaactctgggttcacacacaagctgagatgagaagaggaatgagccatatattggggaaaatcatagtttgtaggtataattatatagtgcttttctccctcaaagtatttttctagccttgaattcattttatcttcattatccctgtgaagtaggtgggacaagtataaggggaagaggggtgctgaatttttaggccaaagactgatattaatacaaatcactcactaactgtagagccttgggcattatcagtgaactactctgagatttactgtcttcatctgtttaatgagtagaatgtccgtgatgcctacctcacagggttgttgtgagggtcaaatgagaatgtatgtgaaagatttgtaaatggtaaagcactatattcttgtttgttagtcctttttcctttctttgggtagacctacagtcagatgttttgttttatggatcacttattttccttactggtagactgtcgttttatagacatattcctatttcatatattctctccctgttgttagagaacctatctttgtttttggtcaaaacacacatagaaaacaaaatgatccaatgaaaactggtttaactagcaaaagccttggcacctgttggagactatgaccaagccaataaaaagggcatttaaatcagccctgttagtaggaatgtggctatggctggtgcctcttctagtcacaagtttgtttttggagggggtccagaagatcattcccttgcatagatttctcttttaccaatttgagtgcctcctacatgggcagcagtggactaagtgctgggtgtgataaagaggaatgacttaattatgagactgtatataatcaaatacagtgtgggttaggacctgtggcagaccattataataaagcatggccccgtgagggttttgaaagagagagagacttggcttccttagttggtatgatagtttcttggtagatacaggttgaaaattttttgtggcagccaatcctcatgggctttttactcatttgattagtattaatatttatgtcagtaagccaggtgactgtgactgtctttggtaccatcctttttgaacagaaaggcaacatgtgggttggataatcacacttttaggtgaaactgacttgcttaaactgtaacagtcagtgctatttaagaattcaggataagcttagcctctagaggtcctcttcaacatttctgtcaaggatttggatgaatacaacaagatgctccatggaagagaaaatggataaatggatcccaccagttaagctcctattatgcttcagctgctttgtctataaaatatcgacttcacatcttgcctatctcacaagttggttgtaagaatcaaattaaatataatggatgtaaaagtgccttgcaaactgtaaaggattacatacagaccagatggtggtagtgccaaatctgtaagtgacacaaattggaaagtctggttggaagactatattgaaacaagctttaaaatgattaaccacgtggaatacccaaactgctgggcctaaaccaaaaagttgaagtatcaagtcttacatttaggttaaaaaatgcagttatacacatttaggcactaggattgctgacaaagtattagttacagtgattatcaatgtgacccaccctatggatgcttaaaaaaaattacattctggaaagcaggaatagaaatactgtctaggtgttaaatggtcattctgaaagttgtactgtttagtattgctttgtaggagtcagatgtttgatggatattgacaagctggaatgcatataaagagtgaccaatagaggatttgaatatataaggctgggctctccgatttggtacacactagctgcaagtggcagttaaaaatttaagttcctggtggggtgccgtggctcacacctgtaatctcagcattttgggaggccatggagggtggatcttgaggtcaagagatagaaaccatcctggccaacatggtggaaccccgtctgtactaaaaataaaaaaattagccgggtgtggtggtgggcacctgtagtcccagctactcaggaggctgaggcaggagaatcgcttgaacccgggaggtagaggttgcagtgagctgagatcgcgccactgcactccagcctggcgacagagcgagactccatctcaaaaaaaaaaaaaaaaaaaaaaaaaaaaattcctcagttacactagcaacaattcaagtgcttattcctcataggactagcggctacatgtttgacagtgcagataaagaacatgtctatcatgtatatcagttgtattgaacagcacgataggaatggttgaaactgaggatgttcagcaaggaacagagaagacttagtgggtaatgaatactgcaatctggtatttgaagggctgtcatgaaaaaggtgaagactattcctattttattctattataggcttcagggagtgtggtttggctttaagactttttttttttttttgagacggagtctcgctctgtcgccaaggctggagtgcggtggcgcgatctcggctcactgcaagctccgcctcctgggttcaagccattctcctgcctcagcctcccgagtagctgggactacaggcgcccgccaccacgcccggctaattttttgtatttttttaagtagagatggggtttcaccatgttagccaggatggtctcgatctcctgacctcatgatccgcccgcctctgcctcccaaagtgctgggattacaagcgtgagccaccgcgcggccggctttaacaatttttaaacaaaggtttaccacagtggagttggctgcctttcgagatggtgagctcttttaccttcgaactatttaagtgcattctgcatgtctattagacactatagagttggttcgttttaggtgagaggttgggctagatgacctctaagggtgtatcctacctctaacttctgggttcagacaaaaccaaagtcccagacctgcccgcatgtgcgaatttttccttcataatcaagaagtcagtctccttggagggctgggagcacccccactcctgtactttaaaaagtgtatagggctgtgctttaagaggatcctcttctcaaacttccagttctagagcctgattatcaaaaataaaaattcctctagatttctcggacatatttggtgacaagcatttgcttttgtttgctttcattattcaatactttggtctctaatctgaacgaggtcatagaagaggcagtgttctatgggggatggaattcctagagtagactttgacaaggcgggaaggagggcaaattgagtcccgttgggtttgaagtggcagcagtatccactatcggcgacttactgaagaaagaagataagatgttctagcttggctgcatctgctttcccatcagggtccagctacctgctagaacaaactatcacggtgacccatgactctgccttggttgaggtttgccctcagtgtggctggctcccccatacctttgcacatcccaatctatccatccacctagatctgctcagacgctttctcattcaactcccgagcattatttatccgtgaccttcccacataatatttcgtagcgaggttacttacgcagaggtccgatctctctgttcatcttcaagcaacctgaaggcaggcagggtctgcgtcggatccagttctgtgccccttggtaggcacccaggacactgcaggcatcaataaatatcggttgggcaagtacagttgcaggatgaggacaatcaattcttcctcaaatgccgggagagcatctccatagcggtgctctgggagcccggaagaaggcaggggagcggtgcagacagcgttgtatgcgggccggggcggagggctgagggcccgagccggggctagaggcgcggccgggccgccctcctcgtgactcctcctcccccctccgcggctctgagtcaggtgattccggcacgtgacggggcaccacctaccctgctgctctcgagtagcagctcgggcggccaataagcggctgggcttcggctcggggcctatgagagccgggctccggggggcgggccggactgtggcggctgccgggggcggtggcggtggtgcggcggcggcggaggcggactggggaggcggcggcctggctcggcctgcctggcctgtcagggcgcgggcggcggcggctccagcaccatgtccctgcagtacgggcggaggagacgcccctcgccggcagttacggcgcggccgattcgtttccaaaggacttcggctacggcgtggaggaggaggaagaggaggcggcggcggcgggcggaggggttggggcaggggcaggcggtggctgtggtccggggggcgctgacagctccaagccgaggattctgctcatgggactccggcgcagcggcaagtcctccatccagaaggtgagcagggctgcgcccagtcccccgccccctccccggttctcaggtggccggtagcggggacgcccgggagggcggcggccggggcccgcctgcgctccgtccctccgcactttctcttccactcttgcgagcgcacaggcgcggcccgcgcggggaccccgacctctgtgtccacgcccaagtcagctgaagccaagtggagcgctgaaggcgaaactggttgccgggaggcaggtgcccggtggcaccgcccaagacctccgccccctgggacccagctcctgtgtcatttacgaaactgagacgtactctccagttctcacttggagaacttcgtggactccctcccctggcccgttttgatttgttctcacttcaggtgacctgagtgtttcgggattcccagcagagccccagggagcagcgtcaggaagagttgtgactaagacactgggcgttgtaattctcgctactgatgtgaaggagacttcgctgtagcattactgggaattgggtagtgagattgcacccatttcagtagttgtggcctggtgaatgtaattactggtgctgttccccctgtaggggtgtgtttttaaaaatctgagactttgagaatattttgcagacctagtctgtttgttttcacttttgggccttcatgaacaaatggagggctgtacacgtttgtttgtttatgtttttgagacggagtctctcgctctgtcgcccaggctggagaatgcagtggtgcaatctcggctcactgcaacctccacctccctggttcaagcaattctcccgcctcagcctcccgaatagctgggattacaggcgcgcgccaccacgcccggctaattattgtatttttagtagagacggggtttcaccatgttggccagggtcatctcgaactgctgacctcaagtgatcatccgccttggcctcccaaagtgctgggattacaggtgtgagtcaccacgctggcctacactgtttagtgagggttaaatagaggcaaggttgacttcctccatcagccaaacccattatacgcggagtgagctggtaataaaactagtatcagcaggcacctggtcttttcacctctccactctgttgcaaaggcctatccaaaataaatctgtgatttttttttctttctgaatctgtgatattttgtagatgggatctttttaaaaagcagcgttcttccaggtttgctggagtactgtgttttatttaccttgattttcacctctacagcaaaacttgggtacgttgactgtaggtttttagtaaactaatttcagttattcacatttgttactgagaaaaccttgagagtaattgttcacttttctcttctagacagtaagaggcaaagtagttttatgttagaactgtgtaggttgtgattattgtgatccttttttttttgtttgtttgttatggagtcttgctcatcgcccaggctggagggcagtggtgtgatcttcactcactgcagcctccacctcctgggttcaagtgattctcctgcctcagcttcccaagtagctgggactacaggcgtgcaccaccacgcccgactaattttggtatttttagtggggatggggtttcaccatattggtcaggctggtctcgaactcctgacctcaagtgatccgcccgcctcggccgcctaaagtgctgggattgaaggcgtgagccaccgcacccgggccgattattgtgactcttaacaattgcctttacgtttcttttctcatgagagctatcttttccctgtcagtccccgtggcctccccctggacgttttcactttctacttggtatagttactgcccttcttagactgcaaagtcagtgagggcagagtccagtctgtttcactttttaaattactcctcagagcctgaggtaggcattcaagtaatttttgaataaaccagacttcttaagctttagctgtaagacttttataatcttaaagcagattttggtagaattaatgttagctttcccccagaaaaactaatggaggtgatagagattgctactattagtactgagtatggtgcatagaacataggagaaaagatttagctccaaaatagatttaatggaaattaatttggtgtcttcttttgtcaaaaataaagggatagtgaataccaatggattcaccattcagtttctacttttcaaaaaaaatttttttttgtgggatcaaatgtttaaatgttaaaccagggtggaattttaaatttaaattctgaagtttaatagtcataaaattgcctgttttcttttaacaggtggtgtttcataagatgtcacccaacgagaccctctttttggaaagtaccaacaagatttataaggatgacatttccaatagctcctttgtgaatttccagatatgggattttcctgggcaaatggacttttttgacccaacctttgactatgagatgatcttcaggggaacaggagcattgatatacgtcattgacgcacaggtagtcagtaatgtgtttactcctctttcctggtgggaaaaagatgtagaaacaaaggaaagttgtttatcttctttgtcatgtggttgcagcttatctctttggcagtagattccctaacagtgtaagagatgcagttgcagagtgctttgggagcagacatgcattgtgcaggtacagaatatcagatgattaggagatatggtttacatccttgagtcctagttcatgagcagctaacattggctttccacttttattggttgccatattttataataattttataataatagtgatgttattccctgaaaatatcccatcccataacataaagaggaatatgagaactgagtcagtagatattagagtgaatagtttacttaattgtcaaaattgagtttagctcaacaaacatttatggagggcctagcatgtggcagtcagtgagatgaatggggcaagtccctatcctttaagaagcttactttttataagcttaagcattagttaagaatgctttctgagtgataggctctacagagggtgccttcacgtacaggacctaattaatttaagcttcacaatattgttaggtaggtattgtaattctgatcttacagatgagaaaactgagatcagagtttaagcagcttgcttaaagtgacacactgaataaatggcagagctgggattacttaaaaaaattatgttgggaaaaaatgttcatatcatttttttctttcttaaattaatattaaaaattacaagcattaacttggtaattgaatttttttatcttgagacaattgaagagttatttagtagtatagtatatttgaatgtttgaatattgatgataattaggatagtatttttctgtggttggggaaagaggtggtttgaggctttaactcattacttggcttttgtaagatttattttaaaaaatattttgttctgacttacaggatgactacatggaggctttaacaagacttcacattactgtttctaaagcctacaaagttaacccagacatgaattttgaggtttttattcacaaagttgatggtctgtctgatgatcacaaaatagaaacacagagggacattcatcaaagggccaatgatgaccttgcagatgctgggctagaaaaactccatcttaggtaacaacatgtgtgtttgatatgaaagccctgaacaaggtgtaaatgtattcccatctctgtcattacaaacaccatagctttctgctacctgtgtgccctttgccacatcttttatgtttttgatcttgttgttgaattccaggctgtctggggagcctgatattgagaaattacccactttttgcgttttcctggagattgaagtcatgtgaagtgtttccactggtgcttttccaaattcatctcaagagactggagtcaggctgtttcttcatggcataaatctgctttgggactccttcctcttggtttcattacttttccccgccttgcatcagtgaagtgaatctgtcacatttgttgtggaagtctttagcttgagtcttagacagtatctttctcagtaggaacagccttatacagagagtgcactttcaaatctggactgactctttttatttttcatttttatttttcctgctggctcccttccacctcccccctggactgactgtaatatatcttagcttttaaaacactttatacttttatgaaactctataaagtttggcttaggtgggtttatcttataaatgtgcataaggctgctattaaatttagaggactattggtttgtaactactgttaagaaattattattaaataatacctacttgataggattgatttgtgtatttgcattctaaaagtgtatgaggaatatttttgtacatcttattttatttggtgatataggtagaaatgagtattaaaaagtacccaagaaaatattctcttgacgatagaagtagcttaaagagggagaaggggagagagacagcaagttatttctctgtccccgttctattgttgtgacttctttatgggctcaagctaactgctatccctccccctaaaattctctgggtctcaggctccaagatctttcagttattcttctaggaaaccatgtcgaaaagtctcattgacctctagtttgcctggattaaatttctaaataatttgaaaataattcatgttaaaaaaataaaaattcagcaatgtttgtaggagaaaatgtaagtggctctccacaaaaattcagtcttatttttttgggaatccactgctaatagttttttacctggattttgagccgttcttgtcctgtgttccccagtgctccatggggatccttctgattctctttactccgtgtctgtgttcctttccagggcatcccaccctagtggtacatgccatccctttcctcagtaccatgtagggtcctagaccttgttaacttcagtagaatgttgcatcaagcttttatttaggccaggcatagtggcttatgcctataatcccagcactttgggaggccgaggcaggcagatcacttgaggccaggagtttgagaccagcctggccaacatggcgaaactccgtctctactaaaaatacaaaaaattagccgggcattgtggtgtgtgcctgtagtcccagctacttgggaggctgagagaggagaatcgcttgaacccaggaggtggaggttgcagtgagccaagatcgtgccactggactccagcctgggtgacagagcaagactccgtctcaaaaaaaaaaaaaaaaaaagacttttatttagtactagcagtcctatggatgaagctccttttcatttccagtttctagaaactcagtttactaaaatgccctgtgacttgcaggttctccctgtccccatttacctcaagcctcaaaggtgcgggacattctttctttgctcaccttttggcctacaggaaacactaaaatattcctttctccctagtatctatggggtcatcttggccttacctgttccagtgctcttacatctagattagacccctgtcttgctagattaggttcttaggtcagctccttgaaagtatttttttttttttttttgagatggagtttcactcttgttgcccaggctggagtgcaatgatgccatctcggctcaccgcaacctctgcctccctggttcaagcgattctcctgcctgagcctcccaagtagctgggattacaggcatgcgccaccacgcctggctaattttttgtatttttagtagacatggggtttctccatgttggtccggctgatctcgaactcccgacctcaagtggtccacctgccttggcctcccaaagtgctgggattacaggcgtgagccatcgcgcccagctgaaagtatctttaaattacctataaagttctgtgtctctgatgttatatatacgtataaatgtgtggtggatgcgactatataatgaagattgtactccctgagttataaagcagatagaattgttgacagtgtttaaattgttaaaggcttccctctcaaatacgtgttttattgaatctacatgtgttacttctccaccgtaagtccttttaggcctccagactcctgtagattcctccattctctgtagagtcccgactcccatcctgtttaatatgctctttacataaattgtaaacaccaattgtattcatttgtttattcagcagatacttatgagcactgttcagggaagtgggcttgctgctaggagcgagactgacaaagtctctttcccctggaacttaacattttcagtgacacagctcagaagcacctaaatgaatgtatagtatcgttttaagtacttaccagtggtgtgaagaaaaacaaattaggggaaaggggttgaaagccttgggtacacgagtgctattttaggtaggctggtctggaaagaactttttgaggtgacattttagtagaaacctgaattatgttcttatttaataaatgtcacataactcttctagttttctcggttttagtcttatttttggtctcagttatgtgcttaaaaaaagctttttggatcagattgcaaagacttcggtgaatattggagtttatgtacctgaaaatccttttctcagtactacttcagttgccccctgtgtaaatgcagtaaagagatgaagccaggtgggaaagtgtatttgtcatcttgagtgatgggtatggtagacaagataaagaggctttattgaactcactgaaatcaaatgttaagaaacttaaaattttatgtattataatagttgtcatagaacataaggtatttttcaaattaatcaagctatgttgtgtttttcagcttttatctgactagtatctatgaccattcaatatttgaagcctttagtaaggtggtgcagaaactcattccacaactgccgaccttggaaaacctattaaatatctttatatcagtaagtgagcaatttatatttaattcactgcagcttctgattccatttttgggaatatatttgtgttttcaaattttccaaaaaagtcttgaattaatctgtatcaagtacaaagactagtgacccacttaacatgtaaaataaatgataacatattattcaagttattttctgaattcttaaatagatgttgatgtcaacgtgtaattcttttatggtttgtaaattgccacataacgcctttcttgatagcaaagtaattcaaatcagagatggtttatattaataagaggattattgaaaatgtagcattgcttgatttttagagatttttgttaaattttttgtgatgtcttagaaaacaattcatttgagtaaagaggaagaagaagatttgacttaggaaattgtgtcagtaaatcagagtagagaaataattcctctttcattctttggataatagaagagtctctcaagcaagtgctatttgttttttggtattgggttatataattaaaaatgaccttggatgttattcagtaattctagatcttcgataagttgtaaattgtgattcttaaaaaatactgaacagtttcccatttgtttttccaagaattcaggtattgaaaaagcttttctctttgatgttgtcagcaaaatctacattgcaacagacagttcccctgtggatatgcaatcttatgaactttgctgtgacatgatcgatgttgtaattgatgtgtcttgtatatatgggtaagttatgtatatattcctgcaatatctcagacaggcggaaaactattaacttgatttgttcagaagactaatttctgaggcccctggcaagtggtactacatgaactgggattgttctgaccatagtgctttaacttggagcatgatttctctggaagttggctgctgggtcttactccttcggagaatggctaagaaaagttggaaagcatgactagaactggacttgtttatcactgcaagtttctcccactgttgtggggatgggggagggttgcactgtgtcttctcactactggaacttagttagattgaaaaactagattaatttatttaaaatggtctgaataacaaagtaagttctggttcctgatttaacctcaggctttgtggaattagggattcttaatctttcagagagcaaagaaagtaattagaattttggatgttggaagaacttataaaaatctgacccatatatacaagtttccaaaataaatctctaaaatttgagctcctcctttatgtaaatttgccaaactcgctatagaaatttatgaaagccagccagcaagtgattttgtagaataggccagaggactggtgaaaactttggagaattactggcttttcaaaagctgataatggccaggtgtggtggcttgtgcccataatcccagatgtttggaagcctggggtgagaggatcgcttggggccaggagttggagaccagtctgggcaacatagacctcagctttaccaaaaaaaaacaacaaaaaaagagttaataacattctctgtaccctctgacttcctagattcccctggtatattaacatcagcactctcaagttgcttttcagatgttttagcattatctttgctttctactacctgtgtcttctctctgctccatctagtctaaatatctctttcacctctgactctgcccttcattttggtcttttgcttaatttctccagctgcctctgagtaggagagtacatttgtcttacctattctatatctgtctattcctttaacttttatgattatatgctctcttttgttatttatttatttatttatttatttatttattaaacggagtcttgctccgtcgcccaggctggagtgtggtggcgcgatcttggctcactgcaagctccacctcccaggttcacgccactttcctgcctcagcctcctgagtagctgggactacaggtgcccgccacaacgcctggctaattttttgtatttttagtagagacgggattccaccatgttaaccaggatggtctcgatcgatttcctgaccttgtgatccacccgcctcggcctcccaaagtgctgggattacaggtgtgagccaccgcacctggccttttttgttttgttttgttttttgaaaaagagtctcgctctgttgcccagactggagtgcagtggtgagatctcagctcactgcaatctccgcctcctgggttcaaacgattctcctgcgtcagcctcccgagtagctgggattataggtgcctgccaccatacccggctaattttttatatttttggtagagattgggtttcaccatgttggccaggctggtctcgaactcctgacctcgtgatccacccgccgtggcctcccaaagcgctgggattacaggcatgagccaccatgcctggcttgttttaattctttacataatcaaaatgagacattgtcagtttattatatattttaggatagtttcatatttcccacttctaatttaaacaatggatgagtagaacgtttgctttttctttaaaacaaatcaaaatttcataaaccaactttttcataatacaaaaatcaaatttaactgtaaaatttattttcaatgttagatacatgttatttattttatttatttatttttttgagacagagtctcactcttgtcgcccaggctggagtgcagtggtgtgatctgggctcactgcaacctctgcctcccggattcaagcagttctcctgcctcagcctcccgagtagctgggattacaggggtgcaccaccacgcctggctgattttgtatttttagtagagacagggttttaccatgttggccaggctggtctcgaactcctggcctcaggtaatccacctgccttggcctctcaaagtgctgggattacaggcgtgagctaccactcccagccaatacattttaaaataccttatacataataaagtacattatattagctggatgtggtagtgtccacctgtagtcctagctaaatttgggggattaagcagaaggatgaggcaggagaattacttgatcccaggagttccaggctgcagtgagctatgattgcatcactgcactccagccacgggtcactgcagcctcaatctcctggactcaagtgatcctcccacctcagcctcctgagtagctgggactacagccgcacaccacaccatacccagctaaccttttttttttcttttttttttttgagacatggtctgtcactaaggctgaagtgtagtggtacaatgacagctcattgcagcctctgcctcccaggctcaagtgatgctcctgactacaggcgtgtgccatcatgcctggctgagttttgatttttgtggagatggggtctcactatgttgcctaggctggtcttgaattcctggactcaagtgattctcctgtcttggtttcccaaagtgctgggattacaagtgtgaaccattgcagctggccttttttgtttttttaattttacttttttgtagagacagggtctcatagtgttacccaggctggtatcgaactcctggccttaagcaatattcccgtcttagtctcccaaagtgctgggattacaggcatgagccaccactcttggcctgccttggcattattttgattaagattagcatattttcctaatagtcttaaaaactgttaaaacagataaatgtagaaagcagatcttatgctttacagattctgagcaagcattttaaggtcattaacatatttttattcttaattttattaatcacagccaaatcaagtcactctaatctccagactttgaatagaatgtgcctttcttatttctttctcatgttagtgtgtgattcaagatcatatgctggcttgacattaggagctttatagttttttacagttgctggctgtgggtactggtttagggaatcatctttagggttgtctatgttggaacctgttgtcagagttagttcttgttctcactttccatgtggcacagaaaaagatctacatggggcatcttaactataagctgagaacatgtagcacttataacttcctcttctccaattagaaggaagtagttttcttctatactcttaaaagcaaatgacaccaacttcccctccactctgccgtcccaaattaactttatattagttaaggtactggaaactgcatggaattgagttaaaaaccctaagtttgagtcctgactttgccaggagattacttcatttttaatgaacttcagttcctaccttttttttttttttttttgagatagggtctctgttgcccaagctggagtgcagtagtgaacacagctcactgcagcctcgacctcctgggctcaagctgtcctccttcagcctcctgtgtagccaggagcacaggcgtgtgccactgcacctggctaacttttggatatttttgtagagatggagtctcactttgttgcccagactggttttgaactccagggctaaagtgatcctccttggcctcccaaagtgttgggattacaggtgtatgccatgtgcctggcctctgtatcttttcaatgggcatagtcctcttgtatttatgtagtttactttcgcttgttgcagaaaggacataatgtggttaaatagggctatagtaataattcgtgtcctcagggttgttgtgaggatcaaagaaatgtatgagaaggtaaactgcaaggttcagaatagtaaaaataagcccccacttcatgaaaaaaaaaatacatggaaaatatagagaaatgaaaataggagtaaagagccactactcaagtcaaccactaacaactgttttagtgttatttctgtcaccttaaaattgtgtgtgtgtgtgtgtgtgtgtgtgtgtgttcttgtgttgcctaggctggtcttgaattccaaagctcaagcattcctcccacctcagccttccaaagtgctgggattacaggcatgggccaccatgccagaccccaaattttttttgacattatgcttatgctaccatatgagaacacaaattgtaaggcttggaatagtttaaaaagtaaacctcacccctattcattaaaaactgcatggaaaatatagaaaagtgaaaataggagaaaaaagatacattgttttactgccaaagaaaattaccagttactcctgacattttcttttcctttttttcttttttttccctgagacagagtcttgctctgtcactcaggctggagtgcagtggcacagtctcagttcactgcaacctctgcctcttgggttcaagcgattctcctgccttagcctcccgagtagctgggactacaggtgtgagccaccatgcccggctactttttattttttattttttagtagagatggggcttcaccatgtcggccaggctggtctcgaactcctgacctcaagacaggtggcccgcctcaacctcccaaagtgctgggattacaagtgtgagccattgcacccagccgacattttctttttagtatatttccctcaccttttctgtttttgaaggcaaatacttttaaaaaagcatttttaataactcttaattcgtaacaatagctagataacctttagatttttataggcaagtacatcagaaaagactcttgagtccgtatctctttttaaaagttgttgatttcaacatagtccctgctagtctctagctgagactgttcttgtttagtctaagtattttcttgcttttgtgaggaagcaaaaaatatgttttctgtgaaaatgtgattgacctggcaaatagaatatgcctcgaaggagctcatctaagtgaggcggcaggtcccagagggtccctgttaccttagggcagtaaagagaggagacacctcagctgggtttacagaacacagtctagggggtgagtagccccacctggtgagatgttggtaacgttgtcatttccctggttaagatatacatatgtttgcacctttttttccaaatgtctgattatctatattaaaggatgtgtatggagttgttgtttttaataggtatccctgaaattctgtgtttaggaacactataccttaacaacactctctcccaatatgtttaagccagtattctttcccagagacatttgggaaactgggtggatgtcattgtgcagattaaatgtggcagatgcctagatgggaaacctgtaatgaatagtactttcttttaaaataggttaaaggaagatggaagtggaagtgcttatgacaaagaatctatggcaattatcaagctgaataatacaactgtcctttatttaaaggaggtgactaaatttttggcactggtctgcattctaagggaagaaagctttgaaagaaaaggtaatagcattttaaaaagctgtttttatgttaatttctttgccataacttctcaggttcttgaaaacaagtgaaaataataattgcagtgttagacaaatagctatcagaaaaaaaaagctcaaactgcttttgtccctttccttccatgtatagtccagactttctcttttctttttttgatctttcattttaaatcaagattttaattctagcttttctgcgttcaaatgctttcattacctgtttaactgaatgcagtttggcttccatctgaacaagtctactgaaactagacttttatttatttattgtttatactttaagttctgggatacatgtgcacaacgcacgggtttgctacataggtatatatgtgccatggtggtttgctgcactcatcaacccgtcatctacattaggtatttctcctaatgttatccctcccccagccacccacccctgacaggccctggtgtgtgatgtcccccttcctgtgtccatgtgttctcattgttcagctccctacttatgagtgagaacatgcagtatttggttttttgttccagtgttagtttgctgagaatgatggtttccagcttcatccatgtccctgcaaaggacatgaactcatccttttttatggctgcataatattccatgatgtatatgtgccacattttctttatccagtctgtcattgatgggcatttgggttggttccgagtctttgctattgtgaagagtgctgcaataagcatacgtgtgcgtgtgtctttatagtagaatggtttataatcctttgggtatatacccagtaacaggattgctgagtcaaatggtatttctggttctagatctttgaggaatcaccacactgtcttccacaatggttgaaataatttacactgctaccaacagtgtaaaagtgttcctatttctccacatcctctccagcatctgttgtttcctgactttttaataatcgccatcctaactggcatgagctggtatctcactgtggttttgatttggatttctctaatgaccagtggtgatgagctttttttcatatattcgttggctgcataaatgtcttcttttgagaagtggctgttcatatcctttgcccactttttaatggggttgtatttttcttgtacatttgtttaagttcctcgtagattctggatattagccgtttgtcagatgggtagattgtaaaaatattctcccattctgtaggttgcctgttcactctgatgatagaaactagacttttggaagttaccaggttacctccttcctgcattcagtggccttttcttactctgcaggcttttcaatcttctaagcatgtgatcttgtcagtccctcctttctgaaaactttcttctctctttgcttctctgaagctgaattcttgggatattttgtgtgtttgttttcccgaccacctctcctgtttcttctgttttttttttttttttcctcagtcctgtttgtcagagccaagtctttctgcttgcgtattttctaggtcagctcatcaaatacatggcttcagttaatcttctctatgtgattgaaaaattcacatctccagctatgacttgggatcatgctctcgtcccatgtttggagctattagtaagacgttctctcttaaatattgtgaatgttaccttcaacgtcatgtcaatcattggttgatgagtatttcccctgttttgtgactctcgtggctgtcatacttctgtcactagttacgcgagtttctcctgtccaagtgtagataccttgtagttaggtaattgtgtggtgtgattgctgaaggggcccttgcagattggttcacagaggagatttcgtgatctcctttttctattcttctatgttgtttatattgaattttcaccaaatctgatcatttgtttcttgtaactgttacttgggtttcctttccattttcactgtcagtgattccactccaggttctcattgcttcaggccagtggtgctgcagtagtctcttacttgataatattcatgtagttgacatatatgtggagggtgtagtatgtgtcatcttttatcccaaaggcagattagttttcagaaaatttattttatattatttaactactcaaggatctacagtagctctgttatttactgcaacaagtccttcctcttctacctgagttttttttttttttttgagacagtctcgctctgttgcctaggctggagtgcagtggcgcaatctcggctcactgcaagctccgcctcccgggttcacatcattctcctgcctcaccctcccgagtagctgggactacacatgcctgccaccacgcccggctacttttttgtatttttagtagaggcggggtttcactgcgttagccaggatggtctcaatctcctgacctcgtgatctgcccgcctcggcctcccaaagtgctgggattgcaggagtgagccactgcgcccggcctgagtttttaatggaatagttcagatatacacaaatttttgggtaaatcaaaacatgtatcttcacctttcagcttaagaactaaaatgacaaatacagttaaaatctttttttttttttaagagacagaatcttactccattgccccaacatgatcataattcactgtagcctcaaactcgtgggctcaagagatcctcccacctcagcctcctgagtagctgggattataggctcatgctacaggatactggctaattttaaaatattttgtagagataggatctctctctcttgcccagactggtcttgaactcgttgcctcaagcagtcctcttccttcagccttccaaagtgccgggattatagatgagagccaactgcctggccagctgaagtcttctgtgtgtttttctcaattgaaatcccttcctttgagctatgtgtattttatttttcttattttttcacttcatgtctatccttaaacaatagagtattgtataaatgatataaaaatataagtagtcttctgcaacttgcttgattcttttccttcaggtggtttttgagatttattcagattgatgacacgtagttctagttcattccttttcgctgccatatagtattctacaggttgactataccacattttattttcttgttgctggacatttggattattttaaaaatttcaaatctgtaacaaatgctcatgaacaagtttaagtttgcctttgcacgtgtggagaatttctctagggtatgcctttaggagtggaatttatagagtacctatatcttttgactaataaagagattgccaaacagctctccaaagtgactttactattttcatccctggctggcaccggtctgtggaagttcttatcacttcttgtccttaataatgcttggtattgttagactgtttaattattgtcaatctggtaggtgtgaaagggtatcttatttgattctcatttttactttttaaattactggttagagcaagtgtcttttcatggcaagtaccttttcatggctattcaggtttcttctttcacattttacctgttccatatatatttatctttttttgcactgattcttagcagttccttatttttctctatgttagtttatttgtttatttatttttttgagatagagtctcgctctgtcacccaggctggagtgcagtggtgcgatctcggctcactgcaagctccgcctcccgggttcatgccattctcctgcctcagcctcccaagtagctgggactacaggcgcccgcctgcacgcctggctaattttttgtatttttagtacagaaggggtttcactgtgttagccaggatggtctcgatctcctgacctcgtgatccacctgcctcagcctcctgaagtgctggaattacaggcacccgccaccacgcccccagctaattttttgtatttttagtagagatggggtttcactgtgttagccaggatggtcttgatctcctgaccttgtgatctgcctgcctcggcctcccaaagcgctgggattataggcgtgagccaccgcgcccagcctatgttagtttatttttttatttgtgtttttattttgagatgggaatcttgctgtgttgctcagggtggtcttgaactcctgagctcaagcagtcttcacacctcagcctctcacatagctgggattacaggtgtgcatcacttgtgcctggctcctaaccattttaatcttaaaaaaatttttttttttagagtgggtgtggtggctcacacctgtaatctcagtgctttggaaggctgaggtgggaggacgcttgagctcaggagttcaagaccagcttgggcaagatagcaagacactgtctctaccaaaaaattaaaaagttagttgggtgtggtggcttgcacctatagtcctctctactcaggaggctgaggcgggattgcttgagcacaggagtttgaggttacagtgagctatgattgtaccactgcactctagcctgggtgtcagagtgagaccctgtctataaaaaaaaaaaaaaatttttgtttatggaaattttcaggtgtatacaaaggtggagcagcacgaggagtccctatgcattcagctcctgggttcagccctcattcccacacacttcaatcatgtttcctggagagcttctcagttattatagattattaagcttttttattttattgtggaaactgtcaaatatataaaaaagtagagaaaacagtataataaaagctttttaatccattgcccagattcagtagttatcaaaattatagccaattatgtttcatatttataccactttccctactggattattttgaagcaaaggcctgacatgaaatcattttgtctctgcagatttcagtaggtatctctaaaaggtagtggtttttaaaacaataaacaacaaaattaacagtgacttaatgatatcaaatatctggccagtgttcaaatttccttgattgtcttttattttacatttggcacagaaataaattttaatgtagttgaattgatcaaaacttgtcttttatagtttgtttcttttctgagtctgaaggtccaccttaatttggctgtaacctacttattcagacctgattcttagtatttcctaccaagagttctctgatgtcccactctccagtcagaccatttttttttcctgtcttccacctgtgctgtattctcatggccaggtccctgcagttttcttgtgattttgttccccttttctgcctaattaaatcgtgtctgtattccccaagttctttcttgtccctgaagttttcagttgattactttgccctgcacttggctttttctttggatttccttcacagttgtagtcaatttgacaccagattgttttggtttgtttcttgtattttggctttatgcctcagctagcatatcctgtctggaagtcatggaccatatctgctgtttcctttgacatattgtaccctctatcgtgctgttcaataagtatttactgactttcatcaaatcaaatataaactattgaaagatcacactatgttcaagcaggccacacagtgtatttgaatattttacttttcttgaatgtgaattgagtgatttgaaacttggatgccagaggtattaatttggccaaggtgatggtctaattgcaatcgcatttgttttctagcagaacgttatgatggtggatatatatgatgaccagctgttctttttttttttttttttttgagttggagtctcgctctgtcacccaggctggaatgcaatggtgcaatcttggctcactgcaagctttgcctcccaggttcacgccattctcttgcctcagcctcctgagtagctggtactacaggtgcccgccaccatgcccggctaattttttttgtatttttagtagagacggggtttcaccgtgttagccaggatggtcttgatctcctgaccttgtgatctgcccgcctcggcctcccaaagtgctggggttacaggcgtgagccactgcacctgaccgatgaccagctgttcttacgattgaagaagttgctatctagtttggaggcttaagaatttccaaccagtgtttatccgagttatttttggctgcaaacccaaatataaaatttcacaattgacaattcaggaggcattcttttctttttccttcctgcaggtttaatagactacaacttccactgtttccgaaaagctattcatgaggtttttgaggtgggtgtgacttctcacaggagctgtggtcaccagactagtgcctccagtctgaaagcgctgacacacaatggcacgccacgaaacgccatctagtctgaatcccagcgtcggggctctgtgccagcttactcttcactccagggtcggatgccacgtgctacaggacatgggagctgctgcttgtgggaatctggtgcctgttccactagagacaaggggtagagtttctcatttggatgaaaaccccttcaactggtggtgtacaactgaagctactatatcttttttgaaaatggcaaaaaaaaaaaaaaaaaattctggagaccacagaactcaagtgtgtgtttctcctcttttgggtcccctttaagtagttgggatattttggacctggagataacaccagttacccatccttaccagggaatgttgccatcaattccagttgaaaataatagaaaagactgaatttttatatgcttcacttaggctttcatttgagtagactctaaaaattctgccttgcttaagttctaacactgcctctcagatttcagttttggacattgcacaactaagaccttttaaacgcatttgcttgctaactcggaagacacatagtctgcagcaagacattcctatattgaagaaatgagagaaaattttatgctgcatcaggtggagagcaaggctcaacggtggttgcattagttccctcggaagtattgaaaaaactttgaaatggaagaaaatttttgcacctatgttctgagtaccagatgtctgggttctttcttctgcattagataaatgatcatgctcagtgtaacaaagggaattaaaagttttcccacagtccccttctaggggagaaactcattgtgtcactgaaatgtttagcttactttaatcttgatatcagcctctacagaccttttattctaagctatcgagcttcttgattgcatttggttgaccacgagtgaccctaaggcattgggggactgtccactgggagttggagtgagcacgtggtgctgcaacaggcattgttttacatactttgtctccagtattctgacaccaagtgtcaactgtggtactttctttgcctaggatatgaattcataattgttgcttttgttgatggttgataccctttccattgatttaaacctaacacattatttctattccacatgcccagtagacatatattccaaagccactggaccacttgagtacataagtgccactgtttaatgcaatatgtatattcaggtctgtaaagctaacagtgtgacttggagtgcttcctgcagatgattctgacttgagtatttacatggaccatggtgatatccaaaagaaaaatgctttttatatttatagattatttcattgaactatatatgaaatgggtatcaataaatgtatttactccaaaatcagcgtttctccttgcctgaggtatggagggtggtggcggaacgttgggttgtcccactttgccgttttctcatccatttctttttcttttgctgcttcctgtggttaatgtttcttatgtgtcagagcttcaggttctatcccgatgtgggaatttcatggccttgtgtctaggtatctcccctggcccatttctgctctagggtagtaaatctaagctcaggtgaaaatgtttttggttgggtgtttcatatacacaaatctcacacatggtggggagtatcctggtcctggcatcattaatgtgttaatccaacctaagaaggagtgaggagatgagtgaagtaaaacacacttaaacaattgtaccgattccagcttgttttctgtttcctccagttgctgacatactcattgactcttaaatgtcagttaaataattgtttgtctatacaaacaggttgggtctaaactaatcagagaaaaatagacattagtttatcagtgggaggaagacagattgaaagatctttaaattttgtaattggactactttagaagctgttttaattctgaaatggaaatcacagaaacagcttgaaaaaactcttgtgaaactatctaatcctgtcttctttttcagattttggaaacaggtgcagagggataaggagccttgttgaggctgtagctaggaagactgtataacttaaattccagatactgttgagagtggaagggatgccattagtaaggatgcctgagcagcaggtgtgaactggcactgttgagggtacactaagggtggccagcctcatcatagatctaattagtggcaaaacagggcttgtcctccaggcctggcagcccagcgtggcatgcctttacttgcagcctccggccttaggctcccattggttaaatggagagaatatttcaagatgcatgtggtacatagatgcccaataaatgttatgttttcctgttactgaaaattataaattcagtcagtgattaaggagaagtctttaattgtgaaatagaaagtaaatgtgaaaggagacaactcaggatgaagaaaacggagaataaaatgatcagggttttgcttgaaatgttttgcatcccagtggatgttgatctctaccagtctacttcaaagagaactaggacagatggttaaaaaataccttaaagtcttaagcagcaaggtattttagctatttcacataccaccacctctcccattcacattcatatatacacacacatacatatatgcatgtatataatatctcaatatagaatgctggaggtatttgggagttaatttaccttctacatcttgagttctgtgtggagaaatgatttaaaagataaaatcaagcattgttggagaaagcactgtgtgtgaattttggactttggtaaggatctctatcctttgttttgcaaatgctgaaagcccttccagttattcaaaagagattattagtaccactgttttccatctaagctagtaagtaagctagttagtttaaatgctccccctgtccctcttgggggtcccaaaggaacatagtctgtaaggggaatgtggacagcagctgggcataactggagaggttttttttttgttttttttttttttttgagacaaaatttcgctcttgtcacccaggcggctggagtgcaatggcgcaatcttggctcaccgcaacatccacctcccggattcaagcgattctcctgcctcaggctcctgagtagctgggattacaggcatgcgccaccacacccggctaattttgtattttttcggtagagatggggtttctccattttggccaggctggtcttgaactcccgacctcaggtgatccacctgcctcggcctcccaaagtgctgggattacaggcatgagccaccgtgccaggtgagtgttatttgttaatagtaacttcccggaacggtacattaggatactttggatacaaataacatccaagaaggacttgaagggaaagccaaccaccactaattattttaggtggtttacgtgtattaccttgtaatcttcacaactccttgggaagtaggtgttatattcctatgttacagaaggggaaatagatacagaacggctcaattgtaaagtggtagagttagaatgggaacccatgcagtttgattccataacctgcagccgcaaactaccactcgaccttcctttcctagtagggagggcgagtttgctcactggtgtgttttgaaagaaagaaaacaacaacaacaacaaaaggattctatagttaagttttggaaacttgcaatctgtagtctctctttggagattttctacatacagtcaaatatgaaaggttctgagaagacctgcaataaggaagcctgtttaccttggtttatatcccatgttcctaggtttatttgacacattaaagaaatgcatattcattcaatcagtgtgtaataaattcacagttttgaaatgttttcatgagattggaagtatgatttttacactgttttccaagtatcttaatacaaccatcaccaaactggtttcttggatggctagttcaacacctgtctttgtaggtagtgagcaggaagcatatttaactactctgtaacatttcctcagtatctctactcatttaagccagatgtgctgcgaagcacaggcagcttgtctaccttttcagcctgtttggtgatggtgtccaagtccttagtgtatggcctctaggtggcagtgttgtattatctaaacacagcttcttgctttctggcttctgcatgtgtgctctgtcctgaaagtttgtattgcccgtatcacctaagtgcacacctaacttagagatccaaaaaattcctgaagtattttccctaggataacattcaggactgatttgagacatcttattggaagtggagcagttgatgatttccactttttagtgaggggttgggtaaaacgaaggtcattaacatcatttgctttatgtattactagttacaaaagggccttaagacagctgtagccacattcctatagcaggcagaacttcttgcttcctcttctaatccatctgttgtaaatgtgtgtggtcttcaagactccatggaaagaaatgccacatatttgaattaaaatatctgttttcaccacttttctttgtgtcaaatgaggtttgttgaaattatttcacacttatgcttgagagataaaatatggcaaaggaaaaggctgcagaaccttatccttccatgggtacttatttttccttttttttttttttttgagacaaggtcttgctctgtcatacaggctggagtgcagtggcacgatcatagctccctgcgacctcaacctcccaggctcaagcgatcctcctgcctcagcctcccgaatagctgggactacaggcatgcaccaccatgcctggctaattttctttttaatgtagagatgagggtctctccatgttgcccaggctggtctcagactcctgggatcaggcaatcctccactgcctcagcttcccaaagtgctgggattacaggtgtgagtcattgctcccagcttgtttttctttcttctagagccatgtaattgcttcacaatccccagctgtgactttgctctgcaaagacaaattttagtgtaaaaagaactagatacaccagtgcatcttcagacctgtttaaaatataattgagaaaattgcaaaggactgttataatgaggaactgaatggcaggaaactagttgttcctccccacacttgaaaatgccagttactaccaacgtgttgcccgcaaagtgctgcaacttccactttaagattcttacactttaaaatgcatcttttgaactgatcaaatatatatatttgttattgtgtgttttgttttgagatggagtctcactctgttgcccaggctggagtgcagtggcgtgatctcggctcactgcaacctccacctcctggattcaagtagttctcctgcctcagccttctgagtagctgggattacaggcgtgcaccaccaggcctggctaatgttttgtgcttttagtagagatggggtttcaccatgttggccaggctggtctcgaactcttaacttcaagtgatctgctcgcctcggcctcccagagtgctgggattacaggcgtgagccaccacacccagcctggactgataaaatattagaaggcatgtgggagacaattaatttggtttattacaaagtaacctgccgaacagacaggaacttgacttagagaaatggaatattaattttctacaatattctttttgcttttctttaaaaaagaggtgctggcacacacattttagcaaattgtgaatattccttcctttctttccatggcctctctcttatctccatgcaaattggcatgcaaactttgtgttccaggtaatgaggctccagacagggcctatctttctctgaaaagcagtgctggcatgttctgtactgaggctttttcccagaaaatgtactgcctctacagctttggaagatgaactgagaaataacgcttataaccctaccaaacatttctcgaatatctgtcttgactttggaaagggagctattggccatttccatgcttggaggattcttttcttctactgcactgtagttcttcctggctagatgtctagcacggaggctccttggactagttcctcacatgacccctgtggcagtctattgatgggaacgggacaattgagaaaggcaggcaggctgtctggcaaaaagaaactcattagggtcaggggccacaggatctccatggagatgttctctggactactagagtgttgaggctggatgaaggggaagagggctgagctagagatcgaattggcatactgagtgggagcagggtggggtgggaggcagaactgggccttagggagggccttggtcagtcaatggaaggaagacagctggaacagaagttagaatgattcatgcagtgagaaggaaaccaggtagaaagggaggaatgctcaccactgaaatgtctcttatttgttgaaatgaaattaaggtctctaatttgttcttatccttcaggtttctgtgcctggaatctggaaaaggagacagattctcctagattttgcctaggaatgttagtgaccttgagaggccttccaaatggagatctgggccacacagtggagatctcgacctgcctctgtaggtccttgactctcctcttccaatgtatcaagtccttcatttattcttgatttctttcagatccaaaataatggtcaaaaaagtgctgtttagctggtattattttcatgttatcccttaccacagtttatctcaattctcacaggagcctcaatgcttatctcttagatccttttcttcttttaaaaaatttgggctagcctatactaataattgtactagtttaattaaaattatgattagcagtagcatgcgtatcttaatatttgagagcttacagcttgccagccgttgtgctaagagccttacttgtgccttctcctctaatccatccagtgtaatgaggttggagctattgttgtggtccattttacagatgagaaaactgaggcacagagaacctgcaggaacatattgctagttttattggcatagcttggaattgaagtcccatctgtctgatgccagagcaaagatctgccttcctgatagtaacagagcttcttagaggctgccaggaaggaaggaagaaggaacgagggaaaatgctacattgggactccgagcagcttatcccgggactttctgagagcagctgtacacacccgttgtggcagaggcagaataagctttcttctccttgggcatagagataatatttccagccactcttgcaattagggatggctatgtgagttctaccaatggaatgtgagtggaggtgacatattccatttctaggcgtagcccatgtaatcatctcaggcatgatcctccatgttcttttcccttctactagatcactgcagatgagcacagaaacactgttgaaaatgcagagccttgacacggaaggaatctggattcctggatcacacagtggaaggctcatctgctgaccagaaacacttgcattggactgatgagcagtacatagatgtctctgctgttaagcttttgagattatgggctttatctattataacagctagtgttaccctaacttacacactaacatactgtatgggtcatgattcttggctatgagctcaggcagatagtgggtgaatgaaccagaaagatccagtttttgtgaccagttacaaaatgccagaaagaaataatgtttcttaggcaaaagagattatagtgattactagaatttgaagtcgggtttattggatactcatcagagtgaacttctcatgcgaggagatcaccgaactatcttaggagtccgtggatgggttacagaggctttaggagcccctgaatttgtgtgcaaaattatatgtaccaactggacagagagaacctggccttttcagtctccaaaaaggtgaggaaccagttgtgaatctgagcataagccacttaggaggcttatttagaacagaaatgcaaaattggacttggctgcatgttctggatttcacatttttttccctaggatttccaattctgccccttatatatgtaaaaactataaaaggagagcttttcttgaaactgatacattggcatatggtacaagtgtcaatgagcaagtaaaatagtctgggtgagggaaatcatgaatataaaacgtaattgtcttgtggtcaagtagaacatgaagccaatcattttgggaggaaaaataagcctagctcattagttccccccttctggcctgccagcttcctcttctctgtgtgtccgagggtcactgcccttcgtgtcccctgacgggtcccttctgtaacgaggcttcctcgattcggcatctcccttcttgatggcattcctcagtggaggggaggaagagtttcctcaacccactgagggttcctggccaggtctagtaaaacagacaaagacaggttaacaggatcagcaccataagacaaggcaagaaaagaaagaaaaaaaagacaggttaacaggagaaaagcataatagatttatttaaagttttacatgacatgggccgggcgtggtggctcacgcctgtaatcccaacactttgggaggctgaagggggtagatcacctgaggtcaggagttcaagaccagcctgccaacgtggtgaaaccccatttctactaaaaatacaaaaaaattagccgggcatgatggcgggcgcctgtaatcccagcaactcgggaggctgaggcaggagaatcgcttgaagccaggaggcagaggttgcagtgagccaagattgcaccattgcactcaagcctgggcaacaagaacgaaacttcatctcaaaaaaagaaaaaaggaaagaaaatgaaataatgttttacatgacatgggagcctttagaaacgaaaaccagagacacagggaaaactgtccatttttatgcttcaattagatgaagaacggacagccgtgtagaaatgggattggacacagagggtaagacctcgtggtaacagactgaagggggacaccctgcaaggtctgtccagattcttcttggcctttctatgcaacattccttcctccagggtatagggcaggacacctcctggaatgagggtcttaagacctactatcagacaaggtaggtcagagaatttccttatggttagctcttacacagaaaggtgggaaaatgttagagtaacattataggttttatggctggctttgggagagaggggttctagttgctatgacctaccttggggaagagggattctagttttttgtttcttggcttttttttttttttttaagacagagactcgctctgtcacccaggctggtgtgcagtggcgcgatctcagctcattgcaacctctgcctcccgtgctcaagggagcctcccacctcagcctcctgagtagctggaactataggtagtgccactacgcccagctaattttcttttgtatttttagtagagacagggttttcccatgttgcccaggctggtctcaaactcctgggatcaaaatgctaggattatggatgtgagctaccatgcccagccagaatttcagttttatggcctgcctttaggtaaaaatgggagcaggagaaagaagagcaggagaagatcagaaagagacttctgagcccctttccttcagttcaaagtattcagcatgtctaggcatcacactttagggtactgtgttctgagccccaacattttgaagattcctggtccacattttggcccatctaatttctttttcaattatcctgtatatttaatgaaattctgcaagggcaatcactaggctgaagggcagagtctgtgtatttgccagtcctcttttttatgcagtaggggtgcctggcacagggctggcttcatagtatacactcagtacaggcttcactgtgctgggtaagaatgggaaaaatgtaaacaacatgactgggagacacaacttgtgatccgtttaaggctgctcaggggcagtggttgctgggcttgctgtgggtgacagtgaggctggggtccaagccagatgcttattcattcattcaacaaatccttagtgagtgcttgctggatgcaaggctgtgttctaggttcccaggatctatcagtgaacaagagagcaaagtccttgccattatagtgctgactgaatttcaacctgacaaaagttaggatgcagatgggggagaacggagtctcagagaagtgaagtggcttgccctaaatcacgcagctggtaagccaatgagtgctgaccttctgactccaagccctacacatatcaacacatcaagagaataaggaggataaacattagaggtgatttaacaacaaattctggtgtgtgtgtgactttacacacctagaatgaacagattgtttatgtcaaaacgtactattaaattaaacaagagaaactaggaaatatgcttattatgtataatagagaaagttaattttttttttttgagatggagtttcactctcattgcccaggctagagtgcaatggcacgatctcagctcactgcaacctccacctcccgggttcaagtgatttttttgcctcagcctcccaagtagctgggattacaggcacccgccaccatgcctggctaattttttgtatttttagtagagacggggtttcaccatgctggccaggctggtctcaaactcctgacctcatgatccacccaccttggcctcccaaagtgctgggattacaggcatgagccactgcgcccagcctgaaagttaatattttttatacaattttacaaatcagtaaaaaatacattctaaaacaaaatgagggaaagatattagtgtgtgacacgaagtagaagaggccaaaaccatgaaaacccataaaacctcactaataatagaagaaatgaacactaaaataataagcttccctttctctttatcaaatgggtatttttttcaaaggatgatattcaatgttgataagaatacaagaacgggatctttcatacatgttttagccatcaattttaggatgttcttaaatagattgattcttgtactttaaaataatatagattcgaaacatctcattacttttttaaaaccatattaacagtgttttccaatttttctacagtgaatgaatatgtatcctttttataattaacaatatacatatatgcatttttaaaaatcctttaaaaattgaaggggataggaggaggaggtgtttattggttttaatatgtcgtagaaaatggtcttagactgagagcagggacccgagt

SEQ ID NO: 217 - DNA, 2733 bp, Homo sapiens
aagcggctgggcttcggctcggggcctatgagagccgggctccggggggcgggccggactgtggcggctgccgggggcggtggcggtggtgcggcggcggcggaggcggactggggaggcggcggcctggctcggcctgcctggcctgtcagggcgcgggcggcggcggctccagcaccatgtccctgcagtacgggcggaggagacgcccctcgccggcagttacggcgcggccgattcgtttccaaaggacttcggctacggcgtggaggaggaggaagaggaggcggcggcggcgggcggaggggttggggcaggggcaggcggtggctgtggtccggggggcgctgacagctccaagccgaggattctgctcatgggactccggcgcagcggcaagtcctccatccagaaggtggtgtttcataagatgtcacccaacgagaccctctttttggaaagtaccaacaagatttataaggatgacatttccaatagctcctttgtgaatttccagatatgggattttcctgggcaaatggacttttttgacccaacctttgactatgagatgatcttcaggggaacaggagcattgatatacgtcattgacgcacaggatgactacatggaggctttaacaagacttcacattactgtttctaaagcctacaaagttaacccagacatgaattttgaggtttttattcacaaagttgatggtctgtctgatgatcacaaaatagaaacacagagggacattcatcaaagggccaatgatgaccttgcagatgctgggctagaaaaactccatcttagcttttatctgactagtatctatgaccattcaatatttgaagcctttagtaaggtggtgcagaaactcattccacaactgccgaccttggaaaacctattaaatatctttatatcaaattcaggtattgaaaaagcttttctctttgatgttgtcagcaaaatctacattgcaacagacagttcccctgtggatatgcaatcttatgaactttgctgtgacatgatcgatgttgtaattgatgtgtcttgtatatatgggttaaaggaagatggaagtggaagtgcttatgacaaagaatctatggcaattatcaagctgaataatacaactgtcctttatttaaaggaggtgactaaatttttggcactggtctgcattctaagggaagaaagctttgaaagaaaaggtttaatagactacaacttccactgtttccgaaaagctattcatgaggtttttgaggtgggtgtgacttctcacaggagctgtggtcaccagactagtgcctccagtctgaaagcgctgacacacaatggcacgccacgaaacgccatctagtctgaatcccagcgtcggggctctgtgccagcttactcttcactccagggtcggatgccacgtgctacaggacatgggagctgctgcttgtgggaatctggtgcctgttccactagagacaaggggtagagtttctcatttggatgaaaaccccttcaactggtggtgtacaactgaagctactatatcttttttgaaaatggcaaaaaaaaaaaaaaaaaattctggagaccacagaactcaagtgtgtgtttctcctcttttgggtcccctttaagtagttgggatattttggacctggagataacaccagttacccatccttaccagggaatgttgccatcaattccagttgaaaataatagaaaagactgaatttttatatgcttcacttaggctttcatttgagtagactctaaaaattctgccttgcttaagttctaacactgcctctcagatttcagttttggacattgcacaactaagaccttttaaacgcatttgcttgctaactcggaagacacatagtctgcagcaagacattcctatattgaagaaatgagagaaaattttatgctgcatcaggtggagagcaaggctcaacggtggttgcattagttccctcggaagtattgaaaaaactttgaaatggaagaaaatttttgcacctatgttctgagtaccagatgtctgggttctttcttctgcattagataaatgatcatgctcagtgtaacaaagggaattaaaagttttcccacagtccccttctaggggagaaactcattgtgtcactgaaatgtttagcttactttaatcttgatatcagcctctacagaccttttattctaagctatcgagcttcttgattgcatttggttgaccacgagtgaccctaaggcattgggggactgtccactgggagttggagtgagcacgtggtgctgcaacaggcattgttttacatactttgtctccagtattctgacaccaagtgtcaactgtggtactttctttgcctaggatatgaattcataattgttgcttttgttgatggttgataccctttccattgatttaaacctaacacattatttctattccacatgcccagtagacatatattccaaagccactggaccacttgagtacataagtgccactgtttaatgcaatatgtatattcaggtctgtaaagctaacagtgtgacttggagtgcttcctgcagatgattctgacttgagtatttacatggaccatggtgatatccaaaagaaaaatgctttttatatttatagattatttcattgaactatatatgaaatgggtatcaataaatgtatttactccaaaa

SEQ ID NO: 218 - protein, 333 aa, Homo sapiens
MGLRRSGKSSIQKVVFHKMSPNETLFLESTNKIYKDDISNSSFVNFQIWDFPGQMDFFDPTFDYEMIFRGTGALIYVIDAQDDYMEALTRLHITVSKAYKVNPDMNFEVFIHKVDGLSDDHKIETQRDIHQRANDDLADAGLEKLHLSFYLTSIYDHSIFEAFSKVVQKLIPQLPTLENLLNIFISNSGIEKAFLFDVVSKIYIATDSSPVDMQSYELCCDMIDVVIDVSCIYGLKEDGSGSAYDKESMAIIKLNNTTVLYLKEVTKFLALVCILREESFERKGLIDYNFHCFRKAIHEVFEVGVTSHRSCGHQTSASSLKALTHNGTPRNAI

SEQ ID NO: 219 - DNA, 2683 bp, Homo sapiens
aagcggctgggcttcggctcggggcctatgagagccgggctccggggggcgggccggactgtggcggctgccgggggcggtggcggtggtgcggcggcggcggaggcggactggggaggcggcggcctggctcggcctgcctggcctgtcagggcgcgggcggcggcggctccagcaccatgtccctgcagtacgggcggaggagacgcccctcgccggcagttacggcgcggccgattcgtttccaaaggacttcggctacggcgtggaggaggaggaagaggaggcggcggcggcgggcggaggggttggggcaggggcaggcggtggctgtggtccggggggcgctgacagctccaagccgaggattctgctcatgggactccggcgcagcggcaagtcctccatccagaaggtggtgtttcataagatgtcacccaacgagaccctctttttggaaagtaccaacaagatttataaggatgacatttccaatagctcctttgtgaatttccagatatgggattttcctgggcaaatggacttttttgacccaacctttgactatgagatgatcttcaggggaacaggagcattgatatacgtcattgacgcacaggatgactacatggaggctttaacaagacttcacattactgtttctaaagcctacaaagttaacccagacatgaattttgaggtttttattcacaaagttgatggtctgtctgatgatcacaaaatagaaacacagagggacattcatcaaagggccaatgatgaccttgcagatgctgggctagaaaaactccatcttagcttttatctgactagtatctatgaccattcaatatttgaagcctttagtaaggtggtgcagaaactcattccacaactgccgaccttggaaaacctattaaatatctttatatcaaattcaggtattgaaaaagcttttctctttgatgttgtcagcaaaatctacattgcaacagacagttcccctgtggatatgcaatcttatgaactttgctgtgacatgatcgatgttgtaattgatgtgtcttgtatatatgggttaaaggaagatggaagtggaagtgcttatgacaaagaatctatggcaattatcaagctgaataatacaactgtcctttatttaaaggaggtgactaaatttttggcactggtctgcattctaagggaagaaagctttgaaagaaaaggtttaatagactacaacttccactgtttccgaaaagctattcatgaggtttttgaggtgggtgtgacttctcacaggagctgtggtcaccagactagtgcctccagtctgaaagcgctgacacacaatggcacgccacgaaacgccatctagtctgaatcccagcgtcggggctctgtgccagcttactcttcactccagggtcggatgccacgtgctacaggacatgggagctgctgcttgtgggaatctggtgcctgttccactagagacaaggggtagagtttctcatttggatgaaaaccccttcaactggtggtgtacaactgaagctactatatcttttttgaaaatggcaaaaaaaaaaaaaaaaaattctggagaccacagaactcaagtgtgtgtttctcctcttttgggtcccctttaagtagttgggatattttggacctggagataacaccagttacccatccttaccagggaatgttgccatcaattccagttgaaaataatagaaaagactgaatttttatatgcttcacttaggctttcatttgagtagactctaaaaattctgccttgcttaagttctaacactgcctctcagatttcagttttggacattgcacaactaagaccttttaaacgcatttgcttgctaactcggaagacacatagtctgcagcaagacattcctatattgaagaaatgagagaaaattttatgctgcatcaggtggagagcaaggctcaacggtggttgcattagttccctcggaagtattgaaaaaactttgaaatggaagaaaatttttgcacctatgttctgagtaccagatgtctgggttctttcttctgcattagataaatgatcatgctcagtgtaacaaagggaattaaaagtttagcttactttaatcttgatatcagcctctacagaccttttattctaagctatcgagcttcttgattgcatttggttgaccacgagtgaccctaaggcattgggggactgtccactgggagttggagtgagcacgtggtgctgcaacaggcattgttttacatactttgtctccagtattctgacaccaagtgtcaactgtggtactttctttgcctaggatatgaattcataattgttgcttttgttgatggttgataccctttccattgatttaaacctaacacattatttctattccacatgcccagtagacatatattccaaagccactggaccacttgagtacataagtgccactgtttaatgcaatatgtatattcaggtctgtaaagctaacagtgtgacttggagtgcttcctgcagatgattctgacttgagtatttacatggaccatggtgatatccaaaagaaaaatgctttttatatttatagattatttcattgaactatatatgaaatgggtatcaataaatgtatttactccaaaa

SEQ ID NO: 220 - protein, 333 aa, Homo sapiens; identical to SEQ ID NO: 218
